United States Patent Application Publication US 2018/0126003 A1 - sequence listing, part 63

SEQ ID NO: 112929 - DNA, 1426 bp, Artificial Sequence
  derived and/or modified sequence
aggcagctgtccccagcggccagtgtcccccatgccggatctctaggatctggaaggccgctgctgccaggaacaagaagtcagagagggccaggctgagcaggagcagcgccagacgcgtgccagctccatgccgggcctgggagccggccagccacgccatcaacccattggctggcagcccaaggagcagcagggccaccaggaagaccgtgtcccagccaccttggggtcccaccgacatcgtcctgactccctgcacgacgctgctcagaggacatacgggcccctgctcaatcgagtcttcgggaaggccaacatgagcaggggatgaaggaggaaggatgacagagccgtggctggccctggggacatcctggactctccccctgcaggaccgcgaactgggccccgaggagctagacgagcttcaggccgccttcgaggagtttgacactgaccgtgacggctacatcagccaccgggagctgggtgactgcatgcggaccctgggctacatgcccaccgagatggagctcctggaggtctcgcagcacatcaagatgcgcatgggcggccgtgtggactttgaggagtttgtagaactgataggcccaaagctgagggaggagacggcgcacatgctgggggtgcgagagctgcgcatcgccttccgagagtttgacagggacagggatggacgaattacggtggcggagctgcgggaggcggtaccggctctgctcggggagccgctggcgggtcctgagctggacgagatgctccgagaagtggacctcaatggggatggcaccgtagactttgacgagtttgtgatgatgctctcccgccactgaggctccaggagggaatatctgttgcccctgcggccccagacaccagccagacccaggctgcaggcctcccccaggagcctccaggatggagatggagacccagcagcccccagactacttctatccctgaaaacacctggcctcaatgttggcttgttatgttacctgcccaccctcatccttacctcctcctactcaagctgcctggagaagacctgctctcagctgcccaccgttcctcagtgtgagcaagatttgggtctctccagacctctgggaggtagggagttccctggcactggcagcattcagtggggaccccccagtggcatgatgaatggagaggatggctggaccccttccactacttatgtttataattttttttttttttaatgaacttgagccgggtgcagtggctcacacctgtaagcccagctgtcagggggcagaagcgggaggatagcttgagcccaggagtgcaagacctgcctgggcaatatactgagaccccattctccacaaaaaggaaaaataaaagacaaaaaaacaaacaaaaaaccaaaaaa

SEQ ID NO: 112930 - DNA, 513 bp, Artificial Sequence
  derived and/or modified sequence
atgaccgagccctggctggccctgggcaccagctggaccctgcccctgcaggacagagagctgggccccgaggagctggacgagctgcaggccgccttcgaggagttcgacaccgacagagacggctacatcagccacagagagctgggcgactgcatgagaaccctgggctacatgcccaccgagatggagctgctggaggtgagccagcacatcaagatgagaatgggcggcagagtggacttcgaggagttcgtggagctgatcggccccaagctgagagaggagaccgcccacatgctgggcgtgagagagctgagaatcgccttcagagagttcgacagagacagagacggcagaatcaccgtggccgagctgagagaggccgtgcccgccctgctgggcgagcccctggccggccccgagctggacgagatgctgagagaggtggacctgaacggcgacggcaccgtggacttcgacgagttcgtgatgatgctgagcagacactag

SEQ ID NO: 112931 - DNA, 240 bp, Artificial Sequence
  derived and/or modified sequence
atggccgccgagatcgacttcctgagagagcagaacagaagactgaacgaggacttcagaagataccagatggagagcttcagcaagtacagcagcgtgcagaaggccgtgtgccagggcgagggcgacgacaccttcgagaacctggtgttcgaccagagcttcctggcccccctggtgaccgagtacgacaagcacctgggcgagctgaacggccagctgaagtactaccaggcctag

SEQ ID NO: 112932 - DNA, 240 bp, Artificial Sequence
  derived and/or modified sequence
atggccgccgaaatcgattttctaagggaacagaatagacggctgaacgaggatttcaggcggtatcagatggagagcttcagcaagtatagttccgtccagaaagcagtgtgtcagggagagggtgatgacaccttcgaaaatttggtgtttgatcagagcttcctcgcccctctggttacagagtatgataaacacctgggtgagctgaacgggcagctgaagtattatcaggcttag

SEQ ID NO: 112933 - DNA, 240 bp, Artificial Sequence
  derived and/or modified sequence
atggctgctgagattgacttcctgcgggagcagaacagaaggctgaatgaagacttccgccgctaccagatggagagcttcagcaagtacagctctgtgcagaaggctgtgtgccagggcgagggagatgacacctttgagaacctggtgtttgaccagagcttcctggcccccctggtgacagaatatgacaagcacctgggggagctgaatggccagctgaagtactaccaggcctag

SEQ ID NO: 112934 - DNA, 240 bp, Artificial Sequence
  derived and/or modified sequence
atggccgccgagatcgacttcctgcgggagcagaaccggcggctgaacgaggatttcagacgttatcaaatggaaagcttcagcaaatacagttccgtccagaaagctgtatgtcagggggagggagatgacacctttgagaatttagtgttcgatcagtcattcctcgctccattggtaactgagtacgataaacacctaggtgagctcaacggtcaacttaaatattatcaagcctag

SEQ ID NO: 112935 - DNA, 240 bp, Artificial Sequence
  derived and/or modified sequence
atggcagctgaaattgatttcctgcgtgaacaaaatcggaggcttaatgaagacttcagacgctatcagatggagagctttagcaaatattcatccgtgcagaaagccgtttgccagggagagggggacgatacatttgagaacctggtttttgaccagtcttttctggcgcctttagttactgagtacgataagcacctgggggagttgaatggacagcttaagtactaccaagcctag

SEQ ID NO: 112936 - DNA, 1696 bp, Artificial Sequence
  derived and/or modified sequence
cgagtggacttccgctgctggcctggggcttcccagccgtcttggcgttgtcctctccaacccccgccgctccgcgtagaacgccgctctcaggctgccgtcaagctcccgcggcactctcctaggtggcccgacgagacccagagtgacccgcgggacgcctgtatcgaccgcgtcctcttcccaccagcgtgggattcggttgaacgtggagtccccagcaatcttcagtctctcaccagggccagggactcgtctggggcgcgggggaaagaagcgtggcggggctgtagatgccgcgtgagtaggatgcagattgcaccgctggagcgcttgacaaccaaccgagcgttggcttagttttgttttcccgcacagcaagctctctgtctttcagaggaaggtaaaggtggtgaaagctctaaactaaaattgtatcgaaatggctgcagaaatcgactttctgagagagcaaaatcgaagactaaatgaagattttaggcggtatcaaatggaaagtttttccaaatattcatctgtacagaaagctgtctgccaaggagaaggagacgacacatttgaaaacctagtatttgaccaaagctttttagctcctcttgttactgagtatgataaacacctaggagaactaaatgggcagctgaaatattaccaggcataacgaggaccttggaaaagttcacctttcaaaccaaatttatagttagaatttgctattctgatctcctagaccaagcttccttgatcttctcggttgaaagagagagaaaaaggctggcagaactgcctgttccacctggcccttgcgaaagtgtactccaggataagcttctctcctttagcttaggaagcacaatcaagactaatacacaatcatgaattagttaccgttttaagtgagattttgcatgcttttacatgtaaattcagggttttgtgtgtgtgtgtgtgtgtgtgtgtgtgtgtgcgcgcgcgcacactctccatttgctcattcacacttactgagagttgactacttattttttgctattttgcttttactcatattttcgccaactttaaatgctttcttttcttttgaaatcctaacatctttttactccttcagagaacgttaatcagaccttcatttaattccctttctggtgtgcattttattctgccttgtattttagttaggattttttttaaccatctttcctactatttttcaatgagcatgtctgtttaccttagcgccttgtatggtacggagagtttagatagttaatgaaggtggtgaatcagaaactgaatgaatgactgctaaaaaagacctccattttcttctttactgttagcattttaccttttgaaatactagaaaaatatacatacttatatgggcttcacctaaactgaggtgaattaactaagatatacattcaagatacaggaaccatctggtatttgttatagtgacatactccagaatatctttcatctgtttttcacaactacaagtcataggaattacatttataaacatttctcaccatgttacataaaatatttctattttatttatattctacttaaaatgaatgttttattgtgttctgtttattagtaaattatccatattaattatccctttgttataaataaagaataagtctttcttatctgtaaa

SEQ ID NO: 112937 - DNA, 528 bp, Artificial Sequence
  derived and/or modified sequence
atggccgccgagatcgacttcctgagagagcagaacagaagactgaacgaggacttcagaagataccagatggagagcttcagcaagtacagcagcgtgcagaaggccgtgtgccagggcgagggcgacgacaccttcgagaacctggtgttcgaccagagcttcctggcccccctggtgaccgagtacgacaagcacctgggcgagctgaacggccagctgaagtactaccagaagcaggtgggcgagatgaagctgcagctggagaacgtgatcaaggagaacgagagaagcgagctgagcagacagaagctgcacacccaggagctgctgagccagctggagatggccaacgagaaggtggccgagaacgagaagctgatcctggagcaccaggagaaggccaacagactgcagagaagactgagccaggccgaggagagagccgccagcgccagccagcagctgagcgtgatcaccgtgcagagaagaaaggccgccagcctgatgaacctggagaacatctag

SEQ ID NO: 112938 - DNA, 528 bp, Artificial Sequence
  derived and/or modified sequence
atggcggccgagatcgattttctacgcgagcagaatcggcgtttgaacgaggactttaggagataccaaatggaatccttctccaagtattcttctgtccagaaagcagtgtgtcagggggagggggacgacactttcgagaacctggtctttgaccaaagcttcttggcccctttagtgaccgagtatgataaacaccttggagaactgaatggacaactcaagtattatcagaaacaggttggtgagatgaagcttcagttggaaaatgtgataaaagaaaacgagcgctccgagctgagccgacaaaagctgcacacccaggaactcctttcgcaactcgaaatggctaacgagaaggtagccgaaaatgagaagcttattctggagcaccaggaaaaagccaatcgtttacagcggaggctgagccaagcagaggagagagctgcaagcgcttcccagcagctcagtgtgatcaccgtacagagaagaaaagctgcatcactaatgaatctggagaacatctag

SEQ ID NO: 112939 - DNA, 528 bp, Artificial Sequence
  derived and/or modified sequence
atggctgctgagattgacttcctgcgggagcagaacagaaggctgaatgaagacttccgccgctaccagatggagagcttcagcaagtacagctctgtgcagaaggctgtgtgccagggcgagggagatgacacctttgagaacctggtgtttgaccagagcttcctggcccccctggtgacagaatatgacaagcacctgggggagctgaatggccagctgaagtactaccagaagcaggtgggggagatgaagctgcagctggagaatgtcatcaaggaaaatgaaagaagtgagctgagccggcagaagctgcacacccaggagctgctgagccagctggagatggccaatgagaaggtggctgaaaatgagaagctgatcctggagcaccaggagaaggccaaccggctgcagaggcggctgagccaggccgaggagagagctgccagcgccagccagcagctgagcgtcatcaccgtgcagaggaggaaggccgccagcctgatgaacctggagaacatctag

SEQ ID NO: 112940 - DNA, 528 bp, Artificial Sequence
  derived and/or modified sequence
atggccgccgagatcgacttcctgcgggagcagaaccggcggctgaacgaggacttccggcgttaccagatggagagcttcagcaaatatagttcggtgcagaaggcagtttgccaaggggagggcgatgatacctttgaaaacctggtgtttgaccaatcctttctggcccccctggtgactgagtatgataagcacctgggagaattgaatggccagttaaagtactaccagaagcaggtcggtgaaatgaaattgcaactagaaaatgtgatcaaagaaaatgagcggtctgaattgtcacggcagaagctgcacacccaggagctgctgagtcagctggagatggccaacgagaaagtggccgagaacgagaagctaatactcgagcaccaggagaaagccaataggctgcagcgaaggctaagtcaggctgaggagcgcgctgcttcggcatcccagcagctctccgtgattacggtacagcggcggaaggccgcctcactgatgaatctggagaacatttag

SEQ ID NO: 112941 - DNA, 528 bp, Artificial Sequence
  derived and/or modified sequence
atggccgctgagatcgacttcctaagggagcaaaacagaagattgaatgaagattttaggaggtatcagatggagagttttagtaaatacagcagcgttcagaaggccgtttgccagggggaaggggacgatactttcgaaaatttagtatttgaccagtctttcctggcgccactggtgaccgagtacgacaagcatctgggtgagctgaatggccagcttaagtattatcagaaacaggtcggcgagatgaaactacagctggagaacgtgatcaaggagaatgaacgttccgagctgtctcgacagaagctgcacacgcaagagctgctcagccagctcgagatggctaatgaaaaggtggctgagaacgaaaagctcattcttgagcatcaggagaaggcaaacaggttacaacgccgactgtcacaggcagaggaacgagctgcaagcgctagccagcagctatcagtgatcacggtgcagcgtcgcaaggctgctagcctgatgaacctggaaaatatttag

SEQ ID NO: 112942 - DNA, 966 bp, Artificial Sequence
  derived and/or modified sequence
gagacccagagtgacccgcgggacgcctgtatcgaccgcgtcctcttcccaccagcgtgggattcggttgaacgtggagtccccagcaatcttcagtctctcaccagggccagggactcgtctggggcgcgggggaaagaagcgtggcggggctgtagatgccgcgtgagtaggatgcagattgcaccgctggagcgcttgacaaccaaccgagcgttggcttagttttgttttcccgcacagcaagctctctgtctttcagaggaaggtaaaggtggtgaaagctctaaactaaaattgtatcgaaatggctgcagaaatcgactttctgagagagcaaaatcgaagactaaatgaagattttaggcggtatcaaatggaaagtttttccaaatattcatctgtacagaaagctgtctgccaaggagaaggagacgacacatttgaaaacctagtatttgaccaaagctttttagctcctcttgttactgagtatgataaacacctaggagaactaaatgggcagctgaaatattaccagaaacaggtgggtgagatgaaattacaacttgaaaatgtcatcaaggaaaatgaaaggagtgagctgagtcgacagaaacttcatacccaagagctgctttctcagctggaaatggcaaatgaaaaggtagctgagaatgaaaagctaattctagagcatcaagaaaaagccaacagacttcaaaggcgtctaagtcaggcagaagagagagctgcttcagcttcccagcagctcagtgtgattacagtgcagagaagaaaagcagcctccctgatgaatctggaaaatatttaaaaatattcatagttcactcacagaactttagagttgggaaagcagttggactagaagtgtattgaaatggtaaagcctgcaaagtataatagttaaggcttgtgttatttcgcgtaagcattgttgttctg

SEQ ID NO: 112943 - protein, 1262 aa, Artificial Sequence
  derived and/or modified sequence
MEDGKPVWAPHPTDGFQMGNIVDIGPDSLTIEPLNQKGKTFLALINQVFPAEEDSKKDVEDNCSLMYLNEATLLHNIKVRYSKDRIYTYVANILIAVNPYFDIPKIYSSEAIKSYQGKSLGTRPPHVFAIADKAFRDMKVLKMSQSIIVSGESGAGKTENTKFVLRYLTESYGTGQDIDDRIVEANPLLEAFGNAKTVRNNNSSRFGKFVEIHFNEKSSVVGGFVSHYLLEKSRICVQGKEERNYHIFYRLCAGASEDIREKLHLSSPDNFRYLNRGCTRYFANKETDKQILQNRKSPEYLKAGSMKDPLLDDHGDFIRMCTAMKKIGLDDEEKLDLFRVVAGVLHLGNIDFEEAGSTSGGCNLKNKSAQSLEYCAELLGLDQDDLRVSLTTRVMLTTAGGTKGTVIKVPLKVEQANNARDALAKTVYSHLFDHVVNRVNQCFPFETSSYFIGVLDIAGFEYFEHNSFEQFCINYCNEKLQQFFNERILKEEQELYQKEGLGVNEVHYVDNQDCIDLIEAKLVGILDILDEENRLPQPSDQHFTSAVHQKHKDHFRLTIPRKSKLAVHRNIRDDEGFIIRHFAGAVCYETTQFVEKNNDALHMSLESLICESRDKFIRELFESSTNNNKDTKQKAGKLSFISVGNKFKTQLNLLLDKLRSTGASFIRCIKPNLKMTSHHFEGAQILSQLQCSGMVSVLDLMQGGYPSRASFHELYNMYKKYMPDKLARLDPRLFCKALFKALGLNENDYKFGLTKVFFRPGKFAEFDQIMKSDPDHLAELVKRVNHWLTCSRWKKVQWCSLSVIKLKNKIKYRAEACIKMQKTIRMWLCKRRHKPRIDGLVKVGTLKKRLDKFNEVVSVLKDGKPEMNKQIKNLEISIDTLMAKIKSTMMTQEQIQKEYDALVKSSEELLSALQKKKQQEEEAERLRRIQEEMEKERKRREEDEKRRRKEEEERRMKLEMEAKRKQEEEERKKREDDEKRIQAEVEAQLARQKEEESQQQAVLEQERRDRELALRIAQSEAELISDEAQADLALRRGPAVLATKAAAGTKKYDLSKWKYAELRDTINTSCDIELLAACREEFHRRLKVYHAWKSKNKKRNTETEQRAPKSVTDYDFAPFLNNSPQQNPAAQIPARQREIEMNRQQRFFRIPFIRPADQYKDPQSKKKGWWYAHFDGPWIARQMELHPDKPPILLVAGKDDMEMCELNLEETGLTRKRGAEILPRQFEEIWERCGGIQYLQNAIESRQARPTYATAMLQSLLK

SEQ ID NO: 112944 - protein, 358 aa, Artificial Sequence
  derived and/or modified sequence
MPAGGQAPQLTPVIPAFWEARGLPNSKGRDKVHICQCEEWKGHISYVERDITTSEIKSLPQVSVRAFHAASGTLEWRKGNGYGRGKGWGWGRVESREAGPSVDRDGGLRVCCSQRSAKPEKEEQPVQNPRRSVKDRKRRGNLDMEKLYSENEGMASNQGKMENEEQPQDERKPEVTCTLEDKKLENEGKTENKGKTGDEEMLKDKGKPESEGEAKEGKSEREGESEMEGGSEREGKPEIEGKPESEGEPGSETRAAGKRPAEDDVPRKAKRKTNKGLAHYLKEYKEAIHDMNFSNEDMIREFDNMAKVQDEKRKSKQKLGAFLWMQRNLQDPFYPRGPREFRGGCRAPRRDIEDIPYV

SEQ ID NO: 112945 - protein, 58 aa, Artificial Sequence
  derived and/or modified sequence
MEKLYSENEGMASNQGKMENEEQPQDERKPEVTCTLEDKKLENEGKTENKGKTGDEEM

SEQ ID NO: 112946 - protein, 50 aa, Artificial Sequence
  derived and/or modified sequence
MEKLYSENEGMASNQGKMENEEQPQDERKPEVTCTLEDKKLENEGKTENK

SEQ ID NO: 112947 - protein, 91 aa, Artificial Sequence
  derived and/or modified sequence
MEKLYSENEGMASNQGKMENEEQPQDERKPEVTCTLEDKKLENEGKTENKGKTGDEEMLKDKGKPESEGEAKEGKSEREGESEMEGGSERE

SEQ ID NO: 112948 - protein, 129 aa, Artificial Sequence
  derived and/or modified sequence
MEKLYSENEGMASNQGKMENEEQPQDERKPEVTCTLEDKKLENEGKTENKGKTGDEEMLKDKGKPESEGEAKEGKSEREGESEMEGGSEREGKPEIEGKPESEGEPGSETRAAGKRPAEDDVPRKAKRK

SEQ ID NO: 112949 - protein, 76 aa, Artificial Sequence
  derived and/or modified sequence
MEKLYSENEGMASNQGKMENEEQPQDERKPEVTCTLEDKKLENEGKTENKGKTGDEEMLKDKGKPESEGEAKEGKS

SEQ ID NO: 112950 - DNA, 1077 bp, Artificial Sequence
  derived and/or modified sequence
atgcctgcaggcgggcaggccccacagctgacccctgtcatccccgctttctgggaggcccgggggctgcctaattccaagggtcgcgataaagtccacatctgccagtgcgaggagtggaagggccacatcagttatgtcgagagagatatcacaacttcggaaattaagtccctcccccaggtcagcgtgagggctttccacgctgcatctggtacattagagtggcgtaagggaaacggctatggacggggaaagggttggggctggggacgcgtggagtcccgcgaagcaggaccgtctgtggaccgcgatggcggcttacgggtttgctgtagtcaaaggtctgctaagcctgaaaaagaagagcaacccgtgcagaacccaaggagatcagtcaaggatcggaagcgacgaggaaatctcgacatggagaaactatactccgagaatgagggcatggcctcgaaccagggtaaaatggagaacgaggagcagccacaggatgaacggaaaccagaggttacttgtaccctcgaggacaagaagctcgagaatgagggcaagactgagaacaagggcaagaccggggatgaggagatgctaaaagataagggaaagcccgagtccgaaggtgaggccaaagagggcaaaagtgaacgtgagggcgaatctgaaatggagggtggatcagaacgggagggcaagcctgagatagaaggtaaacccgagagcgaaggcgaacctggctctgaaacccgcgccgccggaaaaagacccgccgaggatgacgttccacggaaagcaaagcgcaagacaaataagggcctcgcccattacctgaaggaatacaaagaggctatccatgacatgaatttttcaaatgaagatatgatacgggaattcgataatatggcgaaggtgcaggatgagaagcggaagagcaaacagaagctcggagctttcctgtggatgcagagaaaccttcaagaccccttctaccctcgcggccctcgcgagttcaggggcgggtgtcgtgcaccccggcgggatattgaagatattccatacgtttag

SEQ ID NO: 112951 - DNA, 1077 bp, Artificial Sequence
  derived and/or modified sequence
atgcctgctgggggccaggccccccagctgacccctgtgatcccagccttctgggaggcccggggcctgcccaacagcaagggccgggacaaggtgcacatctgccagtgtgaggagtggaagggccacatctcctatgtggagcgggacatcaccaccagcgagatcaagagcctgccccaggtgtctgtgcgggccttccacgccgccagcggcaccctggagtggaggaaaggaaatggctacggccggggcaagggctggggctggggccgggtggagagccgggaggccggccccagcgtggacagagatggcggcctgcgggtgtgctgcagccagaggtctgccaagccagagaaggaggagcagcctgtgcagaacccccggcgctctgtgaaggacaggaagaggcggggcaacctggacatggagaagctgtacagtgaaaatgaaggcatggccagcaaccagggcaagatggagaatgaggagcagccccaggatgagaggaagccagaggtgacctgcaccctggaggacaagaagctggagaatgaaggcaagacagaaaataaaggcaagacaggagatgaggagatgctgaaggacaagggcaagccagagagcgagggggaggccaaggagggcaagtctgagcgggagggggagagcgagatggagggcggcagcgagcgggagggcaagccagaaattgagggcaagccagagagcgagggggagcccggcagcgagaccagggctgctgggaagaggcctgcagaagatgatgtgcccaggaaggccaagaggaagaccaacaagggcctggcccactacctgaaggagtacaaggaggccatccatgacatgaacttcagcaatgaagacatgatccgggagtttgacaacatggccaaggtgcaggatgagaagaggaagagcaagcagaagctgggcgccttcctgtggatgcagaggaacctgcaggaccccttctacccccggggcccccgggagttccggggcggctgccgggccccccggcgggacatcgaggacatcccctacgtgtag

SEQ ID NO: 112952 - DNA, 1077 bp, Artificial Sequence
  derived and/or modified sequence
atgcccgccggcggccaggccccccagctgacccccgtgatccccgccttttgggaagctcgcggactccctaacagcaaaggcagagataaagtccatatctgccagtgcgaggagtggaaagggcatatcagttacgtagagagggacattactacgagcgagataaagtctttgccacaggtttccgttagggctttccacgcagccagcgggacccttgaatggcgtaagggtaatgggtacggccggggcaaagggtgggggtggggtcgagtggaaagccgggaagccgggccatccgtcgaccgagatggcggccttcgggtgtgttgtagccagagatcggccaagccggaaaaagaggagcaacccgtacaaaatcctcggcgcagcgttaaagatcgcaagaggaggggtaacctcgatatggaaaagctctacagcgagaacgagggcatggccagcaatcaggggaaaatggagaacgaggagcagccgcaggacgagcggaaacccgaagtgacttgcactctcgaggacaaaaagctcgagaatgaaggtaagactgaaaataagggcaagaccggggatgaagaaatgctgaaagacaagggcaaacccgagagcgagggagaggctaaagaggggaagagcgaacgggagggagagagcgagatggaggggggctctgaacgagagggtaagccagaaatcgagggtaaacctgagagtgaaggagaaccaggaagtgagacccgagcggctggaaagcggcctgccgaagacgatgtgcctcgaaaagctaaaaggaagaccaataaggggttggctcactatctgaaggagtataaagaggctatccacgacatgaatttttcaaacgaggatatgattcgggaattcgacaatatggccaaggttcaggatgaaaaaaggaagtctaaacaaaagcttggggcattcctgtggatgcagcggaacctgcaggacccattttacccccgcgggcctagggaattccgtggcggctgtcgcgcgcctcggagagacatcgaggatattccatacgtctag

SEQ ID NO: 112953 - DNA, 1511 bp, Artificial Sequence
  derived and/or modified sequence
ttggtctaagacatgggctgacaaactttttccataaagggccagaaagtaaatatttcaggctttgtgggatatctatttatgatttattttactcctagtattatttcatcttttatacaggttattaaggttagtattgctgcataacaaattactccaaaatttaatcatttatattcaagaagagttcagctgctaggttcttattttgggactctcatgatgctgaggtcaagatgccagctggaggccaggcgccgcagctcacgcctgtaatcccagcgttttgggaggccaggggcctcccaaattcaaaaggaagagacaaagtccacatctgtcaatgcgaagaatggaaaggtcacatatcatatgtggagcgggacataacaacttcggaaattaaatctcttccccaggtcagtgtgcgggccttccacgctgccagcggaacactggaatggcggaaggggaacgggtacggcagggggaaaggctgggggtggggtcgggtcgagtcgagggaagctggcccgagtgtggacagagatggcggtctgcgcgtctgttgttcccagcgctctgcgaagcctgaaaaggaggagcaacctgtccagaatccccgcaggtccgtgaaagacaggaaaaggaggggaaatctcgacatggaaaaactctacagtgaaaatgaaggaatggcttcaaaccaaggaaagatggaaaatgaagaacagccacaagacgagagaaagccagaagtaacttgtactctggaagacaagaagttagaaaacgagggaaagacagaaaacaagggcaaaacaggagatgaggaaatgttaaaggataaaggaaagccagagagtgagggagaggcaaaagaaggaaagtcagagagggagggagagtcagagatggagggaggatcagagagagagggaaaaccagagatagagggaaagccagagagtgaaggagagccagggagtgaaacaagggctgcaggaaagcgcccagctgaggatgatgtacccaggaaagccaaaagaaaaactaataaggggctggctcattacctcaaggagtataaagaggccatacatgatatgaatttcagcaatgaggacatgataagagaatttgacaatatggctaaggtgcaggatgagaagagaaaaagcaaacagaaattgggggcgtttttgtggatgcaaagaaatttacaggaccccttctaccctagaggtccaagggaattcaggggtggctgcagggccccacgaagggacattgaagacattccttatgtgtagtgtccctggcaggcatttaccaggccatgtgctttaacgttacggtaatactttactttaggcatccctcctgttgctagcagccttttgacctatctgcaatgcagtgttctcagtaggaaatgttcatctgttacatggaaaaaatgttgatggtgcattgtaaaattaaaaaacacaacttgcagaaccaaa

SEQ ID NO: 112954 - DNA, 1166 bp, Artificial Sequence
  derived and/or modified sequence
acgggcgcagatgtaggcaccggtccgagtgcctgccctctgtccccgcggctgggtctcgtctgctccggttcctgggctcctaattcttggtccagcttcttccaggtctgcgcgtctgttgttcccagcgctctgcgaagcctgaaaaggaggagcaacctgtccagaatccccgcaggaaaaggaggggaaatctcgacatggaaaaactctacagtgaaaatgaaggaatggcttcaaaccaaggaaagatggaaaatgaagaacagccacaagacgagagaaagccagaagtaacttgtactctggaagacaagaagttagaaaacgagggaaagacagaaaacaagggcaaaacaggagatgaggaaatgttaaaggataaaggaaaaccagagatagagggaaagccagagagtgaaggagagccagggagtgaaacaagggctgcaggaaagcgcccagctgaggatgatgtacccaggaaagccaaaagaaaaactaataaggggctggctcattacctcaaggagtataaagaggccatacatgatatgaatttcagcaatgaggacatgataagagaatttgacaatatggctaaggtgcaggatgagaagagaaaaagcaaacagaaattgggggcgtttttgtggatgcaaagaaatttacaggaccccttctaccctagaggtccaagggaattcaggggtggctgcagggccccacgaagggacattgaagacattccttatgtgtagtgtccctggcaggcatttaccaggccatgtgctttaacgttacggtaatactttactttaggcatccctcctgttgctagcagccttttgacctatctgcaatgcagtgttctcagtaggaaatgttcatctgttacatggaaaaaatgttgatggtgcattgtaaaattaaaaaacacaacttgcagaaccaaatatatggcatcagtacatttttgtaaaactacaaagatacttacctagtaatatagtatagaaaacaattctgaaagctgtgtccactaaaagattaacagtggttatctctgggtgattttttctgttcttttttgttcatctgtccatttttctcctaaaaacagatttctttagtcataaaaataataaaatataaagtattgg

SEQ ID NO: 112955 - DNA, 959 bp, Artificial Sequence
  derived and/or modified sequence
gcacgggcgcagatgtaggcaccggtccgagtgcctgccctctgtccccgcggctgggtctcgtctgctccggttcctgggctcctaattcttggtccagcttcttccaggaaaaggaggggaaatctcgacatggaaaaactctacagtgaaaatgaaggaatggcttcaaaccaaggaaagatggaaaatgaagaacagccacaagacgagagaaagccagaagtaacttgtactctggaagacaagaagttagaaaacgagggaaagacagaaaacaagggcaaaacaggagatgaggaaatgttaaaggataaaggaaagccagagagtgagggagaggcaaaagaaggaaagtcagagagggagggagagtcagagatggagggaggatcagagagagagggaaaaccagagatagagggaaagccagagagtgaaggagagccagggagtgaaacaagggctgcaggaaagcgcccagctgaggatgatgtacccaggaaagccaaaagaaaaactaataaggggctggctcattacctcaaggagtataaagaggccatacatgatatgaatttcagcaatgaggacatgataagagaatttgacaatatggctaaggtgcaggatgagaagagaaaaagcaaacagaaattgggggcgtttttgtggatgcaaagaaatttacaggaccccttctaccctagaggtccaagggaattcaggggtggctgcagggccccacgaagggacattgaagacattccttatgtgtagtgtccctggcaggcatttaccaggccatgtgctttaacgttacggtaatactttactttaggcatccctcctgttgctagcagccttttgacctatctgcaatgcagtgttctcagtaggaaatgttcatctgttacatggaaaaaatgttgatggtgcattgtaaaattaaaaaacac

SEQ ID NO: 112956 - DNA, 338 bp, Artificial Sequence
  derived and/or modified sequence
cttcttccaggtcagtgtgcgggccttccacgctgccagcggaacactggaatggcggaaggggaacgggtctgcgcgtctgttgttcccagcgctctgcgaagcctgaaaaggaggagcaacctgtccagaatccccgcaggaaaaggaggggaaatctcgacatggaaaaactctacagtgaaaatgaaggaatggcttcaaaccaaggaaagatggaaaatgaagaacagccacaagacgagagaaagccagaagtaacttgtactctggaagacaagaagttagaaaacgagggaaagacagaaaacaagggcaaaacaggagatgaggaaatg

SEQ ID NO: 112957 - DNA, 891 bp, Artificial Sequence
  derived and/or modified sequence
tctgctccggttcctgggctcctaattcttggtccagcttcttccaggtcagtgtgcgggccttccacgctgccagcggaacactggaatggcggaaggggaacgggtacggcagggggaaaggctgggggtggggtcgggtcgagtcgagggaagctggcccgagtgtggacagagatggcggtgggaaaacggctaggggtggctgagggggagcacgtaggcagtgggcagagggtgaggaaggcgagcacccccaagtatccatgctcgctttccaggcacatcctcttctctgccctccgtccattttggagccggagatggtgggctggggccgccccagtagtgagacagtggaagtaaaccccatctgccgttcccgtgcgtagagaaaaacgttgaccgcgaggctggggaggagagttgcctctgaggaagaagggcacagagacccaaaattagtttggaaagcatcctgatttggtgcccgaggcctggaaagaaatggcggctggggtgcggcggaggtaggggaggaaaacgttggatgagaagggcctggactcaggaaagggaaccgcgtccgtgtgagcccgctgagcgcgcagaccctgcccctgtctcctgtctgtctgcaggtctgcgcgtctgttgttcccagcgctctgcgaagcctgaaaaggaggagcaacctgtccagaatccccgcaggacaggaaaaggaggggaaatctcgacatggaaaaactctacagtgaaaatgaaggaatggcttcaaaccaaggaaagatggaaaatgaagaacagccacaagacgagagaaagccagaagtaacttgtactctggaagacaagaagttagaaaacgagggaaagacagaaaacaag

SEQ ID NO: 112958 - DNA, 779 bp, Artificial Sequence
  derived and/or modified sequence
tgtaggcaccggtccgagtgcctgccctctgtccccgcggctgggtctcgtctgctccggttcctgggctcctaattcttggtccagcttcttccaggtcagtgtgcgggccttccacgctgccagcggaacactggaatggcggaaggggaacggagaaaaacgttgaccgcgaggctggggaggagagttgcctctgaggaagaagggcacagagacccaaaattagtttggaaagcatcctgatttggtgcccgaggcctggaaagaaatggcggctggggtgcggcggaggtaggggaggaaaacgttggatgagaagggcctggactcaggaaagggaaccgcgtccgtgtgagcccgctgagcgcgcagaccctgcccctgtctcctgtctgtctgcaggtctgcgcgtctgttgttcccagcgctctgcgaagcctgaaaaggaggagcaacctgtccagaatccccgcaggacaggaaaaggaggggaaatctcgacatggaaaaactctacagtgaaaatgaaggaatggcttcaaaccaaggaaagatggaaaatgaagaacagccacaagacgagagaaagccagaagtaacttgtactctggaagacaagaagttagaaaacgagggaaagacagaaaacaagggcaaaacaggagatgaggaaatgttaaaggataaaggaaagccagagagtgagggagaggcaaaagaaggaaagtcagagagggagggagagtcagagatggagggaggatcagagagagagg

SEQ ID NO: 112959 - DNA, 1135 bp, Artificial Sequence
  derived and/or modified sequence
gggctgcggcattcacgtgatctgcacgggcgcagatgtaggcaccggtccgagtgcctgccctctgtccccgcggctgggtctcgtctgctccggttcctgggctcctaattcttggtccagcttcttccaggtcagtgtgcgggccttccacgctgccagcggaacactggaatggcggaaggggaacgggtctgcgcgtctgttgttcccagcgctctgcgaagcctgaaaaggaggagcaacctgtccagaatccccgcaggacaggaaaaggaggggaaatctcgacatggaaaaactctacagtgaaaatgaaggaatggcttcaaaccaaggaaagatggaaaatgaagaacagccacaagacgagagaaagccagaagtaacttgtactctggaagacaagaagttagaaaacgagggaaagacagaaaacaagggcaaaacaggagatgaggaaatgttaaaggataaaggaaagccagagagtgagggagaggcaaaagaaggaaagtcagagagggagggagagtcagagatggagggaggatcagagagagagggaaaaccagagatagagggaaagccagagagtgaaggagagccagggagtgaaacaagggctgcaggaaagcgcccagctgaggatgatgtacccaggaaagccaaaagaaaaactaataaggggctggctcattacctcaaggagtataaagaggccatacatgatatgaatttcagcaatgaggacatgataagagaatttgacaatatggctaaggtgcaggatgagaagagaaaaagcaaacagaaattgggggcgtttttgtggatgcaaagaaatttacaggaccccttctaccctagaggtccaagggaattcaggggtggctgcagggccccacgaagggacattgaagacattccttatgtgtagtgtccctggcaggcatttaccaggccatgtgctttaacgttacggtaatactttactttaggcatccctcctgttgctagcagccttttgacctatctgcaatgcagtgttctcagtaggaaatgttcatctgttacatggaaaaaatgttgatggtgcattgtaaaattaaaaaacacaacttgcagaaccaaa

SEQ ID NO: 112960 - DNA, 566 bp, Artificial Sequence
  derived and/or modified sequence
ggcctggactcaggaaagggaaccgcgtccgtgtgagcccgctgagcgcgcagaccctgcccctgtctcctgtctgtctgcaggtctgcgcgtctgttgttcccagcgctctgcgaagcctgaaaaggaggagcaacctgtccagaatccccgcaggaaaaggaggggaaatctcgacatggaaaaactctacagtgaaaatgaaggaatggcttcaaaccaaggaaagatggaaaatgaagaacagccacaagacgagagaaagccagaagtaacttgtactctggaagacaagaagttagaaaacgagggaaagacagaaaacaagggcaaaacaggagatgaggaaatgttaaaggataaaggaaagccagagagtgagggagaggcaaaagaaggaaagtcagagagggagggagagtcagagatggagggaggatcagagagagagggaaaaccagagatagagggaaagccagagagtgaaggagagccagggagtgaaacaagggctgcaggaaagcgcccagctgaggatgatgtacccaggaaagccaaaagaaaaa

SEQ ID NO: 112961 - DNA, 1266 bp, Artificial Sequence
  derived and/or modified sequence
ctgcacgggcgcagatgtaggcaccggtccgagtgcctgccctctgtccccgcggctgggtctcgtctgctccggttcctgggctcctaattcttggtccagcttcttccaggtctgcgcgtctgttgttcccagcgctctgcgaagcctgaaaaggaggagcaacctgtccagaatccccgcaggacaggaaaaggaggggaaatctcgacatggaaaaactctacagtgaaaatgaaggaatggcttcaaaccaaggaaagatggaaaatgaagaacagccacaagacgagagaaagccagaagtaacttgtactctggaagacaagaagttagaaaacgagggaaagacagaaaacaagggcaaaacaggagatgaggaaatgttaaaggataaaggaaagccagagagtgagggagaggcaaaagaaggaaagtcagagagggagggagagtcagagatggagggaggatcagagagagagggaaaaccagagatagagggaaagccagagagtgaaggagagccagggagtgaaacaagggctgcaggaaagcgcccagctgaggatgatgtacccaggaaagccaaaagaaaaactaataaggggctggctcattacctcaaggagtataaagaggccatacatgatatgaatttcagcaatgaggacatgataagagaatttgacaatatggctaaggtgcaggatgagaagagaaaaagcaaacagaaattgggggcgtttttgtggatgcaaagaaatttacaggaccccttctaccctagaggtccaagggaattcaggggtggctgcagggccccacgaagggacattgaagacattccttatgtgtagtgtccctggcaggcatttaccaggccatgtgctttaacgttacggtaatactttactttaggcatccctcctgttgctagcagccttttgacctatctgcaatgcagtgttctcagtaggaaatgttcatctgttacatggaaaaaatgttgatggtgcattgtaaaattaaaaaacacaacttgcagaaccaaatatatggcatcagtacatttttgtaaaactacaaagatacttacctagtaatatagtatagaaaacaattctgaaagctgtgtccactaaaagattaacagtggttatctctgggtgattttttctgttcttttttgttcatctgtccatttttctcctaaaaacagatttctttagtcataaaaataataaaatataaagtattggaaaa

SEQ ID NO: 112962 - DNA, 1571 bp, Artificial Sequence
  derived and/or modified sequence
gcaccggtccgagtgcctgccctctgtccccgcggctgggtctcgtctgctccggttcctgggctcctaattcttggtccagcttcttccaggcacatcctcttctctgccctccgtccattttggagccggagatggtgggctggggccgccccagtagtgagacagtggaagtaaaccccatctgccgttcccgtgcgtagagaaaaacgttgaccgcgaggctggggaggagagttgcctctgaggaagaagggcacagagacccaaaattagtttggaaagcatcctgatttggtgcccgaggcctggaaagaaatggcggctggggtgcggcggaggtaggggaggaaaacgttggatgagaagggcctggactcaggaaagggaaccgcgtccgtgtgagcccgctgagcgcgcagaccctgcccctgtctcctgtctgtctgcaggtctgcgcgtctgttgttcccagcgctctgcgaagcctgaaaaggaggagcaacctgtccagaatccccgcaggacaggaaaaggaggggaaatctcgacatggaaaaactctacagtgaaaatgaaggaatggcttcaaaccaaggaaagatggaaaatgaagaacagccacaagacgagagaaagccagaagtaacttgtactctggaagacaagaagttagaaaacgagggaaagacagaaaacaagggcaaaacaggagatgaggaaatgttaaaggataaaggaaagccagagagtgagggagaggcaaaagaaggaaagtcagagagggagggagagtcagagatggagggaggatcagagagagagggaaaaccagagatagagggaaagccagagagtgaaggagagccagggagtgaaacaagggctgcaggaaagcgcccagctgaggatgatgtacccaggaaagccaaaagaaaaactaataaggggctggctcattacctcaaggagtataaagaggccatacatgatatgaatttcagcaatgaggacatgataagagaatttgacaatatggctaaggtgcaggatgagaagagaaaaagcaaacagaaattgggggcgtttttgtggatgcaaagaaatttacaggaccccttctaccctagaggtccaagggaattcaggggtggctgcagggccccacgaagggacattgaagacattccttatgtgtagtgtccctggcaggcatttaccaggccatgtgctttaacgttacggtaatactttactttaggcatccctcctgttgctagcagccttttgacctatctgcaatgcagtgttctcagtaggaaatgttcatctgttacatggaaaaaatgttgatggtgcattgtaaaattaaaaaacacaacttgcagaaccaaatatatggcatcagtacatttttgtaaaactacaaagatacttacctagtaatatagtatagaaaacaattctgaaagctgtgtccactaaaagattaacagtggttatctctgggtgattttttctgttcttttttgttcatctgtccatttttctcctaaaaacagatttcttta

SEQ ID NO: 112963 - DNA, 681 bp, Artificial Sequence
  derived and/or modified sequence
gcagatgtaggcaccggtccgagtgcctgccctctgtccccgcggctgggtctcgtctgctccggttcctgggctcctaattcttggtccagcttcttccaggcacatcctcttctctgccctccgtccattttggagccggagatggtgggctggggccgccccagtagtgagacagtggaagtaaaccccatctgccgttcccgtgcgtagagaaaaacgttgaccgcgaggctggggaggagagttgcctctgaggaagaagggcacagagacccaaaattagtttggaaagcatcctgatttggtgcccgaggcctggaaagaaatggcggctggggtgcggcggaggtctgcgcgtctgttgttcccagcgctctgcgaagcctgaaaaggaggagcaacctgtccagaatccccgcaggacaggaaaaggaggggaaatctcgacatggaaaaactctacagtgaaaatgaaggaatggcttcaaaccaaggaaagatggaaaatgaagaacagccacaagacgagagaaagccagaagtaacttgtactctggaagacaagaagttagaaaacgagggaaagacagaaaacaagggcaaaacaggagatgaggaaatgttaaaggataaaggaaagccagagagtgagggagaggcaaaagaaggaaagtcaga

SEQ ID NO: 112964 - DNA, 1008 bp, Artificial Sequence
  derived and/or modified sequence
cgcggctgggtctcgtctgctccggttcctgggctcctaattcttggtccagcttcttccaggtctgcgcgtctgttgttcccagcgctctgcgaagcctgaaaaggaggagcaacctgtccagaatccccgcaggaaaaggaggggaaatctcgacatggaaaaactctacagtgaaaatgaaggaatggcttcaaaccaaggaaagatggaaaatgaagaacagccacaagacgagagaaagccagaagtaacttgtactctggaagacaagaagttagaaaacgagggaaagacagaaaacaagggcaaaacaggagatgaggaaatgttaaaggataaaggaaagccagagagtgagggagaggcaaaagaaggaaagtcagagagggagggagagtcagagatggagggaggatcagagagagagggaaaaccagagatagagggaaagccagagagtgaaggagagccagggagtgaaacaagggctgcaggaaagcgcccagctgaggatgatgtacccaggaaagccaaaagaaaaactaataaggggctggctcattacctcaaggagtataaagaggccatacatgatatgaatttcagcaatgaggacatgataagagaatttgacaatatggctaaggtgcaggatgagaagagaaaaagcaaacagaaattgggggcgtttttgtggatgcaaagaaatttacaggaccccttctaccctagaggtccaagggaattcaggggtggctgcagggccccacgaagggacattgaagacattccttatgtgtagtgtccctggcaggcatttaccaggccatgtgctttaacgttacggtaatactttactttaggcatccctcctgttgctagcagccttttgacctatctgcaatgcagtgttctcagtaggaaatgttcatctgttacatggaaaaaatgttgatggtgcattgtaaaattaaaaaacacaacttgcagaaccaaatatatggc

SEQ ID NO: 112965 - DNA, 1077 bp, Artificial Sequence
  derived and/or modified sequence
atgccagccggagggcaggccccacagctgacacctgttatcccggcattctgggaggctcgaggtttacctaattccaaaggaagggacaaggtccacatctgtcagtgcgaagagtggaaggggcacatcagttatgtagagagagatattactacctctgaaattaagtctcttccacaggtgtccgtgcgggctttccacgctgcaagtggtactctagaatggcgaaagggcaacggctatggcagaggtaaggggtgggggtggggtagagtggaatcaagagaggcaggtccctcagtcgacagagatggtggtctgcgggtgtgctgctcccagcgtagcgcgaaacccgaaaaagaggagcaacccgttcagaacccacgccgtagcgtgaaggacaggaagaggagaggcaatctggacatggagaagctatactctgaaaacgaagggatggcctctaaccaagggaagatggagaatgaggagcagcctcaggacgaaaggaaacctgaagtgacatgtactctggaggacaaaaaactggaaaatgagggcaaaactgaaaacaagggcaagacgggcgacgaggagatgctgaaagataaaggcaaaccggagtccgaaggagaagctaaagagggcaagtcagagcgcgaaggagagtccgagatggagggcggtagtgagcgcgaggggaagcccgagatagagggcaagcctgaaagcgagggcgaacccggaagcgagacccgcgctgcaggaaagcgccctgccgaagacgatgttccacgcaaggccaagcgtaagacaaacaagggactggctcactatcttaaagaatacaaagaggcaatccatgatatgaatttctccaatgaggacatgatacgagaatttgacaatatggccaaagtgcaggatgagaaaagaaaatctaaacaaaaacttggagcgtttttgtggatgcagagaaaccttcaggatcctttttatcctcgaggccctcgcgaatttagaggcggatgtcgagctccccgacgggacatcgaagacattccttacgtgtag

SEQ ID NO: 112966 - DNA, 1077 bp, Artificial Sequence
  derived and/or modified sequence
atgcccgccggcggccaggccccccagctgacccccgtgatccccgccttctgggaggccagaggcctgcccaacagcaagggcagagacaaggtgcacatctgccagtgcgaggagtggaagggccacatcagctacgtggagagagacatcaccaccagcgagatcaagagcctgccccaggtgagcgtgagagccttccacgccgccagcggcaccctggagtggagaaagggcaacggctacggcagaggcaagggctggggctggggcagagtggagagcagagaggccggccccagcgtggacagagacggcggcctgagagtgtgctgcagccagagaagcgccaagcccgagaaggaggagcagcccgtgcagaaccccagaagaagcgtgaaggacagaaagagaagaggcaacctggacatggagaagctgtacagcgagaacgagggcatggccagcaaccagggcaagatggagaacgaggagcagccccaggacgagagaaagcccgaggtgacctgcaccctggaggacaagaagctggagaacgagggcaagaccgagaacaagggcaagaccggcgacgaggagatgctgaaggacaagggcaagcccgagagcgagggcgaggccaaggagggcaagagcgagagagagggcgagagcgagatggagggcggcagcgagagagagggcaagcccgagatcgagggcaagcccgagagcgagggcgagcccggcagcgagaccagagccgccggcaagagacccgccgaggacgacgtgcccagaaaggccaagagaaagaccaacaagggcctggcccactacctgaaggagtacaaggaggccatccacgacatgaacttcagcaacgaggacatgatcagagagttcgacaacatggccaaggtgcaggacgagaagagaaagagcaagcagaagctgggcgccttcctgtggatgcagagaaacctgcaggaccccttctaccccagaggccccagagagttcagaggcggctgcagagcccccagaagagacatcgaggacatcccctacgtgtag

SEQ ID NO: 112967 - DNA, 506 bp, Artificial Sequence
  derived and/or modified sequence
gtgacccgtccagtcacacagggtctcaaactccaaggagccccacacctggtttaatgctctgctgttgccctcttgctgatgcccttcttatttttttagagacagggtcttgcttccagcctgggcaacagagtgagactctatctcaaaaacaaaacaaaacaaacaacaaaaaatgggctggaggagcgggttgtaggcccttccgcctctggtgggtggggagaagcaggggagctggtgttcagctatattctacaaagaaggggtggatcctgagaggcaagggtgggactgaggcctagttacaggtggtcgggaaggaggttgaaggggaactgtgtgaccttggatgttctttgtaattatcttatgcttagctgacacatctgtaaaatggagatagcagcacccacttctttgagttgtgagaagtaaatgcatgtgaaatgtttagcgtgtgccgggcaccaagttaagagcccagtaaatgttggctgtta

SEQ ID NO: 112968 - protein, 439 aa, Artificial Sequence
  derived and/or modified sequence
MTVARPSVPAALPLLGELPRLLLLVLLCLPAVWGDCGLPPDVPNAQPALEGRTSFPEDTVITYKCEESFVKIPGEKDSVICLKGSQWSDIEEFCNRSCEVPTRLNSASLKQPYITQNYFPVGTVVEYECRPGYRREPSLSPKLTCLQNLKWSTAVEFCKKKSCPNPGEIRNGQIDVPGGILFGATISFSCNTGYKLFGSTSSFCLISGSSVQWSDPLPECREIYCPAPPQIDNGIIQGERDHYGYRQSVTYACNKGFTMIGEHSIYCTVNNDEGEWSGPPPECRGKSLTSKVPPTVQKPTTVNVPTTEVSPTSQKTTTKTTTPNAQATRSTPVSRTTKHFHETTPNKGSGTTSGTTRLLSETVFHRVIQDGLDLLASRSACLGLPKCWDYRREPPHLARAHVFHVDRFAWDASNHGLADLAKEELRRKYTQVYRLFLVS

SEQ ID NO: 112969 - DNA, 1320 bp, Artificial Sequence
  derived and/or modified sequence
atgaccgttgctcgcccaagtgtacccgcagccttgccactcctcggagagttgccaagactcctgttgctagtacttctgtgtctgcccgcggtttggggggattgtggtttgccacccgacgtgcccaacgctcaaccagcgctcgaaggccgcaccagctttccagaggataccgttatcacttacaaatgtgaagagtcttttgtcaagattcccggagaaaaggattccgtaatctgcctcaagggatcgcagtggtctgatattgaggaattctgtaaccgcagttgcgaggtgcccactcggctgaactccgcctctctgaaacagccctacattacacagaattatttccccgtgggtaccgtggtcgagtacgagtgtcggcccggctaccgccgagagccgagcctctcaccaaagttgacttgcctacaaaacctcaagtggagtaccgccgtggaattctgcaagaagaaatcctgcccaaacccaggggaaatcagaaacggacagatagacgttccaggcggaatcttgtttggtgctaccataagcttctcctgcaacaccggctacaagttgtttgggagcacttcatcgttctgtctgatttcaggaagctccgtgcaatggtccgatcctttgccagagtgtcgcgaaatatattgtcccgcaccgccccagatcgataatggaattattcagggcgaacgcgaccactacgggtatagacagtctgtgacgtacgcgtgcaacaagggcttcacaatgatcggggaacactcgatatactgtacagtgaacaacgacgaaggggagtggtccgggccacctccggaatgtcgtggtaagtctctcacaagtaaggttccaccaacagtccaaaaacctactacggtgaatgtcccaaccactgaggtgagtcccacctcccagaagacgaccaccaaaaccacgacgcccaatgcccaggcaactagaagcacaccggtgtctcgcacaaccaagcattttcatgaaacaacaccgaacaaaggcagcggcacaacttcggggacaactcggctgcttagtgaaactgtctttcatcgcgtaattcaggacggcctcgacctgctcgcgagccgcagcgcctgtctcggcttgcctaaatgctgggactataggcgcgagccccctcatcttgcacgcgcgcacgtattccatgtggacagattcgcttgggatgcatcaaatcatggactcgcggatcttgccaaggaggaactgcggcgaaagtacactcaagtgtatcggctgtttctggtgtcatag

SEQ ID NO: 112970 - DNA, 1320 bp, Artificial Sequence
  derived and/or modified sequence
atgacagtggcccggcccagcgtgcctgctgccctgcccctgctgggggagctgccccggctgctgctgctggtgctgctgtgcctgcctgctgtgtggggagactgtggcctgcccccagatgtgcccaatgcccagcctgccctggagggccgcaccagcttcccagaagatactgtcatcacctacaagtgtgaggagagctttgtgaagatccctggagagaaggacagcgtcatctgcctgaagggcagccagtggagcgacatcgaggagttctgcaacagaagctgtgaggtgcccacccggctgaacagcgccagcctgaagcagccctacatcacccagaactacttccctgtgggcaccgtggtggagtatgagtgcaggcctggctaccgccgggagcccagcctgagccccaagctgacctgcctgcagaacctgaagtggagcacagctgtggagttctgcaagaagaagagctgccccaaccctggagagatcagaaatggccagattgatgtgcctgggggcatcctgtttggagccaccatctccttcagctgcaacacaggctacaagctgtttggcagcaccagcagcttctgcctgatcagcggcagctctgtgcagtggagcgaccccctgcctgaatgtcgggagatctactgcccagccccaccccagattgacaatggcatcatccagggcgagcgggaccactacggctaccggcagagcgtgacctacgcctgcaacaagggcttcaccatgattggagagcacagcatctactgcaccgtgaacaatgatgaaggagagtggagcggccccccacctgagtgccggggcaagagcctgaccagcaaggtgcccccaacagtgcagaagcccaccaccgtgaatgtgcccaccacagaggtgagccccaccagccagaagaccaccaccaagaccaccaccccaaatgcccaggccaccaggagcacccctgtgtccaggaccaccaagcacttccacgagaccacccccaacaagggcagcggcaccaccagcggcaccacccggctgctgtctgagaccgtcttccacagggtcatccaggacggcctggacctgctggccagccgcagcgcctgcctgggcctgcccaagtgctgggactacagaagagagcccccccacctggcccgggcccacgtgttccacgtggacagatttgcctgggatgccagcaaccacggcctggccgacctggccaaggaggagctgcggaggaagtacacccaggtgtaccgcctcttcctggtgtcctag

SEQ ID NO: 112971 - DNA, 1320 bp, Artificial Sequence
  derived and/or modified sequence
atgaccgtggcccggcccagcgtgcccgccgccctgcccctgctgggcgagctccctcgcctgctcctgctggtgcttctgtgcctgcctgcggtgtggggggactgcggactaccgcccgatgtcccaaatgcccagccggccctggaaggaagaacatcatttcccgaagataccgttatcacatataagtgtgaagaaagttttgttaagatcccaggggagaaggactccgtgatttgtcttaagggcagccagtggagtgacattgaggaattctgtaatagaagttgtgaagtgcccacccgcctgaattccgcaagcctcaagcaaccctacatcacacagaattactttcccgttgggacagtggttgaatacgagtgtagaccaggctaccggagggagccgtcactaagccccaagctgacttgcctgcagaacctgaagtggagcacggctgttgagttttgcaagaaaaaatcatgtccaaacccaggcgaaatccgtaatgggcagattgatgtcccagggggcattctcttcggggcaaccatttcattttcatgcaacactggatataagttgtttggctcaacctcatcgttttgtctgatttccggcagtagcgtccaatggtccgaccctctgcccgagtgtcgggaaatatattgccctgctccgccacagatcgataacggaattatacaaggagagcgggaccactatggataccgtcagagcgtgacctatgcatgcaataaagggtttacaatgatcggcgagcacagcatctactgcaccgttaataatgatgagggggagtggagcggtcctccccccgagtgtaggggaaagagcctcacttcgaaggtgccgccaaccgtgcagaagccaaccactgtgaacgtgcctaccacagaggtcagcccgaccagtcaaaagacaacaactaaaacgaccactcccaatgctcaggcaactcgctccacaccagtttccagaacgacaaagcactttcatgaaaccacacctaataaaggttccggcaccacaagcgggaccactcggctcctgtctgagaccgtgttccatcgggttatccaggatggcctggacctgctggcttctcgctccgcgtgcctggggctcccgaagtgttgggactaccggagagagcccccacatttggccagagctcacgtgtttcacgtggacagattcgcttgggacgctagcaatcatggtttagccgacctagccaaagaggaactgcgtcgtaagtacacccaggtgtaccgtctgtttctcgtgagctag

SEQ ID NO: 112972 - DNA, 1029 bp, Artificial Sequence
  derived and/or modified sequence
gtactagctgtcagctgctggagaccttgctttctgtttcactgggaaacagaagcaatcagaaggaaacttcctcagactccacctctcccttcactcccgcctgtatccgtgcctgttacctggacgccttgtggaacttgaattctacgccctccactgggacactgcccttcatcctctctcacctcctccaggacaacactctctctgtggggctttcacccccatcgctccactgaaactgctcttgtcaaggtcatcgatgacctcccgctgacaaactcaactgtcccatctctacaccccaaactgacccatcaggaatagcatgagctccaccttccaaagcttccgcaatctcaccgtctccaccgttactacctgtgtccgaggcaccactgtttcttgcctggagttgtagacgggatttcaccgtgttagccaggatggtctcgatctcctgacctcgtgatccgcctgtctcgacctcccaaagtgctgggattacagaatgttgtagtcctcatcatcagcagagactttgtgccatcctctgctatattatcctgaagagtgcctggctcatgctccaggctgcggattttattgagagaacggagactgctggtgaactctcaagagggttaattggagttttatcaagccagatttcatggtgtctgcttaatgttaatctctccaagcttcccaccagactgcaaaggctgagctgcagtgttctgaatagcagtccagctatgaggggaggtgcccgtggcaggcctcagctgaccctggagaggccattaagacctggctgtcgcctccacagctgctcggaggcagagaaaggtggctttgtaagaagaaaagagatcattctttttccaccatgtgaggacccagcaagagggtggctgtctgcaaacccagggagagagccctcaccaggaatctgctggcaccttaatcttggacttcccagcctccacaactgtgaggaataaatgtatgttgtttaagcca

SEQ ID NO: 112973 - DNA, 581 bp, Artificial Sequence
  derived and/or modified sequence
gacaaccatgtttagtatttgagcattggttaaatgctaaagaaaaatcgccgttaaagcagttttctttttcactgtctttttcttttcgcggggaacccagctgttcctgcgagggccacctcctcaggaagaccccgcagctctcccgcggcgcttctgcaggaggcagcgacagtttcgagaacccgggccttcccctcccagtgcctcccggggttccggcgtttcaggcgctgctgttttccgggaagggcaggcgcgctgggccttggggagctgcgctcggcgggcggacgcggtagagacggggtttcaccgtgttaaccaggatggatacgatctcctgacctcgtgatccgcacgcctcggcctcccaaagtgctgggattacaggcgtgagccaccgcgcccggccctcgctgttttctccgagtgtctctggagatagtccttaggaaaacggatttcttaagaaaacgattcttggggatcatggaagctgataaagatgacacacaacaaattcttaaggagcattcgccagatgaatttataaaagatgaacaaaataagggact

SEQ ID NO: 112974 - DNA, 1320 bp, Artificial Sequence
  derived and/or modified sequence
atgaccgtggcccgtccttctgttcccgctgctttgccgttactgggggaactgccccgtctgttgctgttggtgcttctgtgtcttccagcggtgtggggggattgtggccttccacccgacgttcccaacgctcagcccgctctggaaggtcgtacttcgttcccagaagacaccgtgatcacatacaaatgcgaagaaagctttgtgaaaatccctggcgaaaaggactcggttatttgtctgaaagggagtcagtggagtgatatcgaggagttttgcaataggtcttgtgaggtccctacccgtttgaatagcgctagcttaaagcagccctatatcacacagaattatttcccagttggaacagtcgtggaatatgagtgcaggccgggataccgaagggagccttctctcagtcccaagttgacatgccttcaaaacttgaagtggtccaccgcagtagaattctgtaaaaaaaagtcttgccctaaccctggtgagattagaaacggacagatcgatgtaccaggaggaatcctttttggggcaactatctcatttagttgcaacacggggtataaattgtttggcagtaccagttccttttgtttgatctctggaagcagcgtgcagtggtcggacccgctgccagagtgtagggagatttactgcccggcaccaccacagatcgataatgggataatacagggagaaagggatcattacgggtatagacagtccgtaacgtatgcctgtaataagggattcactatgatcggagaacactccatctattgcaccgtgaataatgacgaaggtgaatggtctgggccacctcccgaatgcaggggcaaaagcctgacatccaaggttcctccaaccgtacagaagcctactaccgtgaatgtgcctactacagaggtgagtcctacgtcacagaaaactacaaccaaaactactacacccaacgcccaggctactagatccacgccagttagcagaacaaccaagcatttccacgagacaacaccgaacaaaggaagtggcacaactagtggcacaacacggctcctgagcgaaacagtcttccaccgggtgatccaggatggcctcgaccttttggcttcccgatcagcatgcttaggcttgcctaaatgttgggactacaggagggagccacctcatttagctagagctcatgtgttccatgtcgaccgattcgcctgggatgcgagtaaccacggactggctgatctagctaaggaagagctgagacgcaagtatacacaggtctatcggctgtttctcgtttcatag

SEQ ID NO: 112975 - DNA, 1515 bp, Artificial Sequence
  derived and/or modified sequence
gttctaacccggcgcgccatgaccgtcgcgcggccgagcgtgcccgcggcgctgcccctcctcggggagctgccccggctgctgctgctggtgctgttgtgcctgccggccgtgtggggtgactgtggccttcccccagatgtacctaatgcccagccagctttggaaggccgtacaagttttcccgaggatactgtaataacgtacaaatgtgaagaaagctttgtgaaaattcctggcgagaaggactcagtgatctgccttaagggcagtcaatggtcagatattgaagagttctgcaatcgtagctgcgaggtgccaacaaggctaaattctgcatccctcaaacagccttatatcactcagaattattttccagtcggtactgttgtggaatatgagtgccgtccaggttacagaagagaaccttctctatcaccaaaactaacttgccttcagaatttaaaatggtccacagcagtcgaattttgtaaaaagaaatcatgccctaatccgggagaaatacgaaatggtcagattgatgtaccaggtggcatattatttggtgcaaccatctccttctcatgtaacacagggtacaaattatttggctcgacttctagtttttgtcttatttcaggcagctctgtccagtggagtgacccgttgccagagtgcagagaaatttattgtccagcaccaccacaaattgacaatggaataattcaaggggaacgtgaccattatggatatagacagtctgtaacgtatgcatgtaataaaggattcaccatgattggagagcactctatttattgtactgtgaataatgatgaaggagagtggagtggcccaccacctgaatgcagaggaaaatctctaacttccaaggtcccaccaacagttcagaaacctaccacagtaaatgttccaactacagaagtctcaccaacttctcagaaaaccaccacaaaaaccaccacaccaaatgctcaagcaacacggagtacacctgtttccaggacaaccaagcattttcatgaaacaaccccaaataaaggaagtggaaccacttcaggtactacccgtcttctatctgttctgtttatgtgatgaatcacatttattgatttggatatgttgagccaaccttgcatcccaggaataaagcctacttgatcgtgggcacacgtgtttcacgttgacaggtttgcttgggacgctagtaaccatgggcttgctgacttagccaaagaagagttaagaagaaaatacacacaagtatacagactgttcctagtttcttagacttatctgcatattggataaaataaatgcaattgtgctcttcatttaggatgctttcattgtctttaagatgtgttaggaatgtcaacagagcaaggagaaaaaaggcagtcctggaatcacattcttagcacacctacacctcttgaaaatagaacaacttgcagaattgagagtgattcctttcctaaaagtgtaagaaagcat

SEQ ID NO: 112976 - DNA, 1545 bp, Artificial Sequence
  derived and/or modified sequence
gttctaacccggcgcgccatgaccgtcgcgcggccgagcgtgcccgcggcgctgcccctcctcggggagctgccccggctgctgctgctggtgctgttgtgcctgccggccgtgtggggtgactgtggccttcccccagatgtacctaatgcccagccagctttggaaggccgtacaagttttcccgaggatactgtaataacgtacaaatgtgaagaaagctttgtgaaaattcctggcgagaaggactcagtgatctgccttaagggcagtcaatggtcagatattgaagagttctgcaatcgtagctgcgaggtgccaacaaggctaaattctgcatccctcaaacagccttatatcactcagaattattttccagtcggtactgttgtggaatatgagtgccgtccaggttacagaagagaaccttctctatcaccaaaactaacttgccttcagaatttaaaatggtccacagcagtcgaattttgtaaaaagaaatcatgccctaatccgggagaaatacgaaatggtcagattgatgtaccaggtggcatattatttggtgcaaccatctccttctcatgtaacacagggtacaaattatttggctcgacttctagtttttgtcttatttcaggcagctctgtccagtggagtgacccgttgccagagtgcagagaaatttattgtccagcaccaccacaaattgacaatggaataattcaaggggaacgtgaccattatggatatagacagtctgtaacgtatgcatgtaataaaggattcaccatgattggagagcactctatttattgtactgtgaataatgatgaaggagagtggagtggcccaccacctgaatgcagaggaaaatctctaacttccaaggtcccaccaacagttcagaaacctaccacagtaaatgttccaactacagaagtctcaccaacttctcagaaaaccaccacaaaaaccaccacaccaaatgctcaagcaacacggagtacacctgtttccaggacaaccaagcattttcatgaaacaaccccaaataaaggaagtggaaccacttcaggtactacccgtcttctatctgagacggtgtttcaccgtgttatccaggatggtcttgatctcctggcctcgagatctgcctgcctcggcctcccaaagtgctgggattacaggcgtgagccaccgcacctggccagggcacacgtgtttcacgttgacaggtttgcttgggacgctagtaaccatgggcttgctgacttagccaaagaagagttaagaagaaaatacacacaagtatacagactgttcctagtttcttagacttatctgcatattggataaaataaatgcaattgtgctcttcatttaggatgctttcattgtctttaagatgtgttaggaatgtcaacagagcaaggagaaaaaaggcagtcctggaatcacattcttagcacacctacacctcttgaaaatagaacaacttgcagaattgagagtgattcctttcctaaaagtgtaagaaagcat

SEQ ID NO: 112977 - DNA, 1320 bp, Artificial Sequence
  derived and/or modified sequence
atgaccgtggccagacccagcgtgcccgccgccctgcccctgctgggcgagctgcccagactgctgctgctggtgctgctgtgcctgcccgccgtgtggggcgactgcggcctgccccccgacgtgcccaacgcccagcccgccctggagggcagaaccagcttccccgaggacaccgtgatcacctacaagtgcgaggagagcttcgtgaagatccccggcgagaaggacagcgtgatctgcctgaagggcagccagtggagcgacatcgaggagttctgcaacagaagctgcgaggtgcccaccagactgaacagcgccagcctgaagcagccctacatcacccagaactacttccccgtgggcaccgtggtggagtacgagtgcagacccggctacagaagagagcccagcctgagccccaagctgacctgcctgcagaacctgaagtggagcaccgccgtggagttctgcaagaagaagagctgccccaaccccggcgagatcagaaacggccagatcgacgtgcccggcggcatcctgttcggcgccaccatcagcttcagctgcaacaccggctacaagctgttcggcagcaccagcagcttctgcctgatcagcggcagcagcgtgcagtggagcgaccccctgcccgagtgcagagagatctactgccccgcccccccccagatcgacaacggcatcatccagggcgagagagaccactacggctacagacagagcgtgacctacgcctgcaacaagggcttcaccatgatcggcgagcacagcatctactgcaccgtgaacaacgacgagggcgagtggagcggccccccccccgagtgcagaggcaagagcctgaccagcaaggtgccccccaccgtgcagaagcccaccaccgtgaacgtgcccaccaccgaggtgagccccaccagccagaagaccaccaccaagaccaccacccccaacgcccaggccaccagaagcacccccgtgagcagaaccaccaagcacttccacgagaccacccccaacaagggcagcggcaccaccagcggcaccaccagactgctgagcgagaccgtgttccacagagtgatccaggacggcctggacctgctggccagcagaagcgcctgcctgggcctgcccaagtgctgggactacagaagagagcccccccacctggccagagcccacgtgttccacgtggacagattcgcctgggacgccagcaaccacggcctggccgacctggccaaggaggagctgagaagaaagtacacccaggtgtacagactgttcctggtgagctag

SEQ ID NO: 112978 - protein, 364 aa, Artificial Sequence
  derived and/or modified sequence
MTVARPSVPAALPLLGELPRLLLLVLLCLPAVWGDCGLPPDVPNAQPALEGRTSFPEDTVITYKCEESFVKIPGEKDSVICLKGSQWSDIEEFCNRSCEVPTRLNSASLKQPYITQNYFPVGTVVEYECRPGYRREPSLSPKLTCLQNLKWSTAVEFCKKKSCPNPGEIRNGQIDVPGGILFGATISFSCNTGYKLFGSTSSFCLISGSSVQWSDPLPECREIYCPAPPQIDNGIIQGERDHYGYRQSVTYACNKGFTMIGEHSIYCTVNNDEGEWSGPPPECRGKSLTSKVPPTVQKPTTVNVPTTEVSPTSQKTTTKTTTPNAQATRSTPVSRTTKHFHETTPNKGSGTTSGTTRLLSVLFM

SEQ ID NO: 112979 - protein, 384 aa, Artificial Sequence
  derived and/or modified sequence
MTVARPSVPAALPLLGELPRLLLLVLLCLPAVWGDCGLPPDVPNAQPALEGRTSFPEDTVITYKCEESFVKIPGEKDSVICLKGSQWSDIEEFCNRSCEVPTRLNSASLKQPYITQNYFPVGTVVEYECRPGYRREPSLSPKLTCLQNLKWSTAVEFCKKKSCPNPGEIRNGQIDVPGGILFGATISFSCNTGYKLFGSTSSFCLISGSSVQWSDPLPECREIYCPAPPQIDNGIIQGERDHYGYRQSVTYACNKGFTMIGEHSIYCTVNNDEGEWSGPPPECRGKSLTSKVPPTVQKPTTVNVPTTEVSPTSQKTTTKTTTPNAQATRSTPVSRTTKHFHETTPNKGSGTTSGTTRLLSALQVRPFEVSGSSHISSKKMMCIL

SEQ ID NO: 112980 - DNA, 1155 bp, Artificial Sequence
  derived and/or modified sequence
atgacagtcgcacgccctagtgttccagcggctttgccgctcctcggcgagctgccccgtttgctgctactggtactgctgtgcctaccagccgtgtggggggattgcgggctaccacctgacgtccctaatgcccagcccgccttagaaggcaggacatcttttccagaggatacagtgattacctataagtgtgaagaaagtttcgtgaagataccaggcgagaaggactccgtaatatgcctaaaaggctctcagtggtctgatattgaggaattttgcaatagatcttgcgaagtgccaactcgcctcaactccgccagcttgaaacagccttatataactcagaactacttcccagtgggaacagtggtggagtacgaatgcagacctggctataggcgggagccttccctctcccccaagctaacctgcttacaaaaccttaaatggtccactgctgtagaattctgtaagaaaaagagctgtccgaatccaggcgagatccggaatgggcagattgatgttcctgggggtattttgtttggggcaacaatttccttttcttgcaacacaggatataaactgttcgggagcacctcctccttttgcttgattagcggaagcagcgtccagtggagcgatcccctgcccgagtgtcgcgaaatatactgtccagccccgcctcagattgacaatgggattattcagggtgaaagggatcattatgggtataggcagtctgtgacatacgcgtgtaataagggattcaccatgatcggggaacattctatttattgtaccgtcaacaacgatgagggcgagtggagcggtccgccacctgaatgccgcggcaagtcattgacgagtaaggtgcctccaacagttcagaaacctaccaccgtgaacgtcccaaccactgaggtctcccccacatcccagaaaactacaacgaaaaccacaacacccaacgcccaggcaaccaggtccactccagtgagcaggacaacgaaacacttccatgaaaccacaccaaataagggttcagggacaacatccggcaccacccggctgttgtccgcactacaggtccgcccgtttgaagttagcggaagttctcacatcagtagtaaaaagatgatgtgcatcctttag

SEQ ID NO: 112981 - DNA, 1155 bp, Artificial Sequence
  derived and/or modified sequence
atgacagtggcccggcccagcgtgcctgctgccctgcccctgctgggggagctgccccggctgctgctgctggtgctgctgtgcctgcctgctgtgtggggagactgtggcctgcccccagatgtgcccaatgcccagcctgccctggagggccgcaccagcttcccagaagatactgtcatcacctacaagtgtgaggagagctttgtgaagatccctggagagaaggacagcgtcatctgcctgaagggcagccagtggagcgacatcgaggagttctgcaacagaagctgtgaggtgcccacccggctgaacagcgccagcctgaagcagccctacatcacccagaactacttccctgtgggcaccgtggtggagtatgagtgcaggcctggctaccgccgggagcccagcctgagccccaagctgacctgcctgcagaacctgaagtggagcacagctgtggagttctgcaagaagaagagctgccccaaccctggagagatcagaaatggccagattgatgtgcctgggggcatcctgtttggagccaccatctccttcagctgcaacacaggctacaagctgtttggcagcaccagcagcttctgcctgatcagcggcagctctgtgcagtggagcgaccccctgcctgaatgtcgggagatctactgcccagccccaccccagattgacaatggcatcatccagggcgagcgggaccactacggctaccggcagagcgtgacctacgcctgcaacaagggcttcaccatgattggagagcacagcatctactgcaccgtgaacaatgatgaaggagagtggagcggccccccacctgagtgccggggcaagagcctgaccagcaaggtgcccccaacagtgcagaagcccaccaccgtgaatgtgcccaccacagaggtgagccccaccagccagaagaccaccaccaagaccaccaccccaaatgcccaggccaccaggagcacccctgtgtccaggaccaccaagcacttccacgagaccacccccaacaagggcagcggcaccaccagcggcaccacccggctgctgagcgccctgcaggtgcggccctttgaggtgtctggcagcagccacatcagcagcaagaagatgatgtgcatcctgtag

SEQ ID NO: 112982 - DNA, 1155 bp, Artificial Sequence
  derived and/or modified sequence
atgaccgtggcccggcccagcgtgcccgccgccctgcccctgctgggtgagcttccgcgtctgctgctcttggtcctgttatgtttacctgctgtgtggggggattgcggacttcctccggatgtccctaatgcgcagcccgcgttggagggcagaacctcatttcctgaagacaccgtgatcacttacaaatgcgaggaaagcttcgtcaagattccaggagaaaaggatagtgtgatctgtctgaagggcagtcagtggagcgacatagaggagttttgcaataggtcttgcgaggtgcctacgaggctaaattcagcttcgctgaagcagccctacatcacgcaaaactacttcccggtgggaacagtggtggagtacgaatgtagacctggttatcgtcgagagcccagcttgtcccccaagctcacctgcttacagaatctgaaatggagcacagcggttgaattttgtaagaagaagagctgccctaatccgggcgagatccgcaatggacagattgatgtccctgggggtattctctttggggctacgatctcattttcatgcaacacggggtacaagctgtttgggagtacatccagcttttgcctaatttccgggagtagtgtgcagtggtcggacccactgcccgaatgtcgggaaatttactgtcctgcacccccacaaatcgacaacggcattattcagggcgagcgggaccattacggctaccgacaaagtgttacgtacgcatgcaataagggcttcactatgatcggagagcatagcatctactgtactgtgaataacgatgaaggagagtggtccggtccgccacccgagtgccgcgggaaatctctgacctctaaagtaccacctacggtacaaaaaccaaccactgtcaacgtccccacaacagaagtgagcccgaccagccaaaaaacaacaacaaagacgactacgcccaatgcccaagcaaccaggagcactcccgtcagcagaaccactaagcattttcatgagacaactcccaataaagggtccggcacaacatcagggacaactaggctgttgtccgcactccaggtgaggccattcgaagtctctggatcctctcacatttcaagcaaaaagatgatgtgcattctgtag

SEQ ID NO: 112983 - DNA, 1155 bp, Artificial Sequence
  derived and/or modified sequence
atgacggtggcaaggccatcggtgccggctgctctccctcttctcggtgagctgccaaggctcctgctcctggtgctcctgtgcctgcctgcggtttggggcgattgcggcttgccccctgatgtccctaacgcccagcctgcccttgagggtcgcactagcttccccgaggacaccgtaataacttataagtgcgaggaatctttcgtcaagatccctggggaaaaggactctgtaatttgcctgaaagggtcacagtggagtgatattgaggaattttgcaaccgctcctgtgaggtgccgacgaggctcaactctgcatcgttgaaacaaccgtatataacacagaactactttccggttggcaccgtcgtggagtatgagtgtcggccaggatataggagggagccttctctgagtcccaagctgacttgtctccagaacttgaaatggtccaccgccgtggagttttgtaagaaaaagagttgtcccaatcccggtgagatcaggaacggacaaatcgatgtgcctgggggtattctgtttggcgcaactatatcattttcttgcaataccggctacaaactgtttggatccacttctagcttctgtcttatttctggctcttcagtccagtggtctgatccgctccccgagtgccgggaaatctactgccctgccccacctcagatagataatggcatcattcagggtgaacgagaccactatggttatagacagtctgtcacctatgcgtgcaacaagggcttcaccatgatcggcgagcattccatatactgcactgtgaacaatgatgaaggtgagtggagcgggccacctccagagtgtcgcggtaaatccctgacctccaaggtacccccaaccgtgcaaaagccaaccacagtcaatgtccccacaacagaagtgtcccccactagccaaaagactacaacgaagactaccacccctaatgcgcaggccacccggtcaacccctgtatcccgaactacgaagcatttccacgaaacgactccaaacaaggggagcggcacaacatcaggtactacaagattgctctccgctctgcaagtcagaccttttgaagtatcgggatcgtctcacatttcttctaagaagatgatgtgcatcttatag

SEQ ID NO: 112984 - DNA, 1523 bp, Artificial Sequence
  derived and/or modified sequence
gttctaacccggcgcgccatgaccgtcgcgcggccgagcgtgcccgcggcgctgcccctcctcggggagctgccccggctgctgctgctggtgctgttgtgcctgccggccgtgtggggtgactgtggccttcccccagatgtacctaatgcccagccagctttggaaggccgtacaagttttcccgaggatactgtaataacgtacaaatgtgaagaaagctttgtgaaaattcctggcgagaaggactcagtgatctgccttaagggcagtcaatggtcagatattgaagagttctgcaatcgtagctgcgaggtgccaacaaggctaaattctgcatccctcaaacagccttatatcactcagaattattttccagtcggtactgttgtggaatatgagtgccgtccaggttacagaagagaaccttctctatcaccaaaactaacttgccttcagaatttaaaatggtccacagcagtcgaattttgtaaaaagaaatcatgccctaatccgggagaaatacgaaatggtcagattgatgtaccaggtggcatattatttggtgcaaccatctccttctcatgtaacacagggtacaaattatttggctcgacttctagtttttgtcttatttcaggcagctctgtccagtggagtgacccgttgccagagtgcagagaaatttattgtccagcaccaccacaaattgacaatggaataattcaaggggaacgtgaccattatggatatagacagtctgtaacgtatgcatgtaataaaggattcaccatgattggagagcactctatttattgtactgtgaataatgatgaaggagagtggagtggcccaccacctgaatgcagaggaaaatctctaacttccaaggtcccaccaacagttcagaaacctaccacagtaaatgttccaactacagaagtctcaccaacttctcagaaaaccaccacaaaaaccaccacaccaaatgctcaagcaacacggagtacacctgtttccaggacaaccaagcattttcatgaaacaaccccaaataaaggaagtggaaccacttcaggtactacccgtcttctatctgctctgcaagttagaccttttgaagtgtctgggtcatcccacatttcttcaaaaaagatgatgtgcatcctctaggtcactccagttcttggagggcacacgtgtttcacgttgacaggtttgcttgggacgctagtaaccatgggcttgctgacttagccaaagaagagttaagaagaaaatacacacaagtatacagactgttcctagtttcttagacttatctgcatattggataaaataaatgcaattgtgctcttcatttaggatgctttcattgtctttaagatgtgttaggaatgtcaacagagcaaggagaaaaaaggcagtcctggaatcacattcttagcacacctacacctcttgaaaatagaacaacttgcagaattgagagtgattcctttcctaaaagtgtaagaaagcat

SEQ ID NO: 112985 - DNA, 1155 bp, Artificial Sequence
  derived and/or modified sequence
atgaccgtggccagacccagcgtgcccgccgccctgcccctgctgggcgagctgcccagactgctgctgctggtgctgctgtgcctgcccgccgtgtggggcgactgcggcctgccccccgacgtgcccaacgcccagcccgccctggagggcagaaccagcttccccgaggacaccgtgatcacctacaagtgcgaggagagcttcgtgaagatccccggcgagaaggacagcgtgatctgcctgaagggcagccagtggagcgacatcgaggagttctgcaacagaagctgcgaggtgcccaccagactgaacagcgccagcctgaagcagccctacatcacccagaactacttccccgtgggcaccgtggtggagtacgagtgcagacccggctacagaagagagcccagcctgagccccaagctgacctgcctgcagaacctgaagtggagcaccgccgtggagttctgcaagaagaagagctgccccaaccccggcgagatcagaaacggccagatcgacgtgcccggcggcatcctgttcggcgccaccatcagcttcagctgcaacaccggctacaagctgttcggcagcaccagcagcttctgcctgatcagcggcagcagcgtgcagtggagcgaccccctgcccgagtgcagagagatctactgccccgcccccccccagatcgacaacggcatcatccagggcgagagagaccactacggctacagacagagcgtgacctacgcctgcaacaagggcttcaccatgatcggcgagcacagcatctactgcaccgtgaacaacgacgagggcgagtggagcggccccccccccgagtgcagaggcaagagcctgaccagcaaggtgccccccaccgtgcagaagcccaccaccgtgaacgtgcccaccaccgaggtgagccccaccagccagaagaccaccaccaagaccaccacccccaacgcccaggccaccagaagcacccccgtgagcagaaccaccaagcacttccacgagaccacccccaacaagggcagcggcaccaccagcggcaccaccagactgctgagcgccctgcaggtgagacccttcgaggtgagcggcagcagccacatcagcagcaagaagatgatgtgcatcctgtag

SEQ ID NO: 112986 - protein, 837 aa, Artificial Sequence
  derived and/or modified sequence
VPGRRGRRDGEVDATASSIPELERQIEKLSKRQLFFRKKLLHSSQMLRAVSLGQDRYRRRYWVLPYLAGIFVEGTEGNLVPEEVIKKETDSLKVAAHASLNPALFSMKMELAGSNTTASSPARARGRPRKTKPGSMQPRHLKSPVRGQDSEQPQAQLQPEAQLHAPAQPQPQLQLQLQSHKGFLEQEGSPLSLGQSQHDLSQSAFLSWLSQTQSHSSLLSSSVLTPDSSPGKLDPAPSQPPEEPEPDEAESSPDPQALWFNISAQMPCNAAPTPPPAVSEDQPTPSPQQLASSKPMNRPSAANPCSPVQFSSTPLAGLAPKRRAGDPGEMPQSPTGLGQPKRRGRPPSKFFKQMEQRYLTQLTAQPVPPGWWWIRDPEMLDAMLKALHPRGIREKALHKHLNKHRDFLQEVCLRPSADPIFEPRQLPAFQEGIMSWSPKEKTYETDLAVLQWVEELEQRVIMSDLQIRGWTCPSPDSTREDLAYCEHLSDSQEDITWRGRGREGLAPQRKTTNPLDLAVMRLAALEQNVERRYLREPLWPTHEVVLEKALLSTPNGAPEGTTTEISYEITPRIRVWRQTLERCRSAAQVCLCLGQLERSIAWEKSVNKVTCLVCRKGDNDEFLLLCDGCDRGCHIYCHRPKMEAVPEGDWFCTVCLAQQVEGEFTQKPGFPKRGQKRKSGYSLNFSEGDGRRRRVLLRGRESPAAGPRYSEEGLSPSKRRRLSMRNHHSDLTFCEIILMEMESHDAAWPFLEPVNPRLVSGYRRIIKNPMDFSTMRERLLRGGYTSSEEFAADALLVFDNCQTFNEDDSEVGKAGHIMRRFFESRWEEFYQGKQANL

SEQ ID NO: 112987 - DNA, 2514 bp, Artificial Sequence
  derived and/or modified sequence
gtgcctggtagacggggcagacgagacggcgaagtggacgccacggcatctagtatccccgagctggagcgacagattgagaaattgagcaagagacagctgttcttcaggaaaaagcttttgcatagtagccaaatgctgcgtgccgtgtcgttggggcaggacaggtatcggcggaggtattgggtactgccttacttagccggtattttcgtcgaaggaactgagggtaacctggtgcccgaagaagtgattaaaaaggaaacggatagccttaaggtggccgcacacgcttcgctgaatccagcgctgtttagtatgaaaatggagctggcaggttctaacaccaccgcaagcagccccgctagggctaggggccgtccacgaaagactaaacccggcagcatgcagccaagacatttaaaatcgcctgtgagggggcaggacagcgagcagccccaagcacagctgcagcctgaagcacagctccatgcacctgcgcagcctcagccgcaactgcagctgcagctgcagtcccacaaaggcttcctggagcaagaggggtccccacttagcctgggtcagtcacagcacgatctgtcacaaagcgccttccttagttggctgagccaaacacagagccactcgtccttactgagtagctctgtgttgactcctgattcctcccccggcaaactggaccccgcgccaagtcagcctccggaggaaccagaacctgatgaagcagagtcctctcccgaccctcaagccctgtggttcaacatttctgcccagatgccttgcaatgcagcccccacccctcccccggctgtgtccgaagatcagcccaccccatcccctcagcagctcgcatctagtaaacctatgaatcggccttctgcagctaacccatgctcccccgttcagttcagctcgaccccccttgcgggactcgcacctaaaaggagagcaggagacccaggtgaaatgcctcagagtcccacaggactgggccagcccaagagaagaggcaggccaccatccaagttttttaagcagatggagcaaagatacttaactcagctaacagcccagcccgtcccccctggctggtggtggatccgcgatccggaaatgctcgacgccatgctgaaggcactacacccaagggggattcgtgagaaggcactgcacaaacacctcaataagcatcgagactttctacaggaggtctgtctgcggcctagcgccgatcctattttcgagcctcgacagcttcctgccttccaggaaggaattatgagttggagccccaaagagaagacctatgaaactgacctggcagtgttacagtgggtggaggagctggagcagagagttatcatgtccgacctgcagattagagggtggacctgcccaagcccggactcgacgcgggaggatctcgcctattgtgagcatctgtctgactcccaagaagacattacttggcgggggcggggacgcgaggggctcgcacctcagcggaaaactaccaacccactggatcttgccgtgatgcggcttgcagccttggaacaaaatgtcgagaggcgatatttgcgggaaccgctctggccaacccacgaggtggtcctggagaaggccctgctctccacaccgaacggtgcacctgaaggaaccactacagagatctcttatgagattaccccgaggattcgagtgtggcggcagacgctggaacgctgtcgctctgccgcacaggtgtgtctgtgcctggggcagctggagcggtctatagcgtgggagaagtccgtgaataaagtcacttgtctggtttgtagaaagggggataacgatgaattcctccttctgtgcgacggatgcgaccggggctgtcacatctattgccacaggcctaagatggaagccgtgcccgagggagactggttttgtaccgtttgtctagcacagcaggtcgaaggcgagtttacacagaagccaggattcccgaagcgcggacagaaaagaaagagcgggtattctctgaatttttccgagggggatggtaggaggcgccgcgtactactgcgcggccgagagtcccccgcagccgggccccgctacagcgaggagggcctgtcaccgagtaaacgtagacgactttcaatgcgcaaccatcattccgacctaacattctgtgagataattctgatggagatggagtcccacgacgccgcctggccgttccttgagccagtgaaccccaggttggtatccggatacaggcggattataaagaacccaatggatttttctacaatgcgcgagcggctgctgcgcggtggatacaccagctctgaggagttcgctgccgacgcattgctggtgtttgataactgccaaacgtttaatgaagatgattctgaggtgggtaaggctggtcacattatgagaaggttctttgagagtcggtgggaggagttttatcagggaaaacaggccaatctgtag

SEQ ID NO: 112988 - DNA, 2514 bp, Artificial Sequence
  derived and/or modified sequence
gtgcccggccggcggggcagaagagatggagaggtggatgccacagccagcagcatccctgagctggagcggcagatcgagaagctgagcaagaggcagctgttcttcaggaagaagctgctgcacagcagccagatgctgcgggctgtgtccctgggccaggaccgctacagaagacgctactgggtgctgccctacctggccggcatctttgtggagggcacagagggcaacctggtgcctgaggaggtgatcaagaaggagacagacagcctgaaggtggccgcccacgccagcctgaacccagccctcttctccatgaagatggagctggccggcagcaacaccacagccagcagccctgcccgggcccggggccggcccaggaagaccaagccaggctccatgcagcccaggcacctgaagagccctgtgcggggccaggacagcgagcagccccaggcccagctgcagcctgaggcccagctgcacgccccagcccagccccagccccagctgcagctgcagctgcagagccacaagggcttcctggagcaggagggcagccccctgagcctgggccagagccagcacgacctgagccagagcgccttcctgtcctggctgagccagacccagagccacagcagcctgctgagcagctctgtgctgaccccagacagcagccctgggaagctggaccctgcccccagccagcccccagaggagcctgagccagatgaagctgagagcagcccagacccccaggccctgtggttcaacatcagcgcccagatgccctgcaatgctgcccccaccccacctcctgctgtgtctgaggaccagcccacccccagcccccagcagctggccagcagcaagcccatgaaccggcccagcgctgccaacccctgcagccctgtgcagttcagcagcacccccctggccggcctggcccccaagaggcgggccggggaccctggagagatgccccagagccccaccggcctgggccagcccaagaggcggggccggccccccagcaagttcttcaagcagatggagcagcgctacctgacccagctgacagcccagcctgtgcccccaggctggtggtggatccgggaccctgagatgctggatgccatgctgaaggccctgcacccccggggcatccgggagaaggccctgcacaagcacctgaacaagcaccgggacttcctgcaggaggtgtgcctgcggcccagcgctgaccccatctttgagccccggcagctgcctgccttccaggagggcatcatgtcctggagccccaaggagaagacctatgaaacagacctggccgtgctgcagtgggtggaggagctggagcagagggtcatcatgtctgacctgcagatccggggctggacctgccccagcccagacagcacccgggaggacctggcctactgtgagcacctgagtgacagccaggaggacatcacctggaggggccggggccgggagggcctggccccccagaggaagaccaccaaccccctggacctggccgtgatgaggctggccgccctggagcagaatgtggagcggcgctacctgcgggagcccctgtggcccacccatgaggtggtgctggagaaggccctgctgagcaccccaaatggagcccctgagggcaccaccacagagatctcctatgagatcaccccccgcatccgggtgtggaggcagaccctggagcgctgccgctctgctgcccaggtgtgcctgtgcctgggccagctggagaggagcatcgcctgggagaagtctgtgaacaaggtgacctgcctggtgtgcaggaagggggacaatgatgagttcctgctgctgtgtgatggctgtgaccggggctgccacatctactgccaccggcccaagatggaggccgtgcctgagggggactggttctgcaccgtgtgcctggcccagcaggtggagggggagttcacccagaagccaggcttccccaagaggggccagaagaggaagagcggctacagcctgaacttctctgaaggagatggaagaagaagaagagtgctgctgcggggccgggagagccctgctgctggcccccgctacagcgaggagggcctgagccccagcaagagaagaaggctgtccatgaggaaccaccacagcgacctgaccttctgtgagatcatcctgatggagatggagagccatgatgctgcctggcccttcctggagcctgtgaacccccggctggtgtctggctaccgccgcatcatcaagaaccccatggacttcagcaccatgagggagcggctgctgcggggcggctacaccagcagcgaggagtttgctgctgatgccctgctggtgtttgacaactgccagaccttcaatgaagatgattctgaggtgggcaaggccggccacatcatgaggcgcttctttgagagccgctgggaggagttctaccagggcaagcaggccaacctgtag

SEQ ID NO: 112989 - DNA, 2514 bp, Artificial Sequence
  derived and/or modified sequence
gtgcccggccggcggggccggcgggacggcgaggtggacgccaccgcctctagcatacccgaactcgaacgtcagatcgagaaactctcaaagcgccagctgttttttagaaaaaagcttctccactcttcccagatgttgagagcagtgagcttgggccaggacaggtaccgccggagatactgggttctgccctacctagctggcatttttgtcgagggaacagaaggaaacctagtacctgaggaagtgattaagaaagaaacggatagcctgaaggtggctgcccacgcctctttaaatccagctctcttctcaatgaagatggagttagcaggctcaaacactactgcctccagcccagctagagctcgtggtcgcccccgcaagactaaacctggtagcatgcagccacgacatctgaaatccccagtgcgcggccaggattctgagcagccccaggcccaactccaacctgaggcccagctgcatgcccctgcccaaccacagcctcagcttcaactgcagctgcaaagtcacaagggatttctcgagcaggaggggagtcctctctctttagggcagagccagcacgatctgtcacaaagcgcgttcctgtcttggctgtctcaaactcagagccacagctcactcttaagttcaagtgtactgacgccggacagcagcccaggcaagttggatcccgccccttcccagcctcccgaggaaccagaacctgatgaggctgagagtagccctgacccacaggccctgtggttcaacatctctgcccaaatgccgtgcaatgccgctccaacaccacccccagctgtgagcgaagatcagcccacccctagcccacagcagctggcatcttctaagcccatgaaccggcccagcgcggccaacccatgcagccccgtgcagttctcgtcaacccctctggctggcctcgcgccaaaaaggagggcaggtgaccccggggagatgcctcagagcccaacaggtttagggcaacccaagaggaggggacgccccccttccaaatttttcaaacagatggaacaaagatatctgacccagttaactgcccaacccgtcccccctgggtggtggtggattcgggaccccgagatgctagacgctatgctcaaggccctccacccccgaggcattagagagaaggccctgcataagcacctcaacaaacacagagattttctgcaggaggtctgtctccgacccagcgcagaccctatcttcgaacctcgacaactgcctgcttttcaggaaggtattatgtcttggtcaccaaaagaaaaaacatacgagactgatctggcagtccttcaatgggtcgaagagctcgaacagagagttatcatgagtgatctacaaataagaggatggacctgcccctcgccagacagtacccgagaagacctagcatactgcgaacatctcagtgactctcaggaggacatcacctggagaggcaggggacgcgagggactggccccccagaggaagactacgaaccccctcgaccttgccgtgatgaggctggccgctcttgagcagaacgtggagaggcggtacctgcgggagcccctttggcccacacacgaggtggttctggagaaagccctgctgtccacaccaaatggagcaccggaagggaccaccacagagatttcgtatgaaatcactccgcggatcagagtgtggcggcagaccttggaaaggtgtagaagcgcagcccaggtctgcctctgtctgggccaattggagaggtcgatcgcctgggagaagagtgtgaataaagtcacctgtttggtgtgtcgtaaaggggataacgacgagttcctgttgctgtgtgacgggtgtgaccgagggtgtcacatttactgtcatagacctaaaatggaagccgtgcctgagggcgattggttctgcaccgtgtgcctggcccaacaggtggagggggagtttacacagaagcccggctttccaaagcgcgggcagaagagaaaatccggctattcactgaacttttctgaaggtgacgggcggcgcagacgggttctcctcaggggccgcgagtcacccgccgcagggccacgttactcggaagagggactaagcccttcaaagcggcgccgactcagcatgagaaaccaccacagcgacctgacattctgtgagattatcctcatggagatggagtctcatgacgccgcatggcccttcctcgaaccggttaaccctcgcctcgttagcggctacagaagaatcatcaagaatcccatggatttttccacaatgcgtgaacggctccttagagggggatataccagctctgaagaatttgccgcggacgctctcctggtctttgacaactgtcagaccttcaatgaagatgactccgaggtaggaaaggccggacatatcatgcgccgttttttcgaatccaggtgggaggagttttaccaggggaagcaagccaacctctag

SEQ ID NO: 112990 - DNA, 2514 bp, Artificial Sequence
  derived and/or modified sequence
gtccctggccgacgaggccgaagggatggcgaagtggacgcgacagcaagtagcattccggagttggaaagacagatcgaaaagctgtccaaacggcagctgttctttcgaaagaagctgcttcactcaagtcaaatgctccgcgctgtctccctggggcaggataggtataggcgacgatactgggtgctgccatacctcgccggtatatttgtggagggaacggagggaaacttagtcccagaagaagtgatcaaaaaggagacagactcactgaaggtcgcggcacatgcgagcctgaaccctgcactgttttccatgaagatggagctggctggctctaacactacagcttcaagtccagcccgagccaggggacggcctaggaagaccaagcccggaagcatgcagcccaggcaccttaagtccccagtgcggggacaggactcggaacagcctcaggcccagttacagccggaagcccagttacatgcgcctgcgcaaccacagcctcagctgcagcttcagctgcaaagccataaagggtttcttgagcaggagggcagcccgctgagcctagggcagtcgcaacacgacttatctcagtccgcatttctcagttggctcagccagacccaatcccattcttcccttttgagcagttccgtgcttacacccgacagctcccctgggaaacttgatcctgctccgtcacagcccccagaagaaccagaaccagatgaggctgagtcaagcccggatccccaagcactgtggttcaatataagcgctcagatgccatgtaatgccgcacccactccacctccggctgtgagtgaggaccagccaaccccgtccccccagcagctggcgtcatctaaacctatgaacagacctagcgctgccaatccatgttcccctgtgcagttctcttctacacctctggctggcttagctccaaaacggagagccggtgaccccggtgaaatgcctcagagccccactgggcttggtcagcctaaaagacggggacgtcctccttccaagttcttcaagcagatggagcaacgatacttgacccagttgacagcacagcctgtgcctcccggatggtggtggatccgggatccagagatgctagacgcaatgctgaaagccctgcaccccagaggaattcgggagaaagccctgcacaaacacctgaacaagcacagagacttcctacaagaggtgtgcctgcgccctagtgccgatcccatctttgagcctaggcagctgcccgcttttcaggaagggatcatgtcttggagcccaaaggagaaaacgtacgaaacagatctggcagttttacaatgggtggaggagctggagcagagggtgattatgtctgatctccagatccgcggatggacctgcccctctcccgattcaactcgcgaagatctggcatactgcgaacacctttctgacagtcaggaagatatcacttggcgaggccgagggagagagggcctagcacctcaaagaaagacaaccaatcctttggacttggcggttatgcgcctcgccgctttagagcaaaacgtggagcgccgatatctgagagagcccctctggcccactcatgaggtggtgttagaaaaggctttgctgagtacacctaatggggcacccgaagggacaacgacagaaatctcgtacgaaatcaccccgaggattcgagtgtggcggcaaacactggagcggtgccggtccgctgcgcaggtgtgcttgtgcctcggccagctggagaggtcgatcgcctgggaaaaatccgttaacaaggtcacgtgcctcgtgtgtaggaagggcgataacgacgagttcttgctgctttgtgacggatgcgatcgaggctgtcatatatattgccaccgcccaaagatggaggctgtgcccgagggcgactggttttgcacagtgtgtctggcacaacaggttgagggcgaatttactcagaagccgggattcccgaaacgaggtcagaaacgcaaaagcggctattcgctgaatttctccgaaggcgatggccgacgtcgaagggtactactgagaggcagggaatcccctgccgctggaccaagatacagtgaggaaggcctctcacctagcaagagacggaggctgagcatgaggaaccatcacagcgatctcacattttgtgagatcattctgatggaaatggagtcacatgacgccgcttggccctttttagagcctgtcaatcctagactggtgtcgggatacaggagaatcatcaagaatcctatggattttagtactatgcgagagcggctgctccgagggggttacacgtcttctgaggagttcgccgcagacgcactgctagtgtttgataactgccagactttcaatgaggatgacagtgaggttggcaaagccggacatattatgcgtcgattcttcgaatcgaggtgggaggagttttaccagggaaaacaggccaacttatag

SEQ ID NO: 112991 - DNA, 2773 bp, Artificial Sequence
  derived and/or modified sequence
gtccctggccgcaggggtcgaagagatggagaggttgatgccacagcatctagcatcccagagctagagcgccagatagaaaaactcagcaagcgtcagcttttctttcgcaaaaagctgcttcactcatcccagatgcttcgggcggtctccctgggtcaggaccgctacagacgtcgctactgggtattgccgtatttggctggtatctttgtagaaggaacagaggggaacttagttcctgaggaggtgataaagaaggaaactgactccttaaaagtggcagcccatgcgtcactcaaccctgccctcttctctatgaagatggagttagctggctccaacaccactgccagttctcctgcccgggcccgaggccgacctcgaaaaactaagcccgggtctatgcaacctaggcatcttaagtcccctgtcaggggtcaggattcagaacagccccaggcccagcttcagcctgaggctcagcttcatgctcctgcccagccccagcctcagcttcagcttcagcttcagtcccataaggggttcctggagcaagaaggctcccctttgtcactgggtcagagccagcatgacctcagccagtcagccttcctgtcttggctgagccagactcagagccatagctccctgttgagcagctcagtcctcacacctgatagcagtccgggaaaactagacccagctccatcacaacccccggaggagccagagcctgatgaggcagaatccagccctgatcctcaagcactctggtttaacatctcagcccagatgccctgcaatgctgcccccacaccgccccctgcagtttctgaggaccaacccactccctcccctcagcagcttgcctcctccaagccaatgaatagacctagtgctgccaacccttgttctccagtgcagttctcttccacgcccttggctgggttggcccctaagaggcgagcaggagaccctggagaaatgccacagagtcccacagggctgggacagcccaaacggagagggagacctcccagtaagttcttcaaacagatggaacagcgttacctaacccagctgacagcccagcctgtcccacctggctggtggtggatacgagatcctgagatgttggatgccatgctcaaggccctacacccccgaggtatccgggagaaggcacttcacaaacaccttaacaagcacagggacttcttgcaggaagtctgcctgcggccctcagctgaccccatctttgagcccaggcaactacctgcctttcaagaagggattatgagctggtcccccaaagagaagacatacgagacagacctagcagtgcttcaatgggtagaggagctggagcagcgggttatcatgtctgatctgcagattcggggctggacatgtcctagcccagactctacccgtgaagacttggcctactgtgagcacctctccgactcccaggaggatatcacctggcgaggtcggggcagggagggactggcacctcagcgtaaaactaccaaccctttggacctggctgtgatgcggctggctgccctggaacagaatgtagaacggcggtacctgcgggagcccctctggccaactcatgaggttgtgctggagaaggccctgcttagcacacctaatggtgcccctgagggcaccactacagagatatcatatgagatcacccctcgcattcgtgtctggcgccagaccctcgagcggtgccggagcgcagcccaggtgtgcttgtgcctgggccagctggagaggtccattgcctgggagaagtctgtcaacaaagtgacatgtctagtctgccggaagggtgacaatgatgagtttcttctgctttgtgatgggtgtgaccgtggctgccacatttactgccatcgtcccaagatggaggctgtcccagaaggagattggttctgtactgtctgtttggctcagcaggtggagggagaattcactcagaagcctggtttcccaaagcgtggccagaagcggaaaagtggttattcgctgaacttctcagagggtgatggccgccgacgccgggtactgttgaggggccgagaaagcccagcagcagggcctcggtactcggaagaagggctctccccctccaagcggcggcgactctctatgcggaaccaccacagtgatctcacattttgcgagattatcctgatggagatggagtcccatgatgcagcctggcctttcctagagcctgtgaacccacgtttggtgagtgggtaccggcgcatcatcaaaaatcctatggatttttccaccatgcgggagcggctgctcaggggagggtacaccagctcagaggagtttgcggctgatgccctcctggtatttgacaactgccagactttcaacgaggatgactctgaagtaggcaaggctgggcacatcatgcgccgcttcttcgagagccgctgggaggagttttatcagggaaaacaggccaatctgtgaggcaagggaggtggggagtcaccttgtggcatctccccccaccttccaaacaaaaacctgccattttcacctgctgatgctgccctgggtccagactcaagtcagatacaaccctgatttttgaccttgcccttggcagtgccccacatcctcttattcctacatccctttctcccttccctcctcttgctcctcaagtaagaggtgcagagatgaggtccttctggactaaaagccaaaaaaagaaagaaaaaaataa

SEQ ID NO: 112992 - DNA, 2514 bp, Artificial Sequence
  derived and/or modified sequence
gtgcccggcagaagaggcagaagagacggcgaggtggacgccaccgccagcagcatccccgagctggagagacagatcgagaagctgagcaagagacagctgttcttcagaaagaagctgctgcacagcagccagatgctgagagccgtgagcctgggccaggacagatacagaagaagatactgggtgctgccctacctggccggcatcttcgtggagggcaccgagggcaacctggtgcccgaggaggtgatcaagaaggagaccgacagcctgaaggtggccgcccacgccagcctgaaccccgccctgttcagcatgaagatggagctggccggcagcaacaccaccgccagcagccccgccagagccagaggcagacccagaaagaccaagcccggcagcatgcagcccagacacctgaagagccccgtgagaggccaggacagcgagcagccccaggcccagctgcagcccgaggcccagctgcacgcccccgcccagccccagccccagctgcagctgcagctgcagagccacaagggcttcctggagcaggagggcagccccctgagcctgggccagagccagcacgacctgagccagagcgccttcctgagctggctgagccagacccagagccacagcagcctgctgagcagcagcgtgctgacccccgacagcagccccggcaagctggaccccgcccccagccagccccccgaggagcccgagcccgacgaggccgagagcagccccgacccccaggccctgtggttcaacatcagcgcccagatgccctgcaacgccgcccccacccccccccccgccgtgagcgaggaccagcccacccccagcccccagcagctggccagcagcaagcccatgaacagacccagcgccgccaacccctgcagccccgtgcagttcagcagcacccccctggccggcctggcccccaagagaagagccggcgaccccggcgagatgccccagagccccaccggcctgggccagcccaagagaagaggcagaccccccagcaagttcttcaagcagatggagcagagatacctgacccagctgaccgcccagcccgtgccccccggctggtggtggatcagagaccccgagatgctggacgccatgctgaaggccctgcaccccagaggcatcagagagaaggccctgcacaagcacctgaacaagcacagagacttcctgcaggaggtgtgcctgagacccagcgccgaccccatcttcgagcccagacagctgcccgccttccaggagggcatcatgagctggagccccaaggagaagacctacgagaccgacctggccgtgctgcagtgggtggaggagctggagcagagagtgatcatgagcgacctgcagatcagaggctggacctgccccagccccgacagcaccagagaggacctggcctactgcgagcacctgagcgacagccaggaggacatcacctggagaggcagaggcagagagggcctggccccccagagaaagaccaccaaccccctggacctggccgtgatgagactggccgccctggagcagaacgtggagagaagatacctgagagagcccctgtggcccacccacgaggtggtgctggagaaggccctgctgagcacccccaacggcgcccccgagggcaccaccaccgagatcagctacgagatcacccccagaatcagagtgtggagacagaccctggagagatgcagaagcgccgcccaggtgtgcctgtgcctgggccagctggagagaagcatcgcctgggagaagagcgtgaacaaggtgacctgcctggtgtgcagaaagggcgacaacgacgagttcctgctgctgtgcgacggctgcgacagaggctgccacatctactgccacagacccaagatggaggccgtgcccgagggcgactggttctgcaccgtgtgcctggcccagcaggtggagggcgagttcacccagaagcccggcttccccaagagaggccagaagagaaagagcggctacagcctgaacttcagcgagggcgacggcagaagaagaagagtgctgctgagaggcagagagagccccgccgccggccccagatacagcgaggagggcctgagccccagcaagagaagaagactgagcatgagaaaccaccacagcgacctgaccttctgcgagatcatcctgatggagatggagagccacgacgccgcctggcccttcctggagcccgtgaaccccagactggtgagcggctacagaagaatcatcaagaaccccatggacttcagcaccatgagagagagactgctgagaggcggctacaccagcagcgaggagttcgccgccgacgccctgctggtgttcgacaactgccagaccttcaacgaggacgacagcgaggtgggcaaggccggccacatcatgagaagattcttcgagagcagatgggaggagttctaccagggcaagcaggccaacctgtag

SEQ ID NO: 112993 - DNA, 1474 bp, Artificial Sequence
  derived and/or modified sequence
gcacagagccactagattagtctgtgagggaaggagatgcctcttccttcccttcaatagtgggttaaacccagctggcaccctctggaactacgggaacaatattcttcaagagaaggtcactctaccaaagccaggagcacagtattctcaggatctcaacaaggaagagcagaccaagctatcaacagtcctcagctggccaacctataaatgcaaagccatcccaaactgcaaatgctaagcccataccaagaactcctgatcatgaaatacaaggatcaaaagaagctttgattcaagatttggaaagaaagctgaaatgcaaggacacccttcttcataatggaaatcaacgtctaacatatgaagagaagatggctcgcagattgctaggaccacagaatgcagctgctgtgtttcaagctcaggatgacagtggtgcacaagactcgcagcaacacaactcagaacatgcgcgactgcaagttcctacatcacaagtaagaagtagatcaacctcaaggggagatgtgaatgatcaggatgcaatccaggagaaattttacccaccacgtttcattcaagtgccagagaacatgtcgattgatgaaggaagattctgcagaatggacttcaaagtgagtggactgccagctcctgatgtgtcatggtatctaaatggaagaacagttcaatcagatgatttgcacaaaatgatagtgtctgagaagggtcttcattcactcatctttgaagtagtcagagcttcagatgcaggggcttatgcatgtgttgccaagaatagagcaggagaagccaccttcactgtgcagctggatgtccttgcaaaagaacataaaagagcaccaatgtttatctacaaaccacagagcaaaaaagttttagagggagattcagtgaaactagaatgccagatctcggctatacctccaccaaagcttttctggaaaagaaataatgaaatggtacaattcaacactgaccgaataagcttatatcaagataacactggaagagttactttactgataaaagatgtaaacaagaaagatgctgggtggtatactgtgtcagcagttaatgaagctggagtgactacatgtaacacaagattagacgttacggcacgtccaaaccaaactcttccagctcctaagcagttacgggttcgaccaacattcagcaaatatttagcacttaatgggaaaggtttgaatgtaaaacaagcttttaacccagaaggagaatttcagcgtttggcagctcaatctggactctatgaaagtgaagaactttaataactttaccaacattggaaaacagccaactacaccattagtaatatatttgattacatttttttgaaattaatccatagctgtattaacagattatggttttaattaggtaatatagttaatatatatttataatattatttatcctttga

SEQ ID NO: 112994 - DNA, 723 bp, Artificial Sequence
  derived and/or modified sequence
atgttcgccgagttctttggggggcgcaacccattcgacacctttttcggccaacgtaatggtgaagagggaatggatatcgacgacccgttttccggtttcccgatgggcatgggaggattcaccaatgtgaattttggtaggtccaggagcgcccaggaacccgcaaggaagaagcaggaccctcccgtcacacacgaccttagggtttctcttgaggaaatctactcaggctgcaccaaaaagatgaaaatctctcataaaagacttaatcccgatggtaaatccatcagaaatgaagataaaattcttaccatcgaagtgaagaaaggctggaaagagggcacaaagatcacgtttcccaaggagggggaccagacctccaataacattccggctgacatcgtctttgtacttaaggacaagcctcacaacatctttaagagggatggctccgatgtgatctaccctgctaggataagcctgagagaggccctgtgcggctgcacagtgaatgttcccacacttgacgggcggacgatcccggtagtctttaaggacgtgataaggcccgggatgcgtcgaaaagtaccaggagagggcctgccactgccaaaaacgccggagaagcgaggggacctgataatcgagttcgaagtgattttccccgaaaggattcctcagacctcacggaccgtcttagagcaggtgctgccgatatag

SEQ ID NO: 112995 - DNA, 723 bp, Artificial Sequence
  derived and/or modified sequence
atgtttgctgagttcttcggcggcaggaacccctttgacaccttcttcggccagagaaatggagaggagggcatggacattgatgaccccttcagcggcttccccatgggcatgggcggcttcaccaacgtgaactttggccgcagccgcagcgcccaggagcccgccaggaagaagcaggacccccctgtgacccatgacctgcgggtgtccctggaggagatctacagcggctgcaccaagaagatgaagatcagccacaagaggctgaacccagatggcaagagcatcagaaatgaagacaagatcctgaccatcgaggtgaagaagggctggaaggagggcaccaagatcaccttccccaaggagggggaccagaccagcaacaacatcccagctgacatcgtgtttgtgctgaaggacaagccccacaacatcttcaagagagatggcagtgatgtgatctacccagcccgcatcagcctgcgggaggccctgtgtggctgcaccgtgaatgtgcccaccctggatggccgcaccatccctgtggtgttcaaggatgtgatccggcccggcatgaggaggaaggtgcctggagagggcctgcccctgcccaagaccccagagaagagaggagacctgatcatcgagtttgaggtgatcttccctgagcgcatcccccagaccagcaggacagtgctggagcaggtgctgcccatctag

SEQ ID NO: 112996 - DNA, 723 bp, Artificial Sequence
  derived and/or modified sequence
atgttcgccgagttcttcggcggccggaaccccttcgacaccttctttggtcagaggaatggcgaagaaggcatggatatagacgacccctttagcggattcccaatgggcatggggggctttactaatgtgaattttggccggagccgctcggcccaagaacctgctagaaagaaacaggatcctccagttacacacgacctgcgcgtgtcgctggaggaaatctattcagggtgcaccaagaagatgaagatatcgcataagcgcctgaacccagatggcaagtcgatccgcaacgaggacaagatcctgacgatcgaggtcaaaaagggttggaaagaggggaccaagattacattcccgaaggagggcgaccagacttccaataacatcccagccgacatcgtgtttgtcctgaaagataaacctcataatatattcaaacgcgatggctcggatgtcatctacccggcacggatttcactacgagaggctctgtgtggctgcactgtgaatgttccgactctggatggccgtacaattcccgttgttttcaaggacgtcatccgtccaggcatgagaaggaaagtgcctggcgaaggtctgccattgcccaagactcccgagaaacggggcgacctgataatcgaattcgaagtcatcttccccgaacggatcccacaaacatcacgcacggtgctcgaacaggtcctgccaatttag

SEQ ID NO: 112997 - DNA, 723 bp, Artificial Sequence
  derived and/or modified sequence
atgtttgcagagttttttgggggtcggaaccccttcgacacattctttgggcaacgcaacggtgaggagggaatggatattgatgaccccttctctgggttcccgatgggtatgggcggttttacgaatgttaacttcggaagatcaagaagcgcgcaagagcctgcacgtaaaaagcaggatcccccagtgacgcatgatctgagggtgtcactggaggagatctactctggctgcaccaaaaaaatgaagattagccataaaaggctaaaccccgatggaaaatccattcggaatgaggacaaaatactgaccatcgaggtgaaaaagggatggaaagaggggactaaaataactttccctaaggagggcgatcagacatccaataacatccctgctgacattgtgtttgttctgaaggacaagcctcataatatcttcaagcgggacggcagcgatgtgatttacccggctcgcattagtctcagggaagcactatgtggctgcacagtgaacgtgccaacactcgatggtcgcactataccagtggtatttaaagacgtgatcagacccggaatgcggcgtaaggttccaggggaggggctgccactccccaaaacgcccgaaaagcgcggagacctcatcattgagttcgaggtcattttccctgaaagaatacctcaaacgtccagaaccgtactggaacaggtacttccaatttag

SEQ ID NO: 112998 - DNA, 723 bp, Artificial Sequence
  derived and/or modified sequence
atgttcgccgagttcttcggcggcagaaaccccttcgacaccttcttcggccagagaaacggcgaggagggcatggacatcgacgaccccttcagcggcttccccatgggcatgggcggcttcaccaacgtgaacttcggcagaagcagaagcgcccaggagcccgccagaaagaagcaggacccccccgtgacccacgacctgagagtgagcctggaggagatctacagcggctgcaccaagaagatgaagatcagccacaagagactgaaccccgacggcaagagcatcagaaacgaggacaagatcctgaccatcgaggtgaagaagggctggaaggagggcaccaagatcaccttccccaaggagggcgaccagaccagcaacaacatccccgccgacatcgtgttcgtgctgaaggacaagccccacaacatcttcaagagagacggcagcgacgtgatctaccccgccagaatcagcctgagagaggccctgtgcggctgcaccgtgaacgtgcccaccctggacggcagaaccatccccgtggtgttcaaggacgtgatcagacccggcatgagaagaaaggtgcccggcgagggcctgcccctgcccaagacccccgagaagagaggcgacctgatcatcgagttcgaggtgatcttccccgagagaatcccccagaccagcagaaccgtgctggagcaggtgctgcccatctag

SEQ ID NO: 112999 - protein, 264 aa, Artificial Sequence
  derived and/or modified sequence
MSARKSSDASACSSSEISDSFVKEFLAKAKEDFLKKWENPTQNNAGLEDFERKKTLGTGSFGRVMLVKHKATEQYYAMKILDKQKVVKLKQIEHTLNEKRILQAVNFPFLVRLEYAFKDNSNLYMVMEYVPGGEMFSHLRRIGRFSEPHARFYAAQIVLTFEYLHSLDLIYRDLKPENLLIDHQGYIQVTDFGFAKRVKGRTWTLCGTPEYLAPEIILSKGYNKAVDWWALGVLIYEMAAGYPPFFADQPIQIYEKIVSGKQNF

SEQ ID NO: 113000 - DNA, 795 bp, Artificial Sequence
  derived and/or modified sequence
atgagtgccaggaagagcagcgacgctagcgcttgcagctcctctgagattagtgatagcttcgttaaggagtttctcgccaaggccaaagaggacttcctcaagaagtgggagaatcctacacagaataacgctggactcgaagatttcgagagaaagaaaaccctcgggaccggctcttttgggcgagtgatgctggtgaaacataaagccaccgagcagtactacgccatgaagattctggacaagcagaaagtggtgaaactaaagcagatagagcacacactgaacgaaaagcgtattctgcaggccgtcaattttcctttcttggtgcggctagagtatgcgttcaaagacaattcaaacctgtacatggtgatggaatacgttcctggaggtgagatgttttcccacctgcgcagaatcgggcgcttttcagagccccacgcgcggttctacgcagcccagatcgttctgaccttcgagtacctccattccctggacttaatttacagagaccttaaacctgaaaatctgctgattgaccaccagggatatatccaagtaaccgacttcggcttcgcaaagcgtgtcaaaggacgcacatggaccctttgcggtacccccgagtacctggcacctgagatcattttgagcaagggctacaacaaagcagtggattggtgggcgctcggagtgctcatatacgaaatggcggctggctacccgccattttttgccgatcaacctattcagatttatgaaaaaatcgtatctggcaagcagaatttctag

SEQ ID NO: 113001 - DNA, 528 bp, Artificial Sequence
  derived and/or modified sequence
atggggctgagcaggaagtcatcggatgcttccgcctgctcttcatctgagattagcgacagctttgtgaaggaattcctggccaaagctaaggaggactttctgaagaagtgggagaacccaacccaaaacaatgcagggttggaagattttgaaagaaaaaagacattggggaccgggagcttcgggagggtcatgcttgttaagcacaaggctaccgaacagtattacgctatgaagattctggataaacagaaagtggtgaagcttaaacagatcgagcacactttaaatgagaaaaggatcctccaggcagtgaatttcccttttctggtaagactggaatacgcctttaaggacaactcaaacctgtacatggtcatggagtacgtgcctggcggggaaatgttctcccatctgcgccgaattgggaggttctcggagccgcacgcacgcttctatgcagcgcagatcgtcctgacatttgaatacttgcattccctagatttgatttatagagacctgtag

SEQ ID NO: 113002 - DNA, 795 bp, Artificial Sequence
  derived and/or modified sequence
atgtctgccaggaagagcagtgatgccagcgcctgcagcagcagcgagatcagtgacagctttgtgaaggagttcctggccaaggccaaggaggacttcctgaagaagtgggagaaccccacccagaacaatgccggcctggaggactttgagaggaagaagaccctgggcaccggcagctttggccgggtgatgctggtgaagcacaaggccacagagcagtactatgccatgaagatcctggacaagcagaaggtggtgaagctgaagcagatcgagcacaccctgaatgagaagaggatcctgcaggccgtgaacttccccttcctggtgcggctggagtatgccttcaaggacaacagcaacctgtacatggtgatggagtatgtgcctggaggagagatgttcagccacctgcggcgcatcggccgcttcagcgagccccacgcccgcttctacgccgcccagatcgtgctgacctttgagtacctgcacagcctggacctgatctacagagacctgaagccagagaacctgctgattgaccaccagggctacatccaggtgacagactttggatttgccaagagggtgaagggccgcacctggaccctgtgtggcaccccagagtacctggcccctgagatcatcctgagcaagggctacaacaaggctgtggactggtgggccctgggcgtgctgatctatgagatggccgccggctacccacccttctttgctgaccagcccatccagatctatgagaagatcgtgtctgggaagcagaacttctag

SEQ ID NO: 113003 - DNA, 528 bp, Artificial Sequence
  derived and/or modified sequence
atgggcctgagcaggaagagcagtgatgccagcgcctgcagcagcagcgagatcagtgacagctttgtgaaggagttcctggccaaggccaaggaggacttcctgaagaagtgggagaaccccacccagaacaatgccggcctggaggactttgagaggaagaagaccctgggcaccggcagctttggccgggtgatgctggtgaagcacaaggccacagagcagtactatgccatgaagatcctggacaagcagaaggtggtgaagctgaagcagatcgagcacaccctgaatgagaagaggatcctgcaggccgtgaacttccccttcctggtgcggctggagtatgccttcaaggacaacagcaacctgtacatggtgatggagtatgtgcctggaggagagatgttcagccacctgcggagaattggccgcttcagcgagccccacgcccgcttctatgctgcccagatcgtgctgacctttgagtacctgcacagcctggacctgatctacagagacctgtag

SEQ ID NO: 113004 - DNA, 795 bp, Artificial Sequence
  derived and/or modified sequence
atgagcgcccggaagagcagcgacgccagcgcctgcagcagcagcgaaatttctgactccttcgtcaaagaattccttgctaaggcaaaagaagacttcctcaaaaaatgggaaaaccccacgcagaataacgctggactcgaagacttcgagcggaaaaagacacttggcaccggatcctttggccgcgtcatgttggtgaaacacaaggccaccgagcagtactacgccatgaagatcctggacaaacagaaggtggtaaagctaaaacagatagaacacacactgaacgagaagcggattctccaagctgtcaattttccctttttagtgcggttggagtacgcattcaaggataacagcaatctgtacatggtcatggaatacgttcctggaggggagatgttttcccatttgaggcgaatcggtagattctccgaaccacatgcccgtttctacgctgcgcagattgtactgacatttgagtatttgcattcccttgatttaatttatcgggatttgaagcccgagaacttactcatagaccaccaaggctatatccaagtcacagacttcggttttgccaagcgggtaaaagggcgcacttggaccctctgcggaaccccagagtacttggcacctgagatcattctgtccaagggctataacaaggcggttgattggtgggctttaggagtccttatatacgaaatggcagcaggatatcctcccttttttgctgatcagccaattcaaatctatgagaagatcgtctcgggcaaacagaatttctag

SEQ ID NO: 113005 - DNA, 528 bp, Artificial Sequence
  derived and/or modified sequence
atgggcctgagccggaagagcagcgacgccagcgcctgcagcagctccgagatttcagatagctttgtgaaagaattccttgctaaagctaaggaggattttctgaagaaatgggagaacccaactcagaataacgcaggcttagaggattttgaaaggaaaaaaacactgggtactggctcctttggccgcgtcatgttagttaagcataaagccaccgaacagtactatgcgatgaagatactggacaagcagaaagtggtgaaactgaagcagatagagcacaccctgaacgagaaaagaatcctgcaggctgtgaacttcccatttctagtccgtttggagtacgccttcaaggacaacagcaatctctatatggtgatggaatacgtacctgggggcgagatgttctcccacctcaggagaatcggtcgattcagcgagccacacgctagattctacgcagctcagattgtgctaacgttcgagtaccttcattccttagacctaatatatcgtgatttgtag

SEQ ID NO: 113006 - DNA, 795 bp, Artificial Sequence
  derived and/or modified sequence
atgagtgccaggaagtcctctgacgctagcgcctgttctagtagcgagatcagcgactcctttgtgaaagaattcctcgcaaaagccaaggaggatttccttaaaaaatgggaaaacccgacgcagaataacgcagggctggaagatttcgaaagaaaaaaaacccttggcacagggtcgttcggcagggtgatgttggtgaaacacaaagctactgagcagtattacgcgatgaaaatcctagataaacagaaagtcgtgaagctgaagcagatagagcacactttaaacgagaaaagaatcctacaggcggtgaatttcccatttctggtccgcttggagtacgcctttaaggataattccaatctttacatggtgatggaatacgtcccaggtggtgaaatgttcagccaccttcgaagaattggtaggttctctgagccgcatgcacgcttttacgcggctcaaattgtattaacttttgaatacttacactctctggatctgatctatagagatttaaagcctgaaaatctgttgatagaccaccagggctacattcaggttactgactttgggttcgctaagagagtgaagggcaggacttggaccctgtgcgggacccctgagtacctggctcctgaaattatactcagtaagggctataacaaagcggtggactggtgggcccttggagtactcatctatgagatggcagcaggctaccctcctttttttgctgatcagcccatccagatatatgagaagattgtctccgggaagcagaacttttag

SEQ ID NO: 113007 - DNA, 528 bp, Artificial Sequence
  derived and/or modified sequence
atggggttaagtagaaagagctcggatgcgtctgcctgcagcagttctgagatttccgatagcttcgtaaaagagtttctggccaaggccaaagaggattttttgaagaagtgggaaaatccaactcaaaacaatgcaggcctcgaagattttgagcgcaaaaagacgctcggtaccggctcatttggacgggttatgttggtaaaacacaaggctacagagcagtactatgcgatgaagatcctcgacaagcagaaggtggttaagctgaaacagattgagcatacgctgaatgagaaaaggatactgcaggcagtgaatttcccattcctcgttagactggagtacgcctttaaagataattccaacttgtatatggtgatggagtatgtcccaggcggagagatgtttagccatcttagacggataggcaggtttagcgagcctcacgcccgtttttatgccgcacagattgtgctaacgtttgaatacctacattcactggatctcatctaccgcgatttatag

SEQ ID NO: 113008 - DNA, 1914 bp, Artificial Sequence
  derived and/or modified sequence
ccattttgagttgttctagtggtatatgaaggaggctgggataactagcttgaaagaaattcagtctagttatagacatctttggcattaatctgatgtttactagtgatatctcatgctaggcagttatgctttgcttctaggggcttctctttttaaaacaaaagaaagctcttttcgttttctgtgtgctgcatgctccagtgtgtgtgtttacaccatcggttcttctccctctagagattagcataactccctttgctgttggattgttattttgagcaatatgttttggaaaggttggttttcatcatgagtgcacgcaaatcatcagatgcatctgcttgctcctcttcagaaatatctgattcctttgtgaaagagtttctagccaaagccaaagaagactttttgaaaaaatgggagaatccaactcagaataatgccggacttgaagattttgaaaggaaaaaaacccttggaacaggttcatttggaagagtcatgttggtaaaacacaaagccactgaacagtattatgccatgaagatcttagataagcagaaggttgttaaactgaagcaaatagagcatactttgaatgagaaaagaatattacaggcagtgaattttcctttccttgttcgactggagtatgcttttaaggataattctaatttatacatggttatggaatatgtccctgggggtgaaatgttttcacatctaagaagaattggaaggttcagtgagccccatgcacggttctatgcagctcagatagtgctaacattcgagtacctccattcactagacctcatctacagagatctaaaacctgaaaatctcttaattgaccatcaaggctatatccaggtcacagactttgggtttgccaaaagagttaaaggcagaacttggacattatgtggaactccagagtatttggctccagaaataattctcagcaagggctacaataaggcagtggattggtgggcattaggagtgctaatctatgaaatggcagctggctatcccccattctttgcagaccaaccaattcagatttatgaaaagattgtttctggaaagcagaacttttgatatgaacaaaacaaaactttgagaaaaattaacagacaaggcagtgatttatttttgaagaatttgagaagtgtagactctcaagaggactaaaggtcatatgaagaatgatgagagaaccaaaatacattaaaatcacaaatggaagaagaatattttactaatacaaaaactaagaatgtaaatgttataataattgtttcaaatcatttaattgacagtaattataaagttcttgaatctttactatattacttttatttatattcatataagaaatccaattttctaacaaggatactgtcataactaaatttacatttattaagaaaaactgctttagttaaaattaatgtgtcttcatttttatgcattggcctcgatttgccaatcattctctattggttaaattttatattcagctgtttatgaatatatattcattttatatcaaactttaaaattttgtatctaataatcagcatatattctaaaatcataacagtctaaatcctgggcaccttagaagaatgacaccagaaaaccttattatatcacaatattctgttttccccttcatttatttagaaatatgacaggatatttggtgtacttttgttttttaactaaaagtaccagattatctctccccatgtgggatataaaattatccccatctcttactccctttactcatctaaagtagaagtcatgaaagtggaatttttgccattaaaaggctctgtattatgtgaagttagattgtattaaccatttcccaataaatcatctgtttcaaaactcaaa

SEQ ID NO: 113009 - DNA, 638 bp, Artificial Sequence
  derived and/or modified sequence
agcacacagcattttaatatcagtgaggtccacagctagcagtaagagctggtgtaattgaaagacgtttaggtgcaatcattctgctgtttgctccttgccaggttcaacatgggattgtcacgcaaatcatcagatgcatctgcttgctcctcttcagaaatatctgattcctttgtgaaagagtttctagccaaagccaaagaagactttttgaaaaaatgggagaatccaactcagaataatgccggacttgaagattttgaaaggaaaaaaacccttggaacaggttcatttggaagagtcatgttggtaaaacacaaagccactgaacagtattatgccatgaagatcttagataagcagaaggttgttaaactgaagcaaatagagcatactttgaatgagaaaagaatattacaggcagtgaattttcctttccttgttcgactggagtatgcttttaaggataattctaatttatacatggttatggaatatgtccctgggggtgaaatgttttcacatctaagaagaattggaaggttcagtgagccccatgcacggttctatgcagctcagatagtgctaacattcgagtacctccattcactagacctcatctacagagatctaaa

SEQ ID NO: 113010 - DNA, 795 bp, Artificial Sequence
  derived and/or modified sequence
atgagcgccagaaagagcagcgacgccagcgcctgcagcagcagcgagatcagcgacagcttcgtgaaggagttcctggccaaggccaaggaggacttcctgaagaagtgggagaaccccacccagaacaacgccggcctggaggacttcgagagaaagaagaccctgggcaccggcagcttcggcagagtgatgctggtgaagcacaaggccaccgagcagtactacgccatgaagatcctggacaagcagaaggtggtgaagctgaagcagatcgagcacaccctgaacgagaagagaatcctgcaggccgtgaacttccccttcctggtgagactggagtacgccttcaaggacaacagcaacctgtacatggtgatggagtacgtgcccggcggcgagatgttcagccacctgagaagaatcggcagattcagcgagccccacgccagattctacgccgcccagatcgtgctgaccttcgagtacctgcacagcctggacctgatctacagagacctgaagcccgagaacctgctgatcgaccaccagggctacatccaggtgaccgacttcggcttcgccaagagagtgaagggcagaacctggaccctgtgcggcacccccgagtacctggcccccgagatcatcctgagcaagggctacaacaaggccgtggactggtgggccctgggcgtgctgatctacgagatggccgccggctacccccccttcttcgccgaccagcccatccagatctacgagaagatcgtgagcggcaagcagaacttctag

SEQ ID NO: 113011 - DNA, 528 bp, Artificial Sequence
  derived and/or modified sequence
atgggcctgagcagaaagagcagcgacgccagcgcctgcagcagcagcgagatcagcgacagcttcgtgaaggagttcctggccaaggccaaggaggacttcctgaagaagtgggagaaccccacccagaacaacgccggcctggaggacttcgagagaaagaagaccctgggcaccggcagcttcggcagagtgatgctggtgaagcacaaggccaccgagcagtactacgccatgaagatcctggacaagcagaaggtggtgaagctgaagcagatcgagcacaccctgaacgagaagagaatcctgcaggccgtgaacttccccttcctggtgagactggagtacgccttcaaggacaacagcaacctgtacatggtgatggagtacgtgcccggcggcgagatgttcagccacctgagaagaatcggcagattcagcgagccccacgccagattctacgccgcccagatcgtgctgaccttcgagtacctgcacagcctggacctgatctacagagacctgtag

SEQ ID NO: 113012 - protein, 245 aa, Artificial Sequence
  derived and/or modified sequence
MGLLKEFLAKAKEDFLKKWENPTQNNAGLEDFERKKTLGTGSFGRVMLVKHKATEQYYAMKILDKQKVVKLKQIEHTLNEKRILQAVNFPFLVRLEYAFKDNSNLYMVMEYVPGGEMFSHLRRIGRFSEPHARFYAAQIVLTFEYLHSLDLIYRDLKPENLLIDHQGYIQVTDFGFAKRVKGRTWTLCGTPEYLAPEIILSKGYNKAVDWWALGVLIYEMAAGYPPFFADQPIQIYEKIVSGKNF

SEQ ID NO: 113013 - DNA, 738 bp, Artificial Sequence
  derived and/or modified sequence
atggggctcctgaaggagttcctggccaaagcgaaagaagactttctaaagaaatgggaaaaccctacacagaataacgccggtctggaagatttcgagcgcaagaagacccttggaaccggaagctttggtagggtcatgttggtcaaacacaaagcaaccgagcaatattacgccatgaagatcctggataaacagaaagtggtcaagctcaaacagattgagcacaccctcaatgagaaaaggatcctacaggcagtcaacttccctttcctagtgaggctcgagtacgcgtttaaagacaatagcaatttgtacatggtcatggagtatgtacctggcggcgaaatgttttcccatctgaggcgcatcgggcggttctcggagccccacgccagattctatgctgcgcaaatagttctaaccttcgagtacctacattccctggatctcatatatcgcgacctgaaaccagagaacctgctaatcgatcaccagggttatattcaggtgactgacttcggcttcgctaaacgggtcaaaggccgaacttggactctgtgtgggactcccgaatacctggcaccagaaattattctctcaaaagggtacaacaaggcagtagattggtgggcactgggagtgctgatttatgagatggctgccggataccctccctttttcgcggaccagccaatacagatttatgaaaaaattgtgagtggcaagaatttctag

SEQ ID NO: 113014 - DNA, 738 bp, Artificial Sequence
  derived and/or modified sequence
atgggcctgctgaaggagttcctggccaaggccaaggaggacttcctgaagaagtgggagaaccccacccagaacaatgccggcctggaggactttgagaggaagaagaccctgggcaccggcagctttggccgggtgatgctggtgaagcacaaggccacagagcagtactatgccatgaagatcctggacaagcagaaggtggtgaagctgaagcagatcgagcacaccctgaatgagaagaggatcctgcaggccgtgaacttccccttcctggtgcggctggagtatgccttcaaggacaacagcaacctgtacatggtgatggagtatgtgcctggaggagagatgttcagccacctgcggcgcatcggccgcttcagcgagccccacgcccgcttctacgccgcccagatcgtgctgacctttgagtacctgcacagcctggacctgatctacagagacctgaagccagagaacctgctgattgaccaccagggctacatccaggtgacagactttggatttgccaagagggtgaagggccgcacctggaccctgtgtggcaccccagagtacctggcccctgagatcatcctgagcaagggctacaacaaggctgtggactggtgggccctgggcgtgctgatctatgagatggccgccggctacccacccttctttgctgaccagcccatccagatctatgagaagatcgtgtctgggaagaacttctag

SEQ ID NO: 113015 - DNA, 738 bp, Artificial Sequence
  derived and/or modified sequence
atgggcctgctgaaggagttcctggccaaggccaaggaggacttcctcaagaagtgggagaaccctactcaaaacaacgccggcttggaggactttgagcgaaagaagactctgggtacgggctccttcggcagggttatgcttgtgaagcacaaagctacagagcaatactacgcaatgaagatcctcgacaaacagaaggtcgtgaaactcaagcagattgaacacaccctcaacgagaagcgaattctgcaagctgtgaattttccattcctggtacgtctcgaatacgcatttaaggataattctaacttgtatatggttatggaatacgtgcctgggggggagatgtttagtcatctaaggcgaattggtcggttcagtgagccacacgcccggttctatgcagcacagatcgtgctaacttttgagtacctacattctctggacctaatctaccgtgacctgaagcccgaaaacctgctgatcgatcatcaggggtatattcaagttactgactttgggttcgctaaaagagtcaagggaaggacatggacactgtgcggcactcccgagtatctagcaccagagattatcctctctaaaggctacaacaaggccgtcgattggtgggccctcggggtattgatctatgaaatggctgccggttacccccctttcttcgccgatcaaccaatccaaatctatgaaaagattgtcagtggaaagaatttttag

SEQ ID NO: 113016 - DNA, 738 bp, Artificial Sequence
  derived and/or modified sequence
atgggactactgaaagaattcctggccaaagcaaaagaagacttcttaaaaaagtgggaaaatccaacccagaataatgcagggttggaggactttgagaggaagaagacacttgggaccggatcctttggtagagtcatgctggtcaagcacaaagcgaccgaacaatactacgccatgaagattctggacaagcagaaggtggtgaagcttaaacagattgagcacaccctgaacgaaaaacgcatactgcaggcggtgaatttcccattcctggtgcgcttagaatacgccttcaaggacaattctaatctgtacatggtaatggagtacgtcccgggaggcgagatgttcagtcatttaagacggatcggccgtttcagcgagccccacgctcgtttttacgcggcacagattgtgttaacatttgagtatctccattccctggacctgatttaccgagatctaaagcctgagaacttgttgattgatcaccaaggctatatccaggtaactgatttcggcttcgcaaaaagggttaaaggtagaacgtggaccttgtgtgggacacctgagtaccttgctccggaaattatccttagcaaaggctataacaaggcggttgattggtgggctttgggagtgttgatctatgaaatggcggctgggtatccaccttttttcgctgaccaacccatccagatctatgagaagatcgttagcggcaaaaatttctag

SEQ ID NO: 113017 - DNA, 869 bp, Artificial Sequence
  derived and/or modified sequence
aatatcagtgaggtccacagctagcagtaagagctggtgtaattgaaagacgtttaggtgcaatcattctgctgtttgctccttgccaggttcaacatgggattgttgaaagagtttctagccaaagccaaagaagactttttgaaaaaatgggagaatccaactcagaataatgccggacttgaagattttgaaaggaaaaaaacccttggaacaggttcatttggaagagtcatgttggtaaaacacaaagccactgaacagtattatgccatgaagatcttagataagcagaaggttgttaaactgaagcaaatagagcatactttgaatgagaaaagaatattacaggcagtgaattttcctttccttgttcgactggagtatgcttttaaggataattctaatttatacatggttatggaatatgtccctgggggtgaaatgttttcacatctaagaagaattggaaggttcagtgagccccatgcacggttctatgcagctcagatagtgctaacattcgagtacctccattcactagacctcatctacagagatctaaaacctgaaaatctcttaattgaccatcaaggctatatccaggtcacagactttgggtttgccaaaagagttaaaggcagaacttggacattatgtggaactccagagtatttggctccagaaataattctcagcaagggctacaataaggcagtggattggtgggcattaggagtgctaatctatgaaatggcagctggctatcccccattctttgcagaccaaccaattcagatttatgaaaagattgtttctggaaagaacttttgatatgaacaaaacaaaactttgagaaaaattaacag

SEQ ID NO: 113018 - DNA, 738 bp, Artificial Sequence
  derived and/or modified sequence
atgggcctgctgaaggagttcctggccaaggccaaggaggacttcctgaagaagtgggagaaccccacccagaacaacgccggcctggaggacttcgagagaaagaagaccctgggcaccggcagcttcggcagagtgatgctggtgaagcacaaggccaccgagcagtactacgccatgaagatcctggacaagcagaaggtggtgaagctgaagcagatcgagcacaccctgaacgagaagagaatcctgcaggccgtgaacttccccttcctggtgagactggagtacgccttcaaggacaacagcaacctgtacatggtgatggagtacgtgcccggcggcgagatgttcagccacctgagaagaatcggcagattcagcgagccccacgccagattctacgccgcccagatcgtgctgaccttcgagtacctgcacagcctggacctgatctacagagacctgaagcccgagaacctgctgatcgaccaccagggctacatccaggtgaccgacttcggcttcgccaagagagtgaagggcagaacctggaccctgtgcggcacccccgagtacctggcccccgagatcatcctgagcaagggctacaacaaggccgtggactggtgggccctgggcgtgctgatctacgagatggccgccggctacccccccttcttcgccgaccagcccatccagatctacgagaagatcgtgagcggcaagaacttctag

SEQ ID NO: 113019 - protein, 118 aa, Artificial Sequence
  derived and/or modified sequence
MSARGEGAGQPSTSAQGQPAAPAPQKRGRGRPRKQQQEPTGEPSPKRPRGRPKGSKNKSPSKAAQKKAEATGEKRPRGRPRKWPQQVVQKKPAQVNVALPGKDHPGNLIYLLFSKNAT

SEQ ID NO: 113020 - protein, 86 aa, Artificial Sequence
  derived and/or modified sequence
MSARGEGAGQPSTSAQGQPAAPAPQKRGRGRPRKQQQEPTGEPSPKRPRGRPKGSKNKSPSKAAQKKAEATGEKRPRGRPRKWLQN

SEQ ID NO: 113021 - protein, 99 aa, Artificial Sequence
  derived and/or modified sequence
MSARGEGAGQPSTSAQGQPAAPAPQKRGRGRPRKQQQEPTGEPSPKRPRGRPKGSKNKSPSKAAQKKAEATGEKRPRGRPRKWPQQVVQKKPAQVRHSH

SEQ ID NO: 113022 - DNA, 357 bp, Artificial Sequence
  derived and/or modified sequence
atgagcgctcggggagagggggctggacagccgtccacgtctgctcagggccagcccgcggctccagccccacaaaaacggggaagaggccggccccggaagcagcaacaagagcctactggggaacccagccccaaaaggccgcgtgggcgcccaaagggcagcaagaataagtctccctcaaaggccgcacaaaagaaagccgaggctacaggtgaaaagagaccccggggcagacccagaaaatggccccaacaagtggtgcagaagaaacctgctcaggtgaacgtggccctgccaggcaaagatcaccccggtaacctgatctatctgctgttctcaaagaacgccacatag

SEQ ID NO: 113023 - DNA, 611 bp, Artificial Sequence
  derived and/or modified sequence
agcaacagcagccctcgcagcccgccagctcgcgctcgccccgccggcgtccccagccctatcacctcatctcccgaaaggtgctgggcagctccggggcggtcgaggcgaagcggctgcagcggcggtagcggcggcgggaggcaggatgagcgcacgcggtgagggcgcggggcagccgtccacttcagcccagggacaacctgccgccccagcgcctcagaagagaggacgcggccgccccaggaagcagcagcaagaaccaaccggtgagccctctcctaagagacccaggggaagacccaaaggcagcaaaaacaagagtccctctaaagcagctcaaaagaaagcagaagccactggagaaaaacggccaagaggcagacctaggaaatggccacaacaagttgttcagaagaagcctgctcaggtcaatgttgccttgcctgggaaggaccacccgggcaatcttatatatctactgttctctaaaaatgccacttagaagagaattgaaacttccaaacacatgaaaggatccaaggaaagtgtcttcaaacaattacatatgagctttaagtggaataaaaacagagttaccatgaaaaaaa

SEQ ID NO: 113024 - DNA, 357 bp, Artificial Sequence
  derived and/or modified sequence
atgtctgcccggggggagggcgccggccagcccagcaccagcgcccagggccagcctgctgccccagccccccagaagaggggccggggccggcccaggaagcagcagcaggagcccaccggggagcccagccccaagaggccccggggccggcccaagggcagcaagaacaagagccccagcaaggccgcccagaagaaggccgaggccactggagagaagaggccccggggccggcccaggaagtggccccagcaggtggtgcagaagaagccagcccaggtgaatgtggccctgcccgggaaggaccaccctggcaacctgatctacctgctcttcagcaagaatgccacctag

SEQ ID NO: 113025 - DNA, 357 bp, Artificial Sequence
  derived and/or modified sequence
atgagcgcccggggcgagggcgccggccagcccagcaccagcgcccagggacagcccgccgctcctgccccccaaaaaaggggcaggggaaggccgcgtaagcagcaacaggaacccactggagaaccaagcccgaagcgacctcggggacggcctaagggatccaagaacaaatccccttccaaggccgctcagaagaaagccgaagcaaccggagaaaagcggcctcgaggacgacctaggaaatggccgcagcaggtggttcagaaaaaaccggcacaggtaaacgtcgccctgcctgggaaagaccatccgggcaatctcatctatctgcttttcagcaagaacgccacctag

SEQ ID NO: 113026 - DNA, 357 bp, Artificial Sequence
  derived and/or modified sequence
atgagcgcgagaggggaaggcgctgggcagccttccacatcagctcagggacaacctgccgcacccgcacctcagaagcgcggaagaggcagacctcgcaaacaacagcaggaaccgacaggcgagccgtctccaaagcgcccaagaggacggcctaaagggagtaagaacaagtccccatctaaagctgcgcaaaagaaggcagaagctacaggagagaagcgtccacgaggtcggcctcgaaaatggccccagcaggtggtgcagaagaagccagctcaggtcaacgttgcgctacccggtaaagaccatcctggaaatctgatatatctactgttctccaagaatgcgacttag

SEQ ID NO: 113027 - DNA, 357 bp, Artificial Sequence
  derived and/or modified sequence
atgagcgccagaggcgagggcgccggccagcccagcaccagcgcccagggccagcccgccgcccccgccccccagaagagaggcagaggcagacccagaaagcagcagcaggagcccaccggcgagcccagccccaagagacccagaggcagacccaagggcagcaagaacaagagccccagcaaggccgcccagaagaaggccgaggccaccggcgagaagagacccagaggcagacccagaaagtggccccagcaggtggtgcagaagaagcccgcccaggtgaacgtggccctgcccggcaaggaccaccccggcaacctgatctacctgctgttcagcaagaacgccacctag

SEQ ID NO: 113028 - protein, 66 aa, Artificial Sequence
  derived and/or modified sequence
TRNLWVFFFFFFETESCSVAQAGVQWAQSRLTTASPGCKQFSCLSLLSSWDYRHAPPHPANYCIFV

SEQ ID NO: 113029 - protein, 103 aa, Artificial Sequence
  derived and/or modified sequence
MSARGEGAGQPSTSAQGQPAAPAPQKRGRGRPRKQQQEPTGEPSPKRPRGRPKGSKNKSPSKAAQKKAEATGEKRPRGRPRKWLRAQALDSDGLGSNSGPSLS

SEQ ID NO: 113030 - DNA, 832 bp, Artificial Sequence
  derived and/or modified sequence
gctttgtcacgctggctggagtacagtggcgcaatctcggctcactgcaatctccgcctcccaggttcaagcaattctgcctcggcttcctgagtagctgggactacaggtgcgcaccaccatgcctggctaatttttgtatttttagtagcgtcggggtttcaccatgttggccaggctggtctcgaactcctgacctcaggtgatccacccgccttggctcctaaagtgctggaattacaggtatgagccactgtgactggccgcaggtggtctgattctagtcctggctctgtcgcagactagctgcttgatctcaggaaatgtctctatttctagattgtcttcaatgttcttatcctgcttatctgtggataatattcttgatagtcatgtgaaggatctatcttgggaaagccaaggacatctgggaatgtttgacaggtgtgttccagagaacaagccttcagacatttgctatattgacgctgagctgtcaggggactcaggcttatgaggaggtattgttacacaaaacagtgtctagtgaagacgacaagaaagaggggaaaggatcggaaaaagaagctaaaatactatagaaaaccatgagatctattcgatcttttgctaatgatgatcgccatgttatggtgaaacattcaacaatctatccatctccggaggaacttgaagctgttcagaatatggtatctactgttgaatgtgctcttaaacatgtctcagattggttggatgaaacaaataaaggcacaaaaacagagggtgagacagaagtgaagaaagatgaggccggagaaaactattccaa

SEQ ID NO: 113031 - DNA, 1781 bp, Artificial Sequence
  derived and/or modified sequence
aagtttaaattccgctccctccacgaaagagttgtagtgagtgaaaataaatattaaaacacacggaaatgtattttcctggctgcagcacctgccatcttgcctcggtaggactcattttcaaaaacagcagcttcttgaagccccagaacgcattcctgtgctacggaagacggaagagtagctctcggggtcagaaggcgaaggtcagaaggccgaattggcgggagaataggtttggtggtccgagatccgaggcaacggtggctcctcgaggtccacggtcccgggagtaatgtgaggattcttgcttttctggaagctaacacatagtcagtgccaaagtagtgacagaagaaatcttgagaggaagcatttttgtcttgtacttgaaacagctgctgggcccaccatggctcctgtgaagatcagccatgtggtatcattttcttctcaggatcccaagtatcctgtagagaacttgctaaacccagatagtccaaggagaccttggctcggctgccctcaggacaagagtgggcaattgaaagtagaactacagctggagagggcagtgcccactggctacattgatgtgggtaactgtggctgtgcgttcctgcaaattgatgtgggccattcttcctggcccctggacagacctttcataaccctgctccctgcaaccacgctaatgtctctaactgattcaaagcaggggaagaaccgctccggggtccgcatgtttaaagatggtaaagagggcaaaagcagaaaagatgggggtggtctttatgagaaacagagatgcagtactaaagaggactgtgagtgctattaggtgtagactgtgggagggagcctgtgcaggggtttaattatatctgttgggggcaaagggtggttaaggaatggtgtgcttgtgtgtgagatttgtgtggtgaggatgcatgctagctggggagatggagatttatgaactatttatatttatatataacttgtggttcggtagggcccaatatatagaacacacacacttattgattaatatatttttgtggccaggcgtggtggctcatgcctgtaatcccagcactttgggagactgggacaagtggatcatctgaggtcaggagttcgagaccagcctggccagcatggtgaaatcccatctctactaaaaatacaaaaattagccgggcatggtggtgagtgcctttaatcccagctactggggaggctgaggcggcagaattgcttgaacctgggaggcagaggttacaatgagccaagattgggccattgcactccagcctgggtgacaagagtgaaactctgtctcaaataataataataataataacaataatatgtttttgtgggtataagtgtggatgtaggatagatgtttatgtaagtgatggaaggctacatagtggttatagttgtgtagcatataatgtttactgaatttatacaaatctctgttcactaggcactacagaaaaacataagatctgattcctagcctctagggatgtacagtctcataaggatttgtctgttttaagttggaagtatttgtaatgttgtaaaggaagagtgacattggaggggcatatgatttggagaaagtgaggtactgactggacagtgttaggaactaaagatgtggagggttggtgatatcggaatgtgataccgtgagcatgtagagcacgtggtggtgtgagggaggttgaggtcttatgatccaggaagggccaatatatatctca

SEQ ID NO: 113032 - DNA, 252 bp, Artificial Sequence
  derived and/or modified sequence
atgctctgttgttgtccccttgctgacgctttgctgatttttctagaaacaggaagctgctttcagcccggccagcagtctgagaccctgtcgcagaaacagaacaagaccaataataagaagtgggcaggcggcgccggatgtcggccattccgcctatggtgggtggggcgtagcaggggggcaggggtccagctttactcaactaagaaaggatggattttacggggaaaaggagggacggaagcctag

SEQ ID NO: 113033 - DNA, 201 bp, Artificial Sequence
  derived and/or modified sequence
accagaaacctgtgggtgttcttcttcttcttcttcgagaccgagagctgcagcgtggcccaggccggcgtgcagtgggcccagagcagactgaccaccgccagccccggctgcaagcagttcagctgcctgagcctgctgagcagctgggactacagacacgcccccccccaccccgccaactactgcatcttcgtgtag

SEQ ID NO: 113034 - DNA, 201 bp, Artificial Sequence
  derived and/or modified sequence
accagaaacttgtgggtgttcttcttctttttttttgaaaccgagagttgcagtgtagcccaggccggcgtgcagtgggcacaatctaggttaacaactgcttcccctggatgcaagcaattctcatgtctcagtttactctcttcgtgggactaccggcacgctcctccccacccggctaattattgcatcttcgtgtag

SEQ ID NO: 113035 - DNA, 201 bp, Artificial Sequence
  derived and/or modified sequence
accaggaacctgtgggtgttcttcttcttcttctttgaaacagagagctgcagcgtggcccaggccggcgtgcagtgggcccagagccggctgaccacagccagccctggctgcaagcagttcagctgcctgagcctgctgagctcctgggactacagacatgccccaccccacccagccaactactgcatctttgtgtag

SEQ ID NO: 113036 - DNA, 201 bp, Artificial Sequence
  derived and/or modified sequence
acccggaacctgtgggtgttcttcttcttcttcttcgagaccgagagctgctcggtggcccaggccggcgtccaatgggcacagtcgcgactgacaaccgccagtcctggatgcaaacagttcagctgtttgagcctccttagcagttgggactacaggcacgcccctcctcacccggcaaattattgcattttcgtgtag

SEQ ID NO: 113037 - DNA, 201 bp, Artificial Sequence
  derived and/or modified sequence
acaaggaacttatgggttttcttcttttttttcttcgagacggaatcttgcagtgtcgcacaggctggagtacaatgggctcagtcacgtcttaccacggccagtcccggatgcaaacagtttagctgtctttcactgctgtcttcttgggattatcgccatgcacctccccaccctgcaaattattgtattttcgtgtag

SEQ ID NO: 113038 - DNA, 243 bp, Artificial Sequence
  derived and/or modified sequence
gctcaccacctgcgatctggcgctggagaccagcccggtcagcatggtgaaacgccaagtttgttgaagattgagaaattagccgaacatggtggttcatgcttctcctttcaggtactgggccgtttacgccaggagaactgcttaaacccaggcggagggggatgcagtgagccaaggttatgtcattgcacccccgcatgggcaacagagcaaggaagcgtgtctcgtaagaaagagtag

SEQ ID NO: 113039 - DNA, 1678 bp, Artificial Sequence
  derived and/or modified sequence
cagcaaggaggcgaggagcggcggcggcgctgagccgggcccgggtgtgggggcgcctatatccccagcccaagctgcaggaagccgcgccgcttcctcggaggggctgggacggcggcggccacgtggggggcgggggcgacgctcggggcccgcggctggagggggagtcgctgcctcacccgcgcctggcgcccgcggctccctccgcctcgccggcgttggcccaccctctcgtagctcaccccgcgaggctggacagctcccggaaccccggaaccgggatctatttcgggggctcggctgcgtggcgcccaggactctccagggtctcccaggatcgctccccgaattcgagtcgccccctctctctttcgggaataccagctgatgtcagtccgccagccaaaaccagggaggagaagcgggagccagccctctggagtcgggagaaggaagaaggtgccacagctcttcaggaccacggttgggagaaagaatggaggggttttagaaccttcagtgtgcgacttcatgtgccagtcttcatctcaggatctcaagctcttggatcatgggcacggataacctgttgtcctcctctatggtcaagaggctgcttttgcaaagaatccagtgggagagagtcaatggcctgcttgacgtgaactccaaagtcctcctgatcagaataccaatttcttactgggtctggaaaggaggagagaaggatagagagtttcttctaggaccaaattgattcctccacaaataggaagatccccagactgtgtgcacacaccctcctcctccttccttctccaaccctggctggaccatgacatcacatggtggaggctgttttttaaaaagaactcaggccagatttacaagaatgatgctcaggcagcgtgactgtcaaggaccgtggccaagtgacccatagcacacacccagcagtgctgagaacatagctagtcccttagcacctggggctgactcatggttgctgtaggacccaatgccagatgccaggattgctttctccctccattcattaggactgtcccatgaaaccctccccaggaacccttctaccccatcccggcatgccaggagcctggatactgcataacacagggtactcatatttgtttaccaagccttgaagatgacaggcaatatgctgatatgctcaatgcatcatacaaattgttttatttaaaactgaactattaaattaagtatcatagcaactcactttacagacaaggaaactgaagctcaaaggttaagtaagggccaggcatggtggctcactcctgtaatcccagcagtttgggaggctgaggtgggaggaggattgcttaagcccgcgagttagagaccagcctggccaacatggtgaaacccgcctctactgaaaatacaaaaattagcagggcattgtggcacatgccaaggtgggcagatcacctgaggtcaggagttcgagaccagcctggccaacatggtgaaaccccatctctactaaaaatacaaaaattagctgggcgtggtggtgggcgcctgtagtcccagctactcaggaggctgaggcaggagaatcgcttgaacctgggaggtggaggttgcagtaagccaagatagtgccactgcactccagcctgggcgacag

SEQ ID NO: 113040 - DNA, 312 bp, Artificial Sequence
  derived and/or modified sequence
acatgtatttctttctttctctttttgaaaaagagtcttgctttgttgcccaggctggagtacagtggcaccatcttggctcactgcaacctctgccttctgggttcaagtaattctcatgcctcagcctcccaagtagctgggattacgggcatgtgccaccatgtctggctaatttttgtatttttagtagagacagggtttcaccatgttgcccaagctggacttgaactcctagtgtcaagcagttctcctgccttggcctcccaaagcactgagattacaggcatgagccaatgtgcctggccatta

SEQ ID NO: 113041 - DNA, 198 bp, Artificial Sequence
  derived and/or modified sequence
actaggaacctctgggtttttttcttttttttttttgagacagagtcttgctctgtcgcccaggctggagtgcagtgggcacagtctcggctcactacagcgtctcccgggtgcaagcaattctcctgcctcagcctcctgagtagctgggattacaggcatgcaccaccacacccggctaattattgtatttttgta

SEQ ID NO: 113042 - DNA, 249 bp, Artificial Sequence
  derived and/or modified sequence
atctcggctcactgcaacctctgcctcccaggttcaagcgattcttctgcctcagcttcccgaatagctgggattacaggtgcccaccaccacacccggctaatttttgtatttttagtagagacggagtttcaccatgttggccaggctggtctcaaatggcctcaggtgatccacccgccttggcctcccaaatgctgggattataggcgtgagccaccacgcccggccctgtttttcaatttttta

SEQ ID NO: 113043 - DNA, 318 bp, Artificial Sequence
  derived and/or modified sequence
ttgttgcccaggctggattgcagtggcacgatctcggctcactgcaacctccccaggttcaagagattctcttgcctcaggctcccgactgggattacaggggcgtaccaccacacctggataatttttgcatttttagtagagacagggtttcaccatgttggccaggctggtctcaaactcctgacctcagaacaactaggaaatacgaagtctcgctctcgtcccccaggttggagtgcaatggcgccatcttggctcactgcaagctccgcctcccgggttcacgtcattctcctgcctcagcctcccgagtag

SEQ ID NO: 113044 - DNA, 279 bp, Artificial Sequence
  derived and/or modified sequence
ttttttttttttttttttgagacagattgtcgctctgtcaccaggctggagtgcagtggcataatctctgctcactgcaaactctgcctcccaggttcaagcgattctcctgcctcagcctcccaagcagctaggactataggtacatgccaccacacccagctaatttttgtattttttgtagagacagggtttcaccatgttggccaggatggtctcaatctctcactggtgatccacccacctcggcctcccaaagtgctgggattacaggtgtga

SEQ ID NO: 113045 - DNA, 333 bp, Artificial Sequence
  derived and/or modified sequence
ttctttttttttttttttttaagacatactcttgctctgttgcccaggctggagtgcagtggtgcaatcttggctcactgcaacatccccctctcaagttcaagcaattctcctgcctcagcctcccaagtagctgggattacaggcgtgtgccaccacgcccagctaatttttgtattttttatagagacggagtttcaccatgttggccaggctggtcctgaactcctgacctcaggtgatccttctgcctcggcctcccaaagtgctgggattacaggtgcgagccaccgtgcccagcccctgtccatacttttttttttttttgaggca

SEQ ID NO: 113046 - DNA, 276 bp, Artificial Sequence
  derived and/or modified sequence
actttttttttttttttttttgagacagattgtcgctctgtcaccaggctggagtgcagtggcataatctctgctcactgcaaactctgcctcccaggttcaagcgattctcctgcctcagcctcccaagcagctaggactataggtgcatgccaccacgcccagctaatttttgtattttttgagacagggtttcaccatgttggccaggatggtctccttgacctcgtgatccacccacctcggcctcccaaagtgctgggattacaggtgtga

SEQ ID NO: 113047 - DNA, 442 bp, Artificial Sequence
  derived and/or modified sequence
acaggatctcactctgtcatccaggctggaatgcagtggcatgattataactcactgcatcctcaacctcctgggctcaagcagtcctcccacctcagcctcctgagtagctaggactacaggcatgtaccaccacacctggttaacttttgtattttttgcagagatagagtttcaccatgttgtccagggtggtctcaaaactcctgagctcaagcgatctgcctgcctctgcttcccaaagtgctgagattacagagtgaagacatttccacctggacacctgaccatgtgcctgccctgagcagcgaggcccaccaggcatctctgttgtgggcagcagggccaggtcctggtctgtggaccctcggcagttggcaggctccctctgcagtggggtctgggcctcggccccaccatgtcgagcctcggcggtggctcc

SEQ ID NO: 113048 - protein, 113 aa, Artificial Sequence
  derived and/or modified sequence
MAETVADTRRLITKPQNLNDAYGPPSNFLEIDVSNPQTVGVGRGRFTTYEIRVKTNLPIFKLKESTVRRRYSDFEWLRSELERESKPCLRMTSEARSHGRTWCAQNDEKLFCD

SEQ ID NO: 113049 - DNA, 342 bp, Artificial Sequence
  derived and/or modified sequence
atggccgagaccgtggccgacaccagaagactgatcaccaagccccagaacctgaacgacgcctacggcccccccagcaacttcctggagatcgacgtgagcaacccccagaccgtgggcgtgggcagaggcagattcaccacctacgagatcagagtgaagaccaacctgcccatcttcaagctgaaggagagcaccgtgagaagaagatacagcgacttcgagtggctgagaagcgagctggagagagagagcaagccctgcctgagaatgaccagcgaggccagaagccacggcagaacctggtgcgcccagaacgacgagaagctgttctgcgactag

SEQ ID NO: 113050 - DNA, 342 bp, Artificial Sequence
  derived and/or modified sequence
atggctgaaaccgtggccgacacccggaggctaattactaagccacagaacctcaacgacgcatatgggccgccaagtaattttcttgagatcgacgtgtctaatcctcaaacagtgggggttgggagagggcggtttacgacctacgagatccgggtgaagacaaatctgccgatctttaaactcaaggaatcaaccgtccggcgtcggtactctgactttgagtggctgcgatccgaattggaacgggaatccaaaccctgccttcggatgacttctgaggcacgaagccatggcaggacctggtgcgcccagaatgacgagaagcttttttgtgattag

SEQ ID NO: 113051 - DNA, 342 bp, Artificial Sequence
  derived and/or modified sequence
atggccgagaccgtggccgacaccaggaggctcatcaccaagccccagaacctgaatgatgcctacggcccccccagcaacttcctggagattgatgtgagcaacccccagacagtgggcgtgggccggggccgcttcaccacctatgagatccgggtgaagaccaacctgcccatcttcaagctgaaggagagcacagtgagaagacgctacagcgactttgagtggctgcggtctgagctggagcgggagagcaagccctgcctgaggatgaccagcgaggcccggagccacggccgcacctggtgtgcccagaatgatgagaagctgttctgtgactag

SEQ ID NO: 113052 - DNA, 342 bp, Artificial Sequence
  derived and/or modified sequence
atggccgagaccgtggccgacacccggcggctgatcaccaagccccaaaatcttaatgacgcctatggacccccctcgaatttcctcgagatagatgtctccaatcctcagacagtcggggtcgggcgcggcagatttacgacttatgagattagagtcaagacaaacttgcctatttttaagctgaaagaatccacagtcagacggcggtacagtgatttcgaatggttgaggtctgaactggagcgggaaagcaagccatgcctccggatgacctctgaggcacggtctcacggcaggacttggtgcgcgcagaacgacgaaaaattgttttgcgattag

SEQ ID NO: 113053 - DNA, 342 bp, Artificial Sequence
  derived and/or modified sequence
atggctgaaacggtcgctgacactcggaggttaataactaaaccgcagaatctgaacgacgcatacggcccaccgtcaaatttcctagaaatagatgtgagcaatccccaaaccgtcggtgttgggaggggacgatttaccacctacgagattagggtgaaaacaaaccttccgatattcaaactaaaagaatccactgtaagacggagatattcagactttgaatggttgcggagtgagcttgagcgtgagtctaaaccctgtctgcgcatgacctcagaagcaagatcacacgggagaacatggtgtgctcagaatgatgaaaagctgttctgcgattag

SEQ ID NO: 113054 - DNA, 681 bp, Artificial Sequence
  derived and/or modified sequence
agtccggccggaacctgtttgcgaccccgagtcccatgacaccgcttctcctcacaccccagtccgcagtgcccctccccagcctcggccgggcctcccgggagccgggcgtggcgttccagctagtgagccgtttctcccctgggctcggaggcggaagcttgaggggcgcggggaggagcttcgcgtgcggggtgaacgcccgctctacgtgctcgttctcttcgcgaccgctgcgcgcgagccccgtgtccccacggcgggcagcagcggcggcggcggcggctgaacgcggagggggcggagggagcccgcggcggcggcagcagctacagcgaaatggcggagaccgtggctgacacccggcggctgatcaccaagccgcagaacctgaatgacgcctacggaccccccagcaacttcctcgagatcgatgtgagcaacccgcaaacggtgggggtcggccggggccgcttcaccacttacgaaatcagggtcaagacaaatcttcctattttcaagctgaaagaatctactgttagaagaagatacagtgactttgaatggctgcgaagtgaattagaaagagagagcaagccctgcctcagaatgacatcagaggcaaggagtcatggaaggacgtggtgtgctcagaatgatgaaaagttattttgtgactag

SEQ ID NO: 113055 - protein, 140 aa, Artificial Sequence
  derived and/or modified sequence
MAETVADTRRLITKPQNLNDAYGPPSNFLEIDTNLPIFKLKESTVRRRYSDFEWLRSELERESKVVVPPLPGKAFLRQLPFRGDDGIFDDNFIEERKQGLEQFINKVAGHPLAQNERCLHMFLQDEIIDKSYTPSKIRHA

SEQ ID NO: 113056 - DNA, 423 bp, Artificial Sequence
  derived and/or modified sequence
atggccgagaccgtggccgacaccagaagactgatcaccaagccccagaacctgaacgacgcctacggcccccccagcaacttcctggagatcgacaccaacctgcccatcttcaagctgaaggagagcaccgtgagaagaagatacagcgacttcgagtggctgagaagcgagctggagagagagagcaaggtggtggtgccccccctgcccggcaaggccttcctgagacagctgcccttcagaggcgacgacggcatcttcgacgacaacttcatcgaggagagaaagcagggcctggagcagttcatcaacaaggtggccggccaccccctggcccagaacgagagatgcctgcacatgttcctgcaggacgagatcatcgacaagagctacacccccagcaagatcagacacgcctag

SEQ ID NO: 113057 - DNA, 423 bp, Artificial Sequence
  derived and/or modified sequence
atggccgaaacagtggccgacacccgaagactgatcaccaaaccacagaacctgaacgacgcttacggaccacccagtaacttcctcgagatcgacacaaacttaccaatatttaaactgaaagagagcacagtgcgcaggaggtactccgactttgagtggcttcggagtgagttggaaagagagtctaaggtggtagtaccaccactgcctgggaaggcatttctgcggcagttaccgttccggggagacgacgggatcttcgatgacaatttcatcgaggaaaggaagcaaggactagagcagtttatcaataaagtcgctgggcaccccctggctcaaaacgagaggtgcctccatatgtttttacaggatgagattattgataaaagctacactcctagtaagatcagacacgcgtag

SEQ ID NO: 113058 - DNA, 423 bp, Artificial Sequence
  derived and/or modified sequence
atggccgagaccgtggccgacaccaggaggctcatcaccaagccccagaacctgaatgatgcctacggcccccccagcaacttcctggagattgacaccaacctgcccatcttcaagctgaaggagagcacagtgagaagacgctacagcgactttgagtggctgcggtctgagctggagcgggagagcaaggtggtggtgccccccctgcccgggaaggccttcctgcggcagctgcccttcagaggagatgatggcatctttgatgacaacttcatcgaggagaggaagcagggcctggagcagttcatcaacaaggtggccggccaccccctggcccagaatgaacgctgcctgcacatgttcctgcaggatgagatcatcgacaagagctacacccccagcaagatcagacatgcctag

SEQ ID NO: 113059 - DNA, 423 bp, Artificial Sequence
  derived and/or modified sequence
atggccgagaccgtggccgacacccggcggctgatcaccaagccccagaacctaaacgatgcctacgggcctcctagtaacttcctcgaaatagataccaatctacctattttcaaactgaaggaatcgaccgtgaggagacggtactcagactttgaatggctgagaagcgagctcgaaagggagagtaaagttgtggtacctcctctcccgggaaaggctttcctcagacagctgcccttccggggggacgatggaatcttcgatgataatttcattgaggaacgaaagcagggattggagcagtttattaataaagtggcgggccaccccttggctcagaacgagcgatgcctgcatatgtttctgcaagatgagatcattgataagtcatatacccctagcaagatcaggcatgcctag

SEQ ID NO: 113060 - DNA, 423 bp, Artificial Sequence
  derived and/or modified sequence
atggccgagactgtggccgacacccggagactgattaccaagccacagaatctgaacgacgcctacggccctccaagtaattttttggaaatagacactaatctaccaatttttaagctcaaagaaagcactgtgcgcagaagatactcagactttgagtggctgcgttccgaactagagagggagtctaaggttgtcgtgcctcctctgcccggtaaggcgttcttgagacagctcccttttcgcggagatgacggtatctttgatgacaactttatcgaggagcgcaagcagggtctcgagcagtttattaataaggtcgccggacatcctctggcccagaacgaacgatgtctccatatgtttctgcaagacgagatcatagataaatcttataccccgagcaaaattaggcatgcttag

SEQ ID NO: 113061 - DNA, 890 bp, Artificial Sequence
  derived and/or modified sequence
gtttgcgaccccgagtcccatgacaccgcttctcctcacaccccagtccgcagtgcccctccccagcctcggccgggcctcccgggagccgggcgtggcgttccagctagtgagccgtttctcccctgggctcggaggcggaagcttgaggggcgcggggaggagcttcgcgtgcggggtgaacgcccgctctacgtgctcgttctcttcgcgaccgctgcgcgcgagccccgtgtccccacggcgggcagcagcggcggcggcggcggctgaacgcggagggggcggagggagcccgcggcggcggcagcagctacagcgaaatggcggagaccgtggctgacacccggcggctgatcaccaagccgcagaacctgaatgacgcctacggaccccccagcaacttcctcgagatcgatacaaatcttcctattttcaagctgaaagaatctactgttagaagaagatacagtgactttgaatggctgcgaagtgaattagaaagagagagcaaggtcgtagttcccccgctccctgggaaagcgtttttgcgtcagcttccttttagaggagatgatggaatatttgatgacaattttattgaggaaagaaaacaagggctggagcagtttataaacaaggtcgctggtcatcctctggcacagaacgaacgttgtcttcacatgtttttacaagatgaaataatagataaaagctatactccatctaaaataagacatgcctgaaatttggcaagaaggggcaaaaacgtgactattaatgattgataagcaccagtgaagaagttctaacttttagcatgctgcacagaaactggtataacatgccttcagtatactaacactcatatgctcagttttgttttgttt

SEQ ID NO: 113062 - protein, 28 aa, Artificial Sequence
  derived and/or modified sequence
DAVILFSVWRLKKKSRVLFFIYIIAISV

SEQ ID NO: 113063 - protein, 305 aa, Artificial Sequence
  derived and/or modified sequence
MPANFTEGSFDSSGTGQTLDSSPVACTETVTFTEVVEGKEWGSFYYSFKTEQLITLWVLFVFTIVGNSVVLFSTWRRKKKSRMTFFVTQLAITEKQARVLIVIAWSLSFLFSIPTLIIFGKRTLSNGEVQCWALWPDDSYWTPYMTIVAFLVYFIPLTIISIMYGIVIRTIWIKSKTYETVISNCSDGKLCSSYNRGLISKAKIKAIKYSIIIILAFICCWSPYFLFDILDNFNLLPDTQERFYASVIIQNLPALNSAINPLIYCVFSSSISFPCREQRSQDSRMTFRERTERHEMQILSKPEFI

SEQ ID NO: 113064 - DNA, 525 bp, Artificial Sequence
  derived and/or modified sequence
gtggtgttgctgtacgcctccacctacgtgctggtctcccttagtatagacaggtaccacgccattgtatatcccatgaaggtgttgatcgtcatcgcttggtctttgtcctttctatttagtattcccaccctgataatttttggaaaacgaactttatctaacggcgaggtccaatgttgggcactgtggccagacgattcttactggaccccatatatgaccatcgtcgctttcctaggatccctcattacatttatttgctgctggtctccatatttcctgtttgatattttagacaattttaacctgctccccgacacacaagagagattttacgcttccgtcattattcaaaacctgccagcactcaacagcgccatcaaccctcttatttactgcgtgttttcgtcatcaatctcattcccttgcagagaacagcgatcacaggatagccggatgaccttcagggagcggactgagcgccacgaaatgcaaattctctctaagccggagtttatttag

SEQ ID NO: 113065 - DNA, 918 bp, Artificial Sequence
  derived and/or modified sequence
atgccagcaaactttaccgaagggagtttcgatagtagtgggaccgggcagaccctggattcgagccccgttgcctgcactgaaaccgtgactttcaccgaagtagtggaaggcaaggaatgggggtcattttattactccttcaagacggagcagctgatcaccctgtgggtgctgtttgtgttcacaatcgttggtaattccgtggtactcttctcaacttggagaagaaagaaaaagtccagaatgaccttcttcgtgacccagcttgctattaccgagaaacaggcacgtgtcttaatcgttattgcttggagcctctcattcctgttctccatccccactctgatcatcttcggcaagcgtactctatcaaatggggaagttcagtgctgggccttgtggccagatgacagctactggactccatacatgaccatcgtggctttcctggtctacttcattcccttaactatcatttcaatcatgtatggtatcgtgattagaactatctggatcaaaagcaagacttacgagactgtaattagtaattgcagtgacggtaagctatgctcttcttataataggggcctgatctctaaggcaaagatcaaagccatcaaatattcgattatcattatcctggcttttatctgctgttggtcaccctattttcttttcgacattctcgacaactttaatctattgcctgatacccaggaaaggttttacgcttccgttataattcagaacctgcctgcacttaattcagctataaatccattgatctactgtgtgttctcaagttcaatcagcttcccttgcagagagcaaaggtctcaggacagcagaatgaccttccgcgagcgaacagagcgtcacgaaatgcagatactgagcaaaccggaatttatctag

SEQ ID NO: 113066 - DNA, 285 bp, Artificial Sequence
  derived and/or modified sequence
atgcccgccaacttcactgagggcagcttcgattctagtggaacaggccagaccctcgattcgtctcctgtagcatgtacggagaccgttacattcacagaagtcgttgaaggtaaagagtggggaagcttctactattccttcaaaacagagcagttaattacgctgtgggtcctcttcgtgttcacaattgttggcaatagcgtagtgttattttccacgtggagacgcaaaaagaagtccagaatgactttcttcgtaacccagctggcgataaccgtctag

SEQ ID NO: 113067 - DNA, 525 bp, Artificial Sequence
  derived and/or modified sequence
gtggtgctgctgtatgccagcacctacgtgctggtgtccctgagcattgaccgctaccacgccatcgtgtaccccatgaaggtgctgattgtcatcgcctggagcctgtccttcctgttcagcatccccaccctcatcatctttgggaagaggaccctgagcaatggagaggtgcagtgctgggccctgtggccagatgacagctactggaccccctacatgaccatcgtggccttcctgggcagcctcatcaccttcatctgctgctggagcccctacttcctgtttgacatcctggacaacttcaacctgctgcctgacacccaggagcgcttctacgccagcgtcatcatccagaacctgcctgccctgaacagcgccatcaaccccctcatctactgtgtgttcagcagcagcatctccttcccctgccgggagcagaggagccaggacagcaggatgaccttccgggagaggacagaaagacatgagatgcagatcctgagcaagccagagttcatctag

SEQ ID NO: 113068 - DNA, 918 bp, Artificial Sequence
  derived and/or modified sequence
atgcctgccaacttcacagagggcagctttgacagcagcggcaccggccagaccctggacagcagccctgtggcctgcacagaaacagtgaccttcacagaggtggtggagggcaaggagtggggcagcttctactacagcttcaagacagagcagctgatcaccctgtgggtgctgtttgtgttcaccatcgtgggcaacagcgtggtgctcttcagcacctggaggaggaagaagaagagcaggatgaccttctttgtgacccagctggccatcacagagaagcaggcccgggtgctgattgtgattgcctggagcctgtccttcctgttcagcatccccaccctcatcatctttgggaagaggaccctgagcaatggagaggtgcagtgctgggccctgtggccagatgacagctactggaccccctacatgaccatcgtggccttcctggtgtacttcatccccctgaccatcatcagcatcatgtatggcatcgtcatccgcaccatctggatcaagagcaagacctatgagaccgtcatcagcaactgcagtgatggcaagctgtgcagcagctacaacagaggcctcatcagcaaggccaagatcaaggccatcaagtacagcatcatcatcatcctggccttcatctgctgctggagcccctacttcctgtttgacatcctggacaacttcaacctgctgcctgacacccaggagcgcttctacgccagcgtcatcatccagaacctgcctgccctgaacagcgccatcaaccccctcatctactgtgtgttcagcagcagcatctccttcccctgccgggagcagaggagccaggacagcaggatgaccttccgggagaggacagaaagacatgagatgcagatcctgagcaagccagagttcatctag

SEQ ID NO: 113069 - DNA, 285 bp, Artificial Sequence
  derived and/or modified sequence
atgcctgccaacttcacagagggcagctttgacagcagcggcaccggccagaccctggacagcagccctgtggcctgcacagaaacagtgaccttcacagaggtggtggagggcaaggagtggggcagcttctactacagcttcaagacagagcagctgatcaccctgtgggtgctgtttgtgttcaccatcgtgggcaacagcgtggtgctcttcagcacctggaggaggaagaagaagagcaggatgaccttctttgtgacccagctggccatcaccgtgtag

SEQ ID NO: 113070 - DNA, 525 bp, Artificial Sequence
  derived and/or modified sequence
gtggtgctgctgtacgccagcacctacgtgctggtgagcctgagcatagataggtatcacgctatcgtatacccaatgaaagtcttgatagtgattgcctggagccttagtttcctattttccatccccacgctaatcattttcggcaagcgtacactgtctaatggggaagtgcaatgctgggccttatggcccgacgattcctactggaccccttacatgacgattgtggcattcttgggcagcttgattacttttatctgctgttggagcccttatttcttgttcgacatactggataactttaatctgctgcccgacacacaggagagattctatgcttccgtaataatccagaaccttccagcattgaattctgccattaatccactcatctattgcgtcttctcctcttccatatcttttccttgccgcgaacagagaagccaagactcacggatgaccttccgggaaagaactgagaggcacgaaatgcaaatattgtctaagcccgagttcatctag

SEQ ID NO: 113071 - DNA, 918 bp, Artificial Sequence
  derived and/or modified sequence
atgcccgccaacttcaccgagggcagcttcgacagcagcggcaccgggcagacgttggatagctctccagtggcgtgcaccgagaccgtgacattcaccgaggtggtagagggaaaggaatggggaagtttctactatagtttcaaaaccgagcaactgattacgttgtgggtcctctttgtcttcactatagtgggaaattctgtggtgctgttttcaacgtggcgtaggaaaaagaagtccaggatgacattttttgttacccaactggcgatcacagaaaaacaagccagggtcttgattgtaatcgcgtggtccttatcgttcctgttttcgattccaactttgatcattttcggaaagcggacgctgagtaacggagaggtgcagtgctgggctctgtggccagatgacagctactggacaccctatatgactatcgtggcgttcctggtgtactttatacccctgacgatcatttcgatcatgtacgggattgtcatccgcacaatttggattaaatccaaaacttacgagacagttattagcaactgtagcgacggaaagctatgtagctcctacaacagaggtctgatttctaaggccaagattaaggctatcaagtatagtattataattatccttgcctttatttgctgctggtcaccatacttcctcttcgatattctggataactttaatctgctccccgatacgcaagagaggttttatgctagcgtcatcatccagaatctgcccgcactgaattcagccataaaccccctgatctactgtgttttctcttcctcaatttcttttccatgtcgggaacagaggtcacaggattcccgcatgaccttcagagaaagaaccgagagacatgaaatgcagatccttagtaagcccgagttcatctag

SEQ ID NO: 113072 - DNA, 285 bp, Artificial Sequence
  derived and/or modified sequence
atgcccgccaacttcaccgagggcagcttcgacagcagcggcaccggtcagaccttggacagttccccagtggcctgtaccgaaacagtgacctttacagaggtcgtcgagggaaaagaatggggctccttttactattcgtttaaaactgagcagctgataaccctctgggttttattcgttttcaccatcgtgggaaatagtgtcgtgcttttttcaacgtggcgtaggaaaaagaagagcaggatgacatttttcgtaacccagttggctatcacagtatag

SEQ ID NO: 113073 - DNA, 848 bp, Artificial Sequence
  derived and/or modified sequence
gttgtgctgctctacgcctctacctacgtcctggtgtccctcagcatagacagataccatgccatcgtctaccccatgaaggtcctcattgtgatcgcctggagcctgtcttttctgttctccattcccaccctgatcatatttgggaagaggacactgtccaacggtgaagtgcagtgctgggccctgtggcctgacgactcctactggaccccatacatgaccatcgtggccttcctgggctccttgataaccttcatctgctgttggagtccatacttcctgtttgacattttggacaatttcaacctccttccagacacccaggagcgtttctatgcctctgtgatcattcagaacctgccagcattgaatagtgccatcaaccccctcatctactgtgtcttcagcagctccatctctttcccctgcagggagcaaagatcacaggattccagaatgacgttccgggagagaactgagaggcatgagatgcagattctgtccaagccagaattcatctagaccctagggcagtgccagtgctaggctgagcaccatcagctctcccaggtccttgtcacctgcttgggcacgtgcatggaacccgagccaacttcaccccaccctcgtcattacctgggagatgcacaagacaaatgttctaatgactgcatgcactgcttaagtattggccaacacgaactccccagttattcatgccagccaggaaggaaacgccttccttccccaccattcccagccctccttcccactggccagcacctgaacccagtgaacacaggcattagtggtccagggtcctggcttggagccagtgagtagac

SEQ ID NO: 113074 - DNA, 1369 bp, Artificial Sequence
  derived and/or modified sequence
gggctcagggagggctctgtgcctccgttcagcagagctgcagctgctgcccagctctcaggaggcaagctggactccctcactcagctgcaggagcaaggacagtgaggctcaaccccgcctgagccatgccagccaacttcacagagggcagcttcgattccagtgggaccgggcagacgctggattcttccccagtggcttgcactgaaacagtgacttttactgaagtggtggaaggaaaggaatggggttccttctactactcctttaagactgagcaattgataactctgtgggtcctctttgtttttaccattgttggaaactccgttgtgcttttttccacatggaggagaaagaagaagtcaagaatgaccttctttgtgactcagctggccatcacagaaaagcaagccagggtcctcattgtgatcgcctggagcctgtcttttctgttctccattcccaccctgatcatatttgggaagaggacactgtccaacggtgaagtgcagtgctgggccctgtggcctgacgactcctactggaccccatacatgaccatcgtggccttcctggtgtacttcatccctctgacaatcatcagcatcatgtatggcattgtgatccgaactatttggattaaaagcaaaacctacgaaacagtgatttccaactgctcagatgggaaactgtgcagcagctataaccgaggactcatctcaaaggcaaaaatcaaggctatcaagtatagcatcatcatcattcttgccttcatctgctgttggagtccatacttcctgtttgacattttggacaatttcaacctccttccagacacccaggagcgtttctatgcctctgtgatcattcagaacctgccagcattgaatagtgccatcaaccccctcatctactgtgtcttcagcagctccatctctttcccctgcagggagcaaagatcacaggattccagaatgacgttccgggagagaactgagaggcatgagatgcagattctgtccaagccagaattcatctagaccctagggcagtgccagtgctaggctgagcaccatcagctctcccaggtccttgtcacctgcttgggcacgtgcatggaacccgagccaacttcaccccaccctcgtcattacctgggagatgcacaagacaaatgttctaatgactgcatgcactgcttaagtattggccaacacgaactccccagttattcatgccagccaggaaggaaacgccttccttccccaccattcccagccctccttcccactggccagcacctgaacccagtgaacacaggcattagtggtccagggtcctggcttggagccagtgagtagac

SEQ ID NO: 113075 - DNA, 814 bp, Artificial Sequence
  derived and/or modified sequence
gggctcagggagggctctgtgcctccgttcagcagagctgcagctgctgcccagctctcaggaggcaagctggactccctcactcagctgcaggagcaaggacagtgaggctcaaccccgcctgagccatgccagccaacttcacagagggcagcttcgattccagtgggaccgggcagacgctggattcttccccagtggcttgcactgaaacagtgacttttactgaagtggtggaaggaaaggaatggggttccttctactactcctttaagactgagcaattgataactctgtgggtcctctttgtttttaccattgttggaaactccgttgtgcttttttccacatggaggagaaagaagaagtcaagaatgaccttctttgtgactcagctggccatcacagtataacaagcccacctgcttgagctgggctgcagtggccagggtaaacatccaaggcaccagtgaaaaatacagagaaggtaaaaggagcaagagttctgaagatggaacctgggatgggggaaagtttcttcaatctttcctaccaacaagaactccaatttttcactcctataaccgtagaagtagaggtaattaggatcatccagcaaatgcttagaggcaaatatccctggatgaggatgccacagcttattttcattatatttcttcgattacagtgtggtaatgcatgttgtatggaactacatattctttcagaatgaaaggatttagaggtggcaagaatatcagcttgaaatttaaagttttttcataaacaataaacaaatgataattgaaaattc

SEQ ID NO: 113076 - DNA, 525 bp, Artificial Sequence
  derived and/or modified sequence
gtggtcctcctctacgctagcacttatgtgctggtgtcactgtccattgatagataccacgccattgtctatcctatgaaagttctcattgtgatcgcatggtcgcttagttttcttttttctatacccactcttattatctttgggaagcggacattgtctaacggtgaggtgcagtgttgggccctctggcctgacgactcttactggacaccttatatgactattgtggcgttcctcggatctctaatcacttttatctgctgctggtccccatatttcctgttcgacatcctggataattttaaccttctccctgacacacaggagcgcttctacgctagcgtgattatccagaacctgcccgcattgaactcagcgattaatccactgatctactgcgtcttctcaagttcaatcagttttccatgtagagagcaaaggagtcaggactctcggatgacctttagagaacgaactgaacggcatgaaatgcagatcctaagtaagccagagttcatctag

SEQ ID NO: 113077 - DNA, 918 bp, Artificial Sequence
  derived and/or modified sequence
atgcctgctaattttacagaaggctcttttgattccagtggaacggggcagactcttgacagcagtccagttgcttgtactgaaacggtgacttttaccgaggttgtggagggaaaagagtggggatccttctattactcttttaagactgaacagctgattacactctgggtacttttcgtatttacaatcgtgggtaacagtgtggttctgttctccacctggagacggaagaagaagtctcgcatgacgttttttgtgacacaactggctatcaccgagaaacaggctagggtcttaattgtgatcgcctggtctctctcttttctgttttcaattcccacgttaattatatttggcaagagaacactttctaacggcgaggtgcagtgttgggccctctggcccgacgacagctattggacaccctacatgacgattgtcgcttttctcgtctatttcatccctctcacaattattagcatcatgtacggaattgtaattcgaactatttggatcaagtctaaaacatacgaaactgtgattagtaattgcagcgacggaaaactttgctccagctataataggggattaatctctaaggctaaaattaaggctatcaagtactctatcatcatcatcctggcatttatctgctgttggagcccatacttcttgttcgatatcttggataatttcaacctcttgccagacacacaggaacgattttatgctagtgtcattattcaaaatctacccgcactgaactctgccatcaaccctctgatttattgcgttttcagtagcagtatcagctttccctgccgggagcagagaagtcaggactcgcggatgacattcagggagaggacggagagacatgaaatgcagatcctctcaaagcctgagttcatctag

SEQ ID NO: 113078 - DNA, 285 bp, Artificial Sequence
  derived and/or modified sequence
atgcctgcaaactttacagaaggctcatttgacagttcaggaactggccagacattagattcatcccccgtggcatgtacagagacagtcacatttacagaagtagtcgaagggaaggaatggggctccttttactattcattcaagaccgaacaattgatcaccctttgggtcttgtttgtttttactatagtgggaaactctgtcgtgctgttcagtacttggcgaaggaagaagaagtccagaatgaccttctttgtgacccaactcgccatcacagtctag

SEQ ID NO: 113079 - DNA, 525 bp, Artificial Sequence
  derived and/or modified sequence
gtggtgctgctgtacgccagcacctacgtgctggtgagcctgagcatcgacagataccacgccatcgtgtaccccatgaaggtgctgatcgtgatcgcctggagcctgagcttcctgttcagcatccccaccctgatcatcttcggcaagagaaccctgagcaacggcgaggtgcagtgctgggccctgtggcccgacgacagctactggaccccctacatgaccatcgtggccttcctgggcagcctgatcaccttcatctgctgctggagcccctacttcctgttcgacatcctggacaacttcaacctgctgcccgacacccaggagagattctacgccagcgtgatcatccagaacctgcccgccctgaacagcgccatcaaccccctgatctactgcgtgttcagcagcagcatcagcttcccctgcagagagcagagaagccaggacagcagaatgaccttcagagagagaaccgagagacacgagatgcagatcctgagcaagcccgagttcatctag

SEQ ID NO: 113080 - DNA, 918 bp, Artificial Sequence
  derived and/or modified sequence
atgcccgccaacttcaccgagggcagcttcgacagcagcggcaccggccagaccctggacagcagccccgtggcctgcaccgagaccgtgaccttcaccgaggtggtggagggcaaggagtggggcagcttctactacagcttcaagaccgagcagctgatcaccctgtgggtgctgttcgtgttcaccatcgtgggcaacagcgtggtgctgttcagcacctggagaagaaagaagaagagcagaatgaccttcttcgtgacccagctggccatcaccgagaagcaggccagagtgctgatcgtgatcgcctggagcctgagcttcctgttcagcatccccaccctgatcatcttcggcaagagaaccctgagcaacggcgaggtgcagtgctgggccctgtggcccgacgacagctactggaccccctacatgaccatcgtggccttcctggtgtacttcatccccctgaccatcatcagcatcatgtacggcatcgtgatcagaaccatctggatcaagagcaagacctacgagaccgtgatcagcaactgcagcgacggcaagctgtgcagcagctacaacagaggcctgatcagcaaggccaagatcaaggccatcaagtacagcatcatcatcatcctggccttcatctgctgctggagcccctacttcctgttcgacatcctggacaacttcaacctgctgcccgacacccaggagagattctacgccagcgtgatcatccagaacctgcccgccctgaacagcgccatcaaccccctgatctactgcgtgttcagcagcagcatcagcttcccctgcagagagcagagaagccaggacagcagaatgaccttcagagagagaaccgagagacacgagatgcagatcctgagcaagcccgagttcatctag

SEQ ID NO: 113081 - DNA, 285 bp, Artificial Sequence
  derived and/or modified sequence
atgcccgccaacttcaccgagggcagcttcgacagcagcggcaccggccagaccctggacagcagccccgtggcctgcaccgagaccgtgaccttcaccgaggtggtggagggcaaggagtggggcagcttctactacagcttcaagaccgagcagctgatcaccctgtgggtgctgttcgtgttcaccatcgtgggcaacagcgtggtgctgttcagcacctggagaagaaagaagaagagcagaatgaccttcttcgtgacccagctggccatcaccgtgtag

SEQ ID NO: 113082 - protein, 390 aa, Artificial Sequence
  derived and/or modified sequence
MPANFTEGSFDSSGTGQTLDSSPVACTETVTFTEVVEGKEWGSFYYSFKTEQLITLWVLFVFTIVGNSVVLFSTWRRKKKSRMTFFVTQLAITDSFTGLVNILTDINWRFTGDFTAPDLVCRVVRYLQVVLLYASTYVLVSLSIDRYHAIVYPMKFLQGEKQARVLIVIAWSLSFLFSIPTLIIFGKRTLSNGEVQCWALWPDDSYWTPYMTIVAFLVYFIPLTIISIMYGIVIRTIWIKSKTYETVISNCSDGKLCSSYNRGLISKAKIKAIKYSIIIILAFICCWSPYFLFDILDNFNLLPDTQERFYASVIIQNLPALNSAINPLIYCVFSSSISFPCRANSSVYLLACDVSVLWALVLTSEKESCESWRRKGAKITGFQNDVPGEN

SEQ ID NO: 113083 - DNA, 87 bp, Artificial Sequence
  derived and/or modified sequence
gacgccgtgatcctgttcagcgtgtggagactgaagaagaagagcagagtgctgttcttcatctacatcatcgccatcagcgtgtag

SEQ ID NO: 113084 - DNA, 87 bp, Artificial Sequence
  derived and/or modified sequence
gacgccgtcatcctgttcagtgtttggaggctgaaaaaaaagagcagggttttgttcttcatctacattatagcaatttccgtatag

SEQ ID NO: 113085 - DNA, 87 bp, Artificial Sequence
  derived and/or modified sequence
gatgctgtgatcctcttctctgtgtggaggctgaagaagaagagccgggtgctcttcttcatctacatcatcgccatctctgtgtag

SEQ ID NO: 113086 - DNA, 87 bp, Artificial Sequence
  derived and/or modified sequence
gacgccgtgatcctgttcagcgtgtggcggctgaagaagaagagccgggtgctcttttttatctatataattgccatcagcgtgtag

SEQ ID NO: 113087 - DNA, 87 bp, Artificial Sequence
  derived and/or modified sequence
gacgcggtgatcctgttctcggtttggcggctgaagaagaagagccgggttttgttttttatatatattatagccattagtgtgtag

SEQ ID NO: 113088 - DNA, 84 bp, Artificial Sequence
  derived and/or modified sequence
gatgctgtgattctctttagtgtctggcgattaaagaagaaatccagggtactatttttcatttacattatagccatttcagtg

SEQ ID NO: 113089 - DNA, 1173 bp, Artificial Sequence
  derived and/or modified sequence
atgcctgctaatttcaccgagggaagcttcgacagctcagggaccggtcagacactagattctagcccagttgcatgtaccgagactgtcacattcaccgaagtcgttgagggcaaggagtggggttctttttactacagtttcaaaaccgaacagctgattaccctctgggtgctatttgtatttaccatcgtgggtaacagcgttgtgctgttctccacatggaggagaaagaaaaaatcacgcatgaccttctttgtaacacagctggccattacagactcctttaccggcctggtaaatattctgactgacatcaattggcggttcacgggggatttcacagctcctgatcttgtgtgccgcgtggtgcgctatctgcaggtggtgctgctgtatgcctctacctatgtgctggtcagtctgtccatcgacaggtaccatgctatcgtgtatccaatgaaattcctgcaaggtgagaagcaagcccgggtgcttattgttatcgcctggtccctgagctttctattcagcattccaacactcatcatcttcgggaagcggacgttgagtaacggtgaggtccaatgctgggccctttggccggatgattcttactggacaccttatatgacaattgttgcatttctggtctacttcatccccctcaccattatcagtatcatgtatgggattgttatccgcacgatttggatcaagtctaaaacctacgagacagtgatctccaactgctcagacggtaagttgtgtagttcgtacaataggggacttattagtaaggcgaagatcaaggcgattaagtattcaatcattatcatccttgcgttcatatgttgctggtcgccctatttcctgtttgatattctcgataatttcaacttgctgcctgacacacaggaaaggttttacgcgagtgtgataatacagaacctgcctgcattgaactcagcaataaatccgttgatctattgtgtttttagctcatccatatcattcccttgccgcgcgaattctagtgtctatttgttggcatgcgacgtgagcgtgctgtgggctcttgtactcactagcgagaaagaatcctgcgaatcctggagacgtaaaggggccaagatcaccggcttccagaacgacgtgcccggggagaactag

SEQ ID NO: 113090 - DNA, 1173 bp, Artificial Sequence
  derived and/or modified sequence
atgcctgccaacttcacagagggcagctttgacagcagcggcaccggccagaccctggacagcagccctgtggcctgcacagaaacagtgaccttcacagaggtggtggagggcaaggagtggggcagcttctactacagcttcaagacagagcagctgatcaccctgtgggtgctgtttgtgttcaccatcgtgggcaacagcgtggtgctcttcagcacctggaggaggaagaagaagagcaggatgaccttctttgtgacccagctggccatcacagacagcttcaccggcctggtgaacatcctgacagacatcaactggaggttcaccggggacttcaccgccccagacctggtgtgccgggtggtgcgctacctgcaggtggtgctgctgtatgccagcacctacgtgctggtgtccctgagcattgaccgctaccacgccatcgtgtaccccatgaagttcctgcagggcgagaagcaggcccgggtgctgattgtgattgcctggagcctgtccttcctgttcagcatccccaccctcatcatctttgggaagaggaccctgagcaatggagaggtgcagtgctgggccctgtggccagatgacagctactggaccccctacatgaccatcgtggccttcctggtgtacttcatccccctgaccatcatcagcatcatgtatggcatcgtcatccgcaccatctggatcaagagcaagacctatgagaccgtcatcagcaactgcagtgatggcaagctgtgcagcagctacaacagaggcctcatcagcaaggccaagatcaaggccatcaagtacagcatcatcatcatcctggccttcatctgctgctggagcccctacttcctgtttgacatcctggacaacttcaacctgctgcctgacacccaggagcgcttctacgccagcgtcatcatccagaacctgcctgccctgaacagcgccatcaaccccctcatctactgtgtgttcagcagcagcatctccttcccctgccgggccaacagctctgtgtacctgctggcctgtgatgtgtctgtgctgtgggccctggtgctgaccagcgagaaggagagctgtgagagctggaggaggaaaggagccaagatcaccggcttccagaatgatgtgcctggagaaaattag

SEQ ID NO: 113091 - DNA, 1173 bp, Artificial Sequence
  derived and/or modified sequence
atgcccgccaacttcaccgagggcagcttcgacagcagcggcaccggccagacacttgattcttctcccgtagcctgcacagaaacagtgacgttcactgaagtggttgaaggcaaagagtggggtagtttttactactcctttaagactgagcagctgatcacactgtgggtgctctttgtttttactatcgtcggcaattctgtggtcctcttttccacttggagacgaaaaaaaaaatcccggatgacattttttgtgacacaactggctattacagacagttttactgggctggtaaacattttaactgacataaactggaggttcaccggggactttactgcaccagacttagtgtgtagagtagtgcggtacctccaggtggtgcttctgtatgctagtacttacgtcctggtcagcctgagcattgaccgataccatgccatagtataccccatgaagtttttgcagggggaaaaacaggccagagtgctgattgtgattgcctggtctctgtcttttctttttagcatccctacgctgatcatttttggcaagcgaaccttgtcaaacggtgaagtccaatgctgggctctgtggccagacgactcatactggacgccctacatgacaatcgtggcctttctcgtctattttattccactgactatcatatccataatgtatgggatcgtgattagaaccatctggataaaatctaagacatacgagacagtgattagcaactgttctgacggcaaactctgctcctcctataatcgaggacttatttccaaagctaaaattaaagccattaagtacagtattattataatcttagcctttatctgttgttggagtccctacttcctgttcgacatcttagataacttcaatctgctgcctgatacccaggagagattttatgcctcagttatcattcagaatttgcccgccctgaactccgccataaatcctctgatctattgtgtctttagcagctccatatcgttcccctgtagggctaactcaagtgtctatttgcttgcatgcgacgtgtccgtcctctgggccttggtcttaacatccgaaaaggaatcatgcgaaagctggaggcggaaaggagccaagatcacggggtttcagaacgacgtgcccggcgagaactag

SEQ ID NO: 113092 - DNA, 1233 bp, Artificial Sequence
  derived and/or modified sequence
agccatgccagccaacttcacagagggcagcttcgattccagtgggaccgggcagacgctggattcttccccagtggcttgcactgaaacagtgacttttactgaagtggtggaaggaaaggaatggggttccttctactactcctttaagactgagcaattgataactctgtgggtcctctttgtttttaccattgttggaaactccgttgtgcttttttccacatggaggagaaagaagaagtcaagaatgaccttctttgtgactcagctggccatcacagattctttcacaggactggtcaacatcttgacagatattaattggcgattcactggagacttcacggcacctgacctggtttgccgagtggtccgctatttgcaggttgtgctgctctacgcctctacctacgtcctggtgtccctcagcatagacagataccatgccatcgtctaccccatgaagttccttcaaggagaaaagcaagccagggtcctcattgtgatcgcctggagcctgtcttttctgttctccattcccaccctgatcatatttgggaagaggacactgtccaacggtgaagtgcagtgctgggccctgtggcctgacgactcctactggaccccatacatgaccatcgtggccttcctggtgtacttcatccctctgacaatcatcagcatcatgtatggcattgtgatccgaactatttggattaaaagcaaaacctacgaaacagtgatttccaactgctcagatgggaaactgtgcagcagctataaccgaggactcatctcaaaggcaaaaatcaaggctatcaagtatagcatcatcatcattcttgccttcatctgctgttggagtccatacttcctgtttgacattttggacaatttcaacctccttccagacacccaggagcgtttctatgcctctgtgatcattcagaacctgccagcattgaatagtgccatcaaccccctcatctactgtgtcttcagcagctccatctctttcccctgcagggctaatagcagtgtctacctgttggcctgtgatgtctctgtcctctgggctctggtgctgaccagtgagaaggagagctgtgagtcatggagaaggaagggagcaaagatcacaggattccagaatgacgttccgggagagaactgagaggcatgagatgcagattctgtccaagccagaattcatctagaccctagggcagt

SEQ ID NO: 113093 - DNA, 1173 bp, Artificial Sequence
  derived and/or modified sequence
atgcctgcaaacttcactgagggctctttcgatagtagtggaacaggccagacactcgactcctctccagtggcctgcacagagaccgttacgtttactgaggtcgtcgagggcaaggagtggggtagcttttattatagttttaaaactgagcagctcattacactctgggtcctgtttgtatttactatcgtgggaaacagtgtggtgctgttctccacttggagacgtaagaagaaatcccgaatgacattttttgttacccagttggccattactgatagttttactgggctcgtcaatattctcactgatatcaattggcggttcacaggagatttcacagctccagacctggtgtgtcgcgttgtcagataccttcaggtggtcctgctatacgcgtcaacctacgtgctcgtttccctaagcatagaccgataccacgcaatcgtctatcccatgaaatttctccagggcgaaaaacaagcaagggtactcattgtcattgcatggagtttatccttcctattttccattccaacgctgatcatattcgggaagcggactctgagtaatggtgaagtccagtgttgggctctgtggcccgatgactcttactggacgccatatatgacaatcgtagcctttctcgtgtacttcattccacttaccattatcagcatcatgtacggcatcgtgattcggacaatctggatcaaatccaagacttatgaaaccgtgatcagcaactgctctgacggaaagctctgcagcagctacaatcgcggactgattagtaaggcaaaaatcaaggccattaagtattccattatcatcatcctagcgttcatatgttgctggagcccttactttctcttcgacatattagataactttaatctcctgccagacacgcaggagaggttctatgcgagcgtgatcatccaaaacctgcccgcattgaatagcgctatcaatcctcttatatactgcgtgttcagcagttctatttcctttccctgcagggcgaattcctctgtatatcttctggcatgtgatgttagcgtgctgtgggctctcgtccttacctctgaaaaggaaagttgtgagagctggcgacgcaagggtgccaagatcaccggattccaaaatgacgttcctggtgaaaactag

SEQ ID NO: 113094 - DNA, 1173 bp, Artificial Sequence
  derived and/or modified sequence
atgcccgccaacttcaccgagggcagcttcgacagcagcggcaccggccagaccctggacagcagccccgtggcctgcaccgagaccgtgaccttcaccgaggtggtggagggcaaggagtggggcagcttctactacagcttcaagaccgagcagctgatcaccctgtgggtgctgttcgtgttcaccatcgtgggcaacagcgtggtgctgttcagcacctggagaagaaagaagaagagcagaatgaccttcttcgtgacccagctggccatcaccgacagcttcaccggcctggtgaacatcctgaccgacatcaactggagattcaccggcgacttcaccgcccccgacctggtgtgcagagtggtgagatacctgcaggtggtgctgctgtacgccagcacctacgtgctggtgagcctgagcatcgacagataccacgccatcgtgtaccccatgaagttcctgcagggcgagaagcaggccagagtgctgatcgtgatcgcctggagcctgagcttcctgttcagcatccccaccctgatcatcttcggcaagagaaccctgagcaacggcgaggtgcagtgctgggccctgtggcccgacgacagctactggaccccctacatgaccatcgtggccttcctggtgtacttcatccccctgaccatcatcagcatcatgtacggcatcgtgatcagaaccatctggatcaagagcaagacctacgagaccgtgatcagcaactgcagcgacggcaagctgtgcagcagctacaacagaggcctgatcagcaaggccaagatcaaggccatcaagtacagcatcatcatcatcctggccttcatctgctgctggagcccctacttcctgttcgacatcctggacaacttcaacctgctgcccgacacccaggagagattctacgccagcgtgatcatccagaacctgcccgccctgaacagcgccatcaaccccctgatctactgcgtgttcagcagcagcatcagcttcccctgcagagccaacagcagcgtgtacctgctggcctgcgacgtgagcgtgctgtgggccctggtgctgaccagcgagaaggagagctgcgagagctggagaagaaagggcgccaagatcaccggcttccagaacgacgtgcccggcgagaactag

SEQ ID NO: 113095 - protein, 172 aa, Artificial Sequence
  derived and/or modified sequence
MSRYLRPPNTSLFVRNVADDTRSEDLRREFGRYGPIVDVYVPLDFYTRRPRGFAYVQFEDVRDAEDALHNLDRKWICGRQIEIQFAQGDRKTPNQMKAKEGRNVYSSSRYDDYDRYRRSRSRSYERRRSRSRSFDYNYRRSYSPRNRPTGRPRRSRSHSDNDSQVSKKKNER

SEQ ID NO: 113096 - DNA, 519 bp, Artificial Sequence
  derived and/or modified sequence
atgagccggtatctgcggcctcccaacacctcactcttcgtccgcaatgttgctgatgacaccagatcagaagacctacgcagagagttcggaagatacggaccaatagtggacgtatacgtcccactggatttctacactagacgtccgcgcggcttcgcttacgtgcagtttgaggatgttcgcgatgcagaagatgccctacataatcttgatagaaagtggatatgtggccgtcagatcgagattcagtttgctcagggtgatcggaaaacaccaaaccaaatgaaggctaaagaagggcgcaacgtctacagctcctcccgatatgacgattacgaccgctaccggcgttctagaagccgttcttacgaaagaagacgatcacgtagcagatcatttgactataattataggaggtcatattcacccagaaacagaccaactggcaggcctaggcgcagtagatcccattccgacaatgactcccaagtgtccaaaaagaagaatgagagatag

SEQ ID NO: 113097 - DNA, 519 bp, Artificial Sequence
  derived and/or modified sequence
atgagccgctacctgcggccccccaacaccagcctgtttgtgagaaatgtggctgatgacaccaggtctgaggacctgcggcgggagtttggccgctatggccccatcgtggatgtgtatgtgcccctggacttctacacccggcggccccggggctttgcctacgtgcagtttgaagatgtgagagatgctgaagatgccctgcacaacctggacaggaagtggatctgtggccggcagatcgagatccagtttgcccagggcgacaggaagacccccaaccagatgaaggccaaggagggcagaaatgtgtacagcagcagccgctatgatgattatgaccgctacagaagaagccgcagccgctcctatgaaagaagaagaagccgcagccgcagctttgactacaactacagaagaagctacagccccaggaaccggcccaccggccggcccaggaggagccgcagccacagcgacaatgacagccaggtgtccaagaagaagaatgaaagatag

SEQ ID NO: 113098 - DNA, 519 bp, Artificial Sequence
  derived and/or modified sequence
atgagccggtacctgcggccccccaacaccagcctgttcgtgcggaatgtggcggatgacaccaggagcgaagacctgaggagggaatttggacgctatgggccaatcgtggatgtgtacgtgccactcgatttctacacaagacgccccagaggctttgcctatgtgcaattcgaggacgtgcgggatgcagaggatgctctgcacaacttggacagaaagtggatctgtgggagacaaatagagatccagtttgcccagggggatcgaaaaacacctaaccagatgaaggctaaggaagggcgtaacgtttactcgagtagccgctatgacgattatgatcgctaccgtcgctcgaggtccagaagctatgagcgcagacgaagccgctccagatctttcgattataattatagacgcagctatagcccgcgaaacagaccaacgggacgacctaggcggtctcggtcacacagtgataatgattctcaggtgtctaaaaaaaagaacgagagatag

SEQ ID NO: 113099 - DNA, 519 bp, Artificial Sequence
  derived and/or modified sequence
atgtctcgttaccttcggcctcctaacactagcctttttgtgaggaacgttgctgatgatactcggtcggaggacttacgcagggagttcggccgatatggccctatcgtggacgtgtatgtccctcttgatttttatactcgcaggcccaggggattcgcgtatgtacagttcgaggacgttcgcgatgccgaggatgctctgcacaatttagataggaagtggatttgtggacgccagatcgaaatccagttcgcgcaaggggatagaaaaactcctaaccaaatgaaagcaaaggaaggcagaaatgtttacagttctagtaggtacgacgactacgacagataccgcagatcaagaagtcggagctatgaacgaagacgatctcgctcaaggtccttcgattacaattatcggaggtcttactcccccaggaacaggccaaccgggaggcctagaagaagccgaagccactctgataacgactcacaggtgagcaaaaagaaaaacgagcgttag

SEQ ID NO: 113100 - DNA, 866 bp, Artificial Sequence
  derived and/or modified sequence
tgagcccgttagtgcgcccggccgagacacgccgccgccatgtcccgctacctgcgtccccccaacacgtctctgttcgtcaggaacgtggccgacgacaccaggtctgaagacttgcggcgtgaatttggtcgttatggtcctatagttgatgtgtatgttccacttgatttctacactcgccgtccaagaggatttgcttatgttcaatttgaggatgttcgtgatgctgaagacgctttacataatttggacagaaagtggatttgtggacggcagattgaaatacagtttgcccagggggatcgaaagacaccaaatcagatgaaagccaaggaagggaggaatgtgtacagttcttcacgctatgatgattatgacagatacagacgttctagaagccgaagttatgaaaggaggagatcaagaagtcggtcttttgattacaactatagaagatcgtatagtcctagaaatagaccgactggaagaccacggcgtagcagaagccattccgacaatgatagccaagtaagcaagaagaaaaatgagagataatgcttcagtgagagaggaaaggtgctacatagagtatgagctgttaagttacatcccaggggaaagacctgggaactattgtattattctcttgaaaatttggcccagtaagctgctacatccagttcaactaacaaaatcctgtataccacagagaagaataaaggaaaccaaactgacaaacatccttcttttatttaagaccaaactgcagctggaatacccagtacagttctgcttactacacttcaagaaagatctgaaagcggaaaaagaaccaaagaagggcagttcaagcgaccaaaggg

SEQ ID NO: 113101 - DNA, 519 bp, Artificial Sequence
  derived and/or modified sequence
atgagcagatacctgagaccccccaacaccagcctgttcgtgagaaacgtggccgacgacaccagaagcgaggacctgagaagagagttcggcagatacggccccatcgtggacgtgtacgtgcccctggacttctacaccagaagacccagaggcttcgcctacgtgcagttcgaggacgtgagagacgccgaggacgccctgcacaacctggacagaaagtggatctgcggcagacagatcgagatccagttcgcccagggcgacagaaagacccccaaccagatgaaggccaaggagggcagaaacgtgtacagcagcagcagatacgacgactacgacagatacagaagaagcagaagcagaagctacgagagaagaagaagcagaagcagaagcttcgactacaactacagaagaagctacagccccagaaacagacccaccggcagacccagaagaagcagaagccacagcgacaacgacagccaggtgagcaagaagaagaacgagagatag

SEQ ID NO: 113102 - protein, 445 aa, Artificial Sequence
  derived and/or modified sequence
MGESIPLAAPVPVEQAVLETFFSHLGIFSYDKAKDNVEKEREANKSAGGSWLSLLAALAHLAAAEKVYHSLTYLGQKLGGQSFFSRKDSIRTIYTSLHNELKKVVTGRGALGGTAPHVEELLSHLSEQLCFFVQARMEMADFYEKMYTLSTQKFINAEELVGLLDAIMKKYSSRFHHPILSPLESSFQLEVDVLCHLLKAQAQVSEWKFLPSLVNLHSAHTKLQTWGQIFEKQRETKKHLFGGQSQKAVQPPHLFLWLMKLKNMLLAKFSFYFHEALSRQTTASEMKTLTAKANPDFFGKISSFIRKYDAANVSLIFDNRGSESFQGHGYHHPHSYREAPKGVDQYPAVVSLPSDRPVMHWPNVIMIMTDRTSDLNSLEKVVHFYDDKVQSTYFLTRPEPHFTIVIIFESKKSERDSHFISFLNEVSLALKNPKVFASLKPGAKG

SEQ ID NO: 113103 - protein, 126 aa, Artificial Sequence
  derived and/or modified sequence
MTEEACRTRSQKRALERDPTEDDVESKKIKMERGLLASDLNTDGDMRVTPEPGAGPTQGLLRATEATAMAMGRGEGLVGDGPVDMRTSHSDMKSERRPPSPDVIVLSDNEQPSSPRVNGLTTVALK

SEQ ID NO: 113104 - protein, 588 aa, Artificial Sequence
  derived and/or modified sequence
MADGVDHIDIYADVGEEFNQEAEYGGHDQIDLYDDVISPSANNGDAPEDRDYMDTLPPTVGDDVGKGAAPNVVYTYTGKRIALYIGNLTWWTTDEDLTEAVHSLGVNDILEIKFFENRANGQSKGFALVGVGSEASSKKLMDLLPKRELHGQNPVVTPCNKQFLSQFEMQSRKTTQSGQMSGEGKAGPPGGSSRAAFPQGGRGRGRFPGAVPGGDRFPGPAGPGGPPPPFPGNLIKHLVKGTRPLFLETRIPWHMGHSIEEIPIFGLKAGQTPPRPPLGPPGPPGPPGPPPPGQVLPPPLAGPPNRGDRPPPPVLFPGQPFGQPPLGPLPPGPPPPVPGYGPPPGPPPPQQGPPPPPGPFPPRPPGPLGPPLTLAPPPHLPGPPPGAPPPAPHVNPAFFPPPTNSGMPTSDSRGPPPTDPYGRPPPYDRGDYGPPGREMDTARTPLSEAEFEEIMNRNRAISSSAISRAVSDASAGDYGSAIETLVTAISLIKQSKVSADDRCKVLISSLQDCLHGIESKSYGSGSRRERSRERDHSRSREKSRRHKSRSRDRHDDYYRERSRERERHRDRDRDRDRERDREREYRHR

SEQ ID NO: 113105 - DNA, 1767 bp, Artificial Sequence
  derived and/or modified sequence
atggctgatggcgtcgaccacatcgacatatacgccgatgtgggagaggagtttaaccaggaagcagaatatggtgggcacgatcagatcgatctgtatgatgacgtgatttcaccctccgcaaataacggagacgcacccgaggacagggattatatggataccctgccacccactgtgggagacgatgtcggcaagggtgcagccccaaatgtggtgtacacatatacgggcaagaggatcgccctgtacattggaaaccttacttggtggacaactgatgaagatctcacagaagctgtgcactccctcggagtcaatgacatattggaaatcaaattctttgaaaatcgggccaacggccaatctaagggattcgcccttgttggcgtcgggagtgaggcctcatcaaagaagctcatggatcttctgcccaagcgggagttacacggccaaaaccccgtggtcacaccatgtaacaaacagttccttagtcagtttgagatgcaatcccgcaagaccactcaatcagggcagatgtcgggagaaggcaaggccggtccacccggaggttcctcccgcgccgcatttccccagggcggtcgcggcagaggccgctttccaggagcagtaccaggcggagacaggtttccggggccggctggaccgggcggcccccctccaccattccctggcaacctgattaaacatcttgtgaagggcactcgtcccctgtttcttgagactaggataccatggcacatgggtcactctattgaggagattcctatctttggcctcaaggccgggcagacgccgccaagaccaccactaggacctcccgggcctcctggcccaccaggtcctccaccgccaggacaagtgctgccacctcctttggccggaccgcccaatcggggtgaccggccacctccccccgtgctgttccccgggcagcccttcgggcagcccccactcggacctctgccccccgggccgccgccgccagttcccggctatgggcctccccctggtcccccacctccccaacagggaccaccccctccgccgggtccctttcccccgaggccacctggccctttgggccctccccttacactagctcctcctccacacctcccaggaccccccccgggtgcccctccccctgcgccgcatgtgaaccctgcgttttttccaccacctaccaactctggcatgcctacgagtgatagcagaggcccccccccaacagacccttacgggcggccgccaccttacgacaggggtgactacggcccccctgggcgggaaatggacacagctcggacaccacttagtgaagcagaatttgaggaaattatgaaccgcaatcgagcaatctcatcaagcgctatcagccgggccgtcagtgacgccagcgccggggattatgggtctgctattgaaaccttagtcacggccatttctctcatcaagcagagtaaagtttcagccgacgatagatgtaaagtcctgatcagctccctgcaggattgtctacatggaatcgaatcgaaatcctacggatcgggatctcgccgcgagcggtcgcgcgagagggaccacagccggagcagggaaaaatctcgacgccacaaatcacggtcaagagacaggcatgacgattactacagagaacgctctagagaacgtgagcgacacagagatcgcgatcgcgatcgcgatcgggagcgggacagggagagagagtacagacaccgctag

SEQ ID NO: 113106 - DNA, 1767 bp, Artificial Sequence
  derived and/or modified sequence
atggctgatggagtggaccacatcgacatctatgcagatgtgggggaggagttcaaccaggaggccgagtatggaggccatgaccagattgacctgtatgatgatgtgatcagccccagcgccaacaatggagatgcccctgaggaccgggactacatggacaccctgcccccaacagtgggagatgatgtgggcaagggggccgccccaaatgtggtgtacacctacacaggcaagagaattgccctgtacatcggcaacctgacctggtggaccacagatgaggacctgacagaggccgtgcacagcctgggcgtgaatgacatcctggagatcaagttctttgagaacagagccaacggccagagcaagggctttgccctggtgggcgtgggcagcgaggccagcagcaagaagctgatggacctgctgcccaagcgggagctgcacggccagaaccctgtggtgaccccctgcaacaagcagttcctgagccagtttgagatgcagagcaggaagaccacccagagcggccagatgtctggagagggcaaggccggccccccaggcggcagcagcagagctgccttcccccagggcggccggggccggggccgcttccctggagctgtgcctggaggagaccgcttccctggccctgctggccctgggggccccccaccacccttccctggcaacctgatcaagcacctggtgaagggcacccggcccctcttcctggagacccgcatcccctggcacatgggccacagcattgaggagatccccatcttcggcctgaaggccggccagaccccaccccggccccccctgggccccccaggccccccaggccccccaggccccccacctcctggccaggtgctgcccccacccctggccggcccccccaacagaggagaccggcccccacctcctgtgctcttccctggccagcccttcggccagccccccctgggccccctgcccccaggccccccacctcctgtgcccggctacggccccccacctggccccccaccaccccagcagggccccccacctcctcctggccccttccccccccggcccccaggccccctgggcccccccctgaccctggcccccccaccccacctgcccggccccccacctggggcccctcctccagcccctcatgtgaacccagccttcttccccccacccaccaacagcggcatgcccaccagtgacagccggggccccccacccacagacccctacggccggcccccaccctatgacagaggagactatggccccccaggccgggagatggacacagcccggacccccctgtctgaggccgagtttgaggagatcatgaacagaaacagagccatcagcagcagcgccatcagcagagctgtgtctgatgccagcgctggggactatggcagcgccatcgagaccctggtgacagccatcagcctcatcaagcagagcaaggtgtctgcagatgaccgctgcaaggtgctgatcagcagcctgcaggactgcctgcatggaattgagagcaagagctatggcagcggcagcagaagagagaggagccgggagcgggaccacagccgcagccgggagaagagccgccgccacaagagccgcagccgggacagacatgatgactactaccgggagaggagccgggagcgggagcggcaccgggaccgggaccgggaccgggaccgggagcgggaccgggagcgggagtaccgccacaggtag

SEQ ID NO: 113107 - DNA, 1767 bp, Artificial Sequence
  derived and/or modified sequence
atggccgacggcgtggaccacatcgacatctacgccgacgtgggcgaagaatttaaccaagaagctgaatatgggggccatgatcagatcgatctatacgatgatgtgatctcccccagtgccaacaatggtgatgcaccggaagaccgtgactatatggataccctccctcctaccgtgggagacgacgttggcaagggggccgcgcctaacgttgtctacacctataccggcaaacggattgctctgtacatcggtaacttaacatggtggaccaccgatgaggacctcacagaggcggtgcactccctcggagtcaacgacatcctggagatcaagttttttgaaaacagggccaacggccagtcaaaagggtttgctctggtaggtgttggctccgaagccagctccaaaaaactgatggatcttctacctaagcgagagctgcatgggcaaaacccggtcgtgaccccttgcaacaagcaattcctaagtcagtttgagatgcaatcacggaaaacgacacagagcggtcaaatgtccggcgaggggaaagcaggccccccgggcggcagttctagagctgcatttcctcagggagggagaggcagaggtagattccccggagcggttcccggaggagataggttcccgggccccgctggacccggaggccctcctcccccctttccgggaaatctgattaaacatctggtgaaaggcacaagacctctgtttctggagaccagaatcccttggcacatgggccacagtattgaggaaatcccaatctttggcctcaaggccggtcagacgccccccagaccaccgttggggccgcctggcccgcctggcccgcccggtccgccaccacctgggcaggtgctccccccgcccctggctggcccgccaaaccggggtgacaggccccccccaccagtgctcttccctgggcaaccttttggccagcccccgttgggtcctctgccgccagggcctccccctcctgtcccagggtatggtcctccaccagggcccccgccgccacagcagggccctccaccacctcccggccccttccctccccggccaccgggtcctctcggccctcctctgacactggctcctcctccccatctgccaggtccccccccaggcgcaccccctccagctccacacgtgaatcccgcctttttccctcctccaactaacagcgggatgcctaccagcgattccagagggccacctcctaccgatccttatgggcgacctccaccgtacgacaggggcgattatggcccgcctggacgcgagatggacaccgcgcggacgcccctgtccgaggcggagttcgaggaaatcatgaataggaatcgcgctatctcatcatctgccataagccgggctgtctctgacgcatctgcaggggattacggctccgccatcgagaccctcgtcacagctatatctttgatcaaacagtccaaggttagtgcagatgaccgttgtaaggttttgatttcgtccctacaggactgcctgcatggcatcgagtccaaatcgtacggatctggaagtcggcgcgagcgttcacgagaacgcgaccactcccgtagccgggaaaagtccagacggcacaaaagccgaagtcgggatcgacacgatgactattacagagagaggagcagggagcgtgagcggcaccgcgatagagaccgcgaccgtgatagagagcgagaccgagagagagagtaccgccaccgttag

SEQ ID NO: 113108 - DNA, 1767 bp, Artificial Sequence
  derived and/or modified sequence
atggcggatggcgttgatcatatcgatatctacgcagatgttggcgaagagttcaaccaagaggctgaatacggcggtcacgatcaaatcgacctgtacgatgacgtcatatccccgagtgccaataatggagatgctcccgaagacagagactacatggacactctgccgcctaccgtaggagacgacgttggaaaaggggcagccccaaacgtggtctatacctatacaggaaaaagaattgcgctgtatatcggaaatctgacctggtggacaaccgacgaagacttgaccgaggcagtgcatagcctaggggtcaacgatatactagagataaaatttttcgaaaatcgtgccaatggacagtctaagggtttcgcgctagtcggcgtcggatccgaggcctccagcaagaaattaatggacttgctgcctaagagggagttgcatggacagaatcctgtggtcactccatgcaacaaacagtttttatcccaatttgaaatgcagtcacgcaaaactacacagtcgggccaaatgtctggagagggcaaagctgggcctcctgggggttctagtagagcggcattccctcagggcggacgcggacggggacgattccctggagccgttccaggcggagaccgcttccccggaccagcaggaccgggtgggcctcccccacccttcccagggaaccttattaagcatctagtaaagggtactcgcccactgtttctggaaacgcggataccatggcacatgggccactctattgaggaaatccctatctttgggctcaaagcagggcagacacctccaaggccccctctcggccctcccggtcctccgggacccccaggacccccaccacctggacaggtcctgcctccgcctctagccggtcctcctaacagaggagaccgcccaccacccccagtgctttttcctgggcagccgtttggccagccacctctgggccctctcccacctggtccgccacctccggttcctgggtacgggccacccccaggcccaccgcctccccaacaggggcctccgcctcccccagggcctttccctcctaggccaccagggcctctaggtccacctctgaccctggcacctccgccacatctgccaggtccaccacctggagccccaccaccagctccccacgtcaatcctgctttttttcctccaccaactaatagcggcatgcccacctctgattcccggggtccgccacctaccgatccttatggtagacctccaccttacgacagaggggactatgggcctccaggacgagaaatggataccgcacgcactcctttaagtgaggcagagttcgaggaaatcatgaatcgtaatagggcgatatcaagcagcgccataagtcgtgctgtttcagacgccagtgccggagactatgggagtgccattgaaaccctagtgaccgccatctctcttataaaacagtctaaagtttccgccgatgataggtgcaaagtcctgatttcttcgttgcaggactgccttcatggcatcgagagcaaatcatacgggagtggaagccgacgtgaacgctcccgggagcgcgatcacagtcgatctcgggaaaagagtcgaagacacaagagtcgctctagggaccgacacgacgattactatagggagcgttccagggaaagagaacgccacagggatagagaccgggatcgtgacagagaacgtgacagggaacgagagtacagacacaggtag

SEQ ID NO: 113109 - DNA, 2229 bp, Artificial Sequence
  derived and/or modified sequence
cggcggcggcggcggccgaggctgaaggaagatggcggacggcgtggaccacatagacatttacgcggatgtcggcgaagagttcaaccaggaagctgaatatggtgggcatgatcagatagatttgtatgacgatgtcatatctccatctgcaaataatggagatgccccagaagaccgagattacatggatactctcccaccaactgttggtgatgatgtgggtaaaggagcagcaccaaatgttgtctatacatatactggaaagagaattgcattatatattggaaatctaacatggtggacaacagatgaagacttaactgaagcagttcattctttgggagtaaatgatattttggagataaaattttttgaaaatcgggcaaatggccagtcaaaggggtttgcccttgttggtgttggatctgaagcatcttcaaaaaagttaatggatctgttacctaaaagagaacttcatggtcagaatcctgttgtaactccatgcaataaacagttcctgagtcaatttgaaatgcagtccaggaaaactacacaatcaggacaaatgtctggggaaggtaaagctggtcctccaggaggcagttcccgtgcagcatttccacaaggtggtagaggacggggccgttttccaggggctgttcctggtggggacagatttcctgggccagcaggaccaggagggccacccccaccttttccaggaaatttgatcaagcatcttgttaaaggaactcggcctttgttcctggaaactaggattccatggcatatggggcacagcatagaggaaatacccatttttggcctaaaagctggacagactccaccacgtccacccttaggtcctccaggcccacctggtccaccaggtcctccacctcctggtcaggttctgcctcctcctctagctgggcctcctaatcgaggagatcgccctccaccaccagttctttttcctggacaaccttttgggcagcctccattgggtccacttcctcctggccctccacctccagttccaggctacggcccccctcctggcccaccacctccacaacagggaccacctccacctccaggcccctttccacctcgtccacccggtccacttgggccaccccttacactagctcctcctccgcatcttcctggaccacctccaggtgccccaccgccagctccgcatgtgaacccagctttctttcctccaccaactaacagtggcatgcctacatcagatagccgaggtccaccaccaacagatccatatgggcgacctccaccatatgataggggtgactatggcccccctggaagggaaatggatactgcaagaacgccattgagtgaagctgaatttgaagaaatcatgaatagaaatagggcaatctcaagcagtgctatttcgagagctgtgtctgatgccagtgctggtgattatgggagtgctattgagacactggtaactgcaatttctttaattaaacaatccaaagtatctgctgatgatcgttgcaaagttcttattagttctttgcaagattgccttcatggaattgagtccaagtcttatggttctggatcaagacgtgaacgatcaagagagagggaccatagtagatcacgagaaaagagtcgacgtcataaatcccgtagtagagaccgtcatgacgattattacagagagagaagcagagaacgagagaggcaccgggatcgtgaccgagaccgtgaccgagagcgtgaccgagagcgcgaatatcgtcatcgttagaagctgaaggaagaggatcaccttccaagacaaaacagtcttcatgggggaaaaatgacgcttgtccagcagtttgcttcttgtgattgaactgaacctgtaaggattcatggataaaatgaacaggaatagatctgaataaagcaaatctgcataaatggtaaccagtagctctacttttattttttatgttgcttaactgttttatttgaaggaaacctgtgtgatttaaaaagttatagcttttgcaactttattactggttatatacatttggccattatgatgtgcaagcaattggaaaaaaagtcaagtaaatgcttgtttttgtagtagtttgttcttgttaaaaatgtttatatgataatgtctgtaaacagcatcactttgattacaatagatgtagtgttgtaataaactgtttaatgggg

SEQ ID NO: 113110 - DNA, 1767 bp, Artificial Sequence
  derived and/or modified sequence
atggccgacggcgtggaccacatcgacatctacgccgacgtgggcgaggagttcaaccaggaggccgagtacggcggccacgaccagatcgacctgtacgacgacgtgatcagccccagcgccaacaacggcgacgcccccgaggacagagactacatggacaccctgccccccaccgtgggcgacgacgtgggcaagggcgccgcccccaacgtggtgtacacctacaccggcaagagaatcgccctgtacatcggcaacctgacctggtggaccaccgacgaggacctgaccgaggccgtgcacagcctgggcgtgaacgacatcctggagatcaagttcttcgagaacagagccaacggccagagcaagggcttcgccctggtgggcgtgggcagcgaggccagcagcaagaagctgatggacctgctgcccaagagagagctgcacggccagaaccccgtggtgaccccctgcaacaagcagttcctgagccagttcgagatgcagagcagaaagaccacccagagcggccagatgagcggcgagggcaaggccggcccccccggcggcagcagcagagccgccttcccccagggcggcagaggcagaggcagattccccggcgccgtgcccggcggcgacagattccccggccccgccggccccggcggcccccccccccccttccccggcaacctgatcaagcacctggtgaagggcaccagacccctgttcctggagaccagaatcccctggcacatgggccacagcatcgaggagatccccatcttcggcctgaaggccggccagaccccccccagaccccccctgggcccccccggcccccccggcccccccggcccccccccccccggccaggtgctgcccccccccctggccggcccccccaacagaggcgacagaccccccccccccgtgctgttccccggccagcccttcggccagccccccctgggccccctgccccccggcccccccccccccgtgcccggctacggccccccccccggccccccccccccccagcagggccccccccccccccccggccccttcccccccagaccccccggccccctgggcccccccctgaccctggccccccccccccacctgcccggccccccccccggcgcccccccccccgccccccacgtgaaccccgccttcttccccccccccaccaacagcggcatgcccaccagcgacagcagaggccccccccccaccgacccctacggcagaccccccccctacgacagaggcgactacggcccccccggcagagagatggacaccgccagaacccccctgagcgaggccgagttcgaggagatcatgaacagaaacagagccatcagcagcagcgccatcagcagagccgtgagcgacgccagcgccggcgactacggcagcgccatcgagaccctggtgaccgccatcagcctgatcaagcagagcaaggtgagcgccgacgacagatgcaaggtgctgatcagcagcctgcaggactgcctgcacggcatcgagagcaagagctacggcagcggcagcagaagagagagaagcagagagagagaccacagcagaagcagagagaagagcagaagacacaagagcagaagcagagacagacacgacgactactacagagagagaagcagagagagagagagacacagagacagagacagagacagagacagagagagagacagagagagagagtacagacacagatag

SEQ ID NO: 113111 - protein, 1159 aa, Artificial Sequence
  derived and/or modified sequence
MPGTPGSLEMGLLTFRDVAIEFSPEEWQCLDTAQQNLYRNVMLENYRNLAFLGICPHFPQDFWPEQSMEDSFQKVLLRKYEKCGHENLQLRKGCKSVDECKVHKEGYNKLNQCLTTAQSKVFQCGKYLKVFYKFLNSNRHTIRHTGKKCFKCKKCVKSFCIRLHKTQHKCVYITEKSCKCKECEKTFHWSSTLTNHKEIHTEDKPYKCEECGKAFKQLSTLTTHKIICAKEKIYKCEECGKAFLWSSTLTRHKRIHTGEKPYKCEECGKAFSHSSTLAKHKRIHTGEKPYKCEECGKAFSRSSTLAKHKRIHTGEKPYKCKECGKAFSNSSTLANHKITHTEEKPYKCKECDKAFKRLSTLTKHKIIHAGEKLYKCEECGKAFNRSSNLTIHKFIHTGEKPYKCEECGKAFNWSSSLTKHKRFHTREKPFKCKECGKAFIWSSTLTRHKRIHTGEKPYKCEECGKAFRQSSTLTKHKIIHTGEKPYKFEECGKAFRQSLTLNKHKIIHSREKPYKCKECGKAFKQFSTLTTHKIIHAGKKLYKCEECGKAFNHSSSLSTHKIIHTGEKSYKCEECGKAFLWSSTLRRHKRIHTGEKPYKCEECGKAFSHSSALAKHKRIHTGEKPYKCKECGKAFSNSSTLANHKITHTEEKPYKCKECDKTFKRLSTLTKHKIIHAGEKLYKCEECGKAFNRSSNLTIHKFIHTGEKPYKCEECGKAFNWSSSLTKHKRIHTREKPFKCKECGKAFIWSSTLTRHKRIHTGEKPYKCEECGKAFSRSSTLTKHKTIHTGEKPYKCKECGKAFKHSSALAKHKIIHAGEKLYKCEECGKAFNQSSNLTTHKIIHTKEKPSKSEECDKAFIWSSTLTEHKRIHTREKTYKCEECGKAFSQPSHLTTHKRMHTGEKPYKCEECGKAFSQSSTLTTHKIIHTGEKPYKCEECGKAFRKSSTLTEHKIIHTGEKPYKCEECGKAFSQSSTLTRHTRMHTGEKPYKCEECGKAFNRSSKLTTHKIIHTGEKPYKCEECGKAFISSSTLNGHKRIHTREKPYKCEECGKAFSQSSTLTRHKRLHTGEKPYKCGECGKAFKESSALTKHKIIHTGEKPYKCEKCGKAFNQSSILTNHKKIHTITPVIPLLWEAEAGGSRGQEMETILANTVKPLLY

SEQ ID NO: 113112 - DNA, 3480 bp, Artificial Sequence
  derived and/or modified sequence
atgcccggcacccccggcagcctggagatgggcctgctgaccttcagagacgtggccatcgagttcagccccgaggagtggcagtgcctggacaccgcccagcagaacctgtacagaaacgtgatgctggagaactacagaaacctggccttcctgggcatctgcccccacttcccccaggacttctggcccgagcagagcatggaggacagcttccagaaggtgctgctgagaaagtacgagaagtgcggccacgagaacctgcagctgagaaagggctgcaagagcgtggacgagtgcaaggtgcacaaggagggctacaacaagctgaaccagtgcctgaccaccgcccagagcaaggtgttccagtgcggcaagtacctgaaggtgttctacaagttcctgaacagcaacagacacaccatcagacacaccggcaagaagtgcttcaagtgcaagaagtgcgtgaagagcttctgcatcagactgcacaagacccagcacaagtgcgtgtacatcaccgagaagagctgcaagtgcaaggagtgcgagaagaccttccactggagcagcaccctgaccaaccacaaggagatccacaccgaggacaagccctacaagtgcgaggagtgcggcaaggccttcaagcagctgagcaccctgaccacccacaagatcatctgcgccaaggagaagatctacaagtgcgaggagtgcggcaaggccttcctgtggagcagcaccctgaccagacacaagagaatccacaccggcgagaagccctacaagtgcgaggagtgcggcaaggccttcagccacagcagcaccctggccaagcacaagagaatccacaccggcgagaagccctacaagtgcgaggagtgcggcaaggccttcagcagaagcagcaccctggccaagcacaagagaatccacaccggcgagaagccctacaagtgcaaggagtgcggcaaggccttcagcaacagcagcaccctggccaaccacaagatcacccacaccgaggagaagccctacaagtgcaaggagtgcgacaaggccttcaagagactgagcaccctgaccaagcacaagatcatccacgccggcgagaagctgtacaagtgcgaggagtgcggcaaggccttcaacagaagcagcaacctgaccatccacaagttcatccacaccggcgagaagccctacaagtgcgaggagtgcggcaaggccttcaactggagcagcagcctgaccaagcacaagagattccacaccagagagaagcccttcaagtgcaaggagtgcggcaaggccttcatctggagcagcaccctgaccagacacaagagaatccacaccggcgagaagccctacaagtgcgaggagtgcggcaaggccttcagacagagcagcaccctgaccaagcacaagatcatccacaccggcgagaagccctacaagttcgaggagtgcggcaaggccttcagacagagcctgaccctgaacaagcacaagatcatccacagcagagagaagccctacaagtgcaaggagtgcggcaaggccttcaagcagttcagcaccctgaccacccacaagatcatccacgccggcaagaagctgtacaagtgcgaggagtgcggcaaggccttcaaccacagcagcagcctgagcacccacaagatcatccacaccggcgagaagagctacaagtgcgaggagtgcggcaaggccttcctgtggagcagcaccctgagaagacacaagagaatccacaccggcgagaagccctacaagtgcgaggagtgcggcaaggccttcagccacagcagcgccctggccaagcacaagagaatccacaccggcgagaagccctacaagtgcaaggagtgcggcaaggccttcagcaacagcagcaccctggccaaccacaagatcacccacaccgaggagaagccctacaagtgcaaggagtgcgacaagaccttcaagagactgagcaccctgaccaagcacaagatcatccacgccggcgagaagctgtacaagtgcgaggagtgcggcaaggccttcaacagaagcagcaacctgaccatccacaagttcatccacaccggcgagaagccctacaagtgcgaggagtgcggcaaggccttcaactggagcagcagcctgaccaagcacaagagaatccacaccagagagaagcccttcaagtgcaaggagtgcggcaaggccttcatctggagcagcaccctgaccagacacaagagaatccacaccggcgagaagccctacaagtgcgaggagtgcggcaaggccttcagcagaagcagcaccctgaccaagcacaagaccatccacaccggcgagaagccctacaagtgcaaggagtgcggcaaggccttcaagcacagcagcgccctggccaagcacaagatcatccacgccggcgagaagctgtacaagtgcgaggagtgcggcaaggccttcaaccagagcagcaacctgaccacccacaagatcatccacaccaaggagaagcccagcaagagcgaggagtgcgacaaggccttcatctggagcagcaccctgaccgagcacaagagaatccacaccagagagaagacctacaagtgcgaggagtgcggcaaggccttcagccagcccagccacctgaccacccacaagagaatgcacaccggcgagaagccctacaagtgcgaggagtgcggcaaggccttcagccagagcagcaccctgaccacccacaagatcatccacaccggcgagaagccctacaagtgcgaggagtgcggcaaggccttcagaaagagcagcaccctgaccgagcacaagatcatccacaccggcgagaagccctacaagtgcgaggagtgcggcaaggccttcagccagagcagcaccctgaccagacacaccagaatgcacaccggcgagaagccctacaagtgcgaggagtgcggcaaggccttcaacagaagcagcaagctgaccacccacaagatcatccacaccggcgagaagccctacaagtgcgaggagtgcggcaaggccttcatcagcagcagcaccctgaacggccacaagagaatccacaccagagagaagccctacaagtgcgaggagtgcggcaaggccttcagccagagcagcaccctgaccagacacaagagactgcacaccggcgagaagccctacaagtgcggcgagtgcggcaaggccttcaaggagagcagcgccctgaccaagcacaagatcatccacaccggcgagaagccctacaagtgcgagaagtgcggcaaggccttcaaccagagcagcatcctgaccaaccacaagaagatccacaccatcacccccgtgatccccctgctgtgggaggccgaggccggcggcagcagaggccaggagatggagaccatcctggccaacaccgtgaagcccctgctgtactag

SEQ ID NO: 113113 - DNA, 3480 bp, Artificial Sequence
  derived and/or modified sequence
atgccagggactcccggctctctggaaatgggactactgaccttccgcgatgtggctatagagttcagtccagaagagtggcaatgtttggatacggcccagcaaaacctgtaccggaacgtaatgttggaaaattacagaaaccttgcgttcctgggcatctgtccccactttccacaagacttttggccagaacagtcgatggaggatagtttccagaaggtgctactcagaaaatacgaaaagtgtggccacgagaacctgcagctcagaaagggttgcaagtcggtcgacgagtgcaaggtacacaaagagggctataataagctgaatcagtgcctgacaacagcgcagtccaaggtgttccagtgcggcaaatacctgaaggtgttctacaaatttttgaacagcaaccggcacactattcgacacaccgggaagaaatgttttaagtgtaagaagtgcgtgaagtctttttgcattcggctgcacaagacccaacacaaatgtgtatacatcacggagaagtcctgcaaatgtaaggagtgtgaaaaaacctttcattggagcagcacactgacaaaccataaggagatccataccgaagacaagccatataagtgtgaggaatgcggcaaggctttcaagcagttgtctactttaactacccacaaaatcatttgcgctaaagaaaaaatctataaatgcgaagagtgcggaaaggcttttttgtggtcaagcactctgacgcgccataagcgcatccacaccggcgagaagccatacaaatgtgaagaatgcgggaaagcgttttcccacagttccacccttgctaaacacaagcgtatccacacaggtgaaaagccctataagtgcgaagaatgtggtaaggccttttcccggtcttcaaccctggccaagcataagcgtattcacacaggtgaaaagccatataaatgcaaagaatgtggcaaagccttctctaactcttcgaccttagcaaaccataaaatcactcacacggaagaaaaaccatacaaatgcaaggagtgcgacaaggccttcaagcgactgagtaccctgacaaaacataagatcattcatgctggcgagaagctctataagtgtgaagagtgcggcaaagcattcaatcgtagctccaatctgacaattcataagtttatccacacaggtgaaaaaccctacaagtgcgaagaatgcgggaaggccttcaactggagttccagtctaactaagcacaaaaggttccacacgcgcgagaaaccattcaagtgcaaggagtgtggtaaagcctttatctggtcatctacccttacacggcacaagaggattcacactggggagaagccttacaagtgcgaagaatgcggcaaggccttcaggcagtcatccacgctcacaaagcataagatcatacacaccggagaaaaaccatataagtttgaagagtgtggtaaggccttccgccagtcattaactctcaacaaacacaaaataatccattcacgcgaaaagccttacaagtgcaaagagtgcggcaaggcttttaaacaatttagcaccctgaccacccataaaataatccacgcagggaagaagctctataaatgcgaagagtgtggcaaagccttcaatcatagcagctccctgagtacacacaaaatcatccacaccggtgaaaaatcatacaagtgtgaggaatgtggaaaagccttcctgtggagctccactttgagacgccataaacgcattcatactggcgagaaaccttacaaatgcgaggaatgtggcaaggcatttagccatagcagcgccctcgcaaaacataagagaatccacaccggcgagaagccctataagtgcaaggaatgtggcaaggcattttcaaacagtagcacactggccaaccataagattacccacaccgaggagaagccttacaagtgcaaggaatgcgataaaacgtttaagcgcttatcaactctcactaaacataagatcattcacgccggggagaagctctacaagtgtgaggagtgtggaaaagccttcaatcgcagttccaacctcaccattcacaagttcattcacacaggtgaaaagccatacaagtgtgaggagtgcggaaaagcattcaattggtcctcttcacttactaagcacaagagaatccacacgcgcgagaagccttttaaatgtaaggaatgtgggaaggcattcatttggtcatcaaccctgactaggcataagaggattcatacgggcgaaaaaccttacaaatgtgaagagtgcggtaaagcattttcgcggagttcaacactgactaagcacaaaacgatccacaccggcgaaaaaccatacaaatgcaaagagtgtggtaaagcctttaagcactcaagcgccctcgcaaagcacaagatcatacatgctggcgagaaactgtacaaatgtgaagaatgtggaaaggcctttaaccagagttccaacctgactacccataagataatccacacaaaagaaaaacctagcaagtccgaggagtgcgataaggccttcatctggtcatctacactaaccgagcacaaaaggattcacacccgtgaaaagacatacaagtgtgaggagtgtggtaaagcattctcccagccttctcatctcaccacacataaaaggatgcacacgggggaaaaaccctacaagtgcgaagagtgtggaaaggcgttctcacagagcagtaccctgaccacgcacaagattatccatacaggcgagaagccctacaagtgtgaggagtgtggaaaggcgttccggaaaagctctaccctaactgagcataaaattattcacaccggggagaaaccttacaaatgcgaagagtgtgggaaggcctttagtcagtcatctaccctgacaaggcataccaggatgcacacaggcgaaaagccctacaaatgtgaagaatgtggcaaggcgttcaaccggtcctccaaactcaccacccacaagatcatacatacaggagagaaaccatataaatgtgaggaatgtggtaaagcctttatatctagctcaactctgaatgggcacaaaagaatccacactagagaaaagccttataagtgcgaggagtgcggaaaggccttctcccaatcttcaactctgaccaggcacaagagactgcatacaggcgaaaagccgtacaagtgtggggagtgcggcaaagcattcaaggaaagtagcgcactgactaagcataagatcattcacaccggtgagaaaccctacaagtgtgaaaagtgcggtaaagccttcaatcaatccagtattctgaccaaccacaagaaaatccatacgattacccccgtcatacctctgctctgggaggcagaagcaggcgggtccagaggccaagaaatggaaaccatcttggcgaataccgttaaaccgttactttactag

SEQ ID NO: 113114 - DNA, 3480 bp, Artificial Sequence
  derived and/or modified sequence
atgcctggcaccccaggcagcctggagatgggcctgctgaccttcagagatgtggccatcgagttcagccctgaggagtggcagtgcctggacacagcccagcagaacctgtacagaaatgtgatgctggagaactacagaaacctggccttcctgggcatctgcccccacttcccccaggacttctggccagagcagagcatggaggacagcttccagaaggtgctgctgaggaaatatgagaagtgtggccacgagaacctgcagctgaggaagggctgcaagtctgtggatgagtgcaaggtgcacaaggagggctacaacaagctgaaccagtgcctgaccacagcccagagcaaggtgttccagtgtgggaagtacctgaaggtgttctacaagttcctgaacagcaacagacacaccatccgccacacaggcaagaagtgcttcaagtgcaagaagtgtgtgaagagcttctgcatccggctgcacaagacccagcacaagtgtgtgtacatcacagagaagagctgcaagtgcaaggaatgtgagaagaccttccactggagcagcaccctgaccaaccacaaggagatccacacagaggacaagccctacaagtgtgaggagtgtgggaaggccttcaagcagctgagcaccctgaccacccacaagatcatctgtgccaaggagaagatctacaagtgtgaggagtgtgggaaggccttcctgtggagcagcaccctgaccaggcacaagaggatccacactggagagaagccctacaagtgtgaggagtgtgggaaggccttcagccacagcagcaccctggccaagcacaagaggatccacactggagagaagccctacaagtgtgaggagtgtgggaaggccttcagccgcagcagcaccctggccaagcacaagaggatccacactggagagaagccctacaagtgcaaggaatgtgggaaggccttcagcaacagcagcaccctggccaaccacaagatcacccacacagaggagaagccctacaagtgcaaggaatgtgacaaggccttcaagaggctgagcaccctgaccaagcacaagatcatccatgctggggagaagctgtacaagtgtgaggagtgtgggaaggccttcaacagaagcagcaacctgaccatccacaagttcatccacactggagagaagccctacaagtgtgaggagtgtgggaaggccttcaactggagcagcagcctgaccaagcacaagcgcttccacacccgggagaagcccttcaagtgcaaggaatgtgggaaggccttcatctggagcagcaccctgaccaggcacaagaggatccacactggagagaagccctacaagtgtgaggagtgtgggaaggccttccggcagagcagcaccctgaccaagcacaagatcatccacactggagagaagccctacaagtttgaggagtgtgggaaggccttccggcagagcctgaccctgaacaagcacaagatcatccacagccgggagaagccctacaagtgcaaggaatgtgggaaggccttcaagcagttcagcaccctgaccacccacaagatcatccatgctgggaagaagctgtacaagtgtgaggagtgtgggaaggccttcaaccacagcagcagcctgagcacccacaagatcatccacactggagagaagagctacaagtgtgaggagtgtgggaaggccttcctgtggagcagcaccctgcggcggcacaagaggatccacactggagagaagccctacaagtgtgaggagtgtgggaaggccttcagccacagcagcgccctggccaagcacaagaggatccacactggagagaagccctacaagtgcaaggaatgtgggaaggccttcagcaacagcagcaccctggccaaccacaagatcacccacacagaggagaagccctacaagtgcaaggaatgtgacaagaccttcaagaggctgagcaccctgaccaagcacaagatcatccatgctggggagaagctgtacaagtgtgaggagtgtgggaaggccttcaacagaagcagcaacctgaccatccacaagttcatccacactggagagaagccctacaagtgtgaggagtgtgggaaggccttcaactggagcagcagcctgaccaagcacaagaggatccacacccgggagaagcccttcaagtgcaaggaatgtgggaaggccttcatctggagcagcaccctgaccaggcacaagaggatccacactggagagaagccctacaagtgtgaggagtgtgggaaggccttcagccgcagcagcaccctgaccaagcacaagaccatccacactggagagaagccctacaagtgcaaggaatgtgggaaggccttcaagcacagcagcgccctggccaagcacaagatcatccatgctggggagaagctgtacaagtgtgaggagtgtgggaaggccttcaaccagagcagcaacctgaccacccacaagatcatccacaccaaggagaagcccagcaagtctgaggagtgtgacaaggccttcatctggagcagcaccctgacagagcacaagaggatccacacccgggagaagacctacaagtgtgaggagtgtgggaaggccttcagccagcccagccacctgaccacccacaagaggatgcacactggagagaagccctacaagtgtgaggagtgtgggaaggccttcagccagagcagcaccctgaccacccacaagatcatccacactggagagaagccctacaagtgtgaggagtgtgggaaggccttcaggaagagcagcaccctgacagagcacaagatcatccacactggagagaagccctacaagtgtgaggagtgtgggaaggccttcagccagagcagcaccctgaccaggcacaccaggatgcacactggagagaagccctacaagtgtgaggagtgtgggaaggccttcaacagaagcagcaagctgaccacccacaagatcatccacactggagagaagccctacaagtgtgaggagtgtgggaaggccttcatcagcagcagcaccctgaatggccacaagaggatccacacccgggagaagccctacaagtgtgaggagtgtgggaaggccttcagccagagcagcaccctgaccaggcacaagaggctgcacactggagagaagccctacaagtgtggggagtgtgggaaggccttcaaggagagcagcgccctgaccaagcacaagatcatccacactggagagaagccctacaagtgtgagaagtgtgggaaggccttcaaccagagcagcatcctgaccaaccacaagaagatccacaccatcacccctgtgatccccctgctgtgggaggccgaggccggcggcagccggggccaggagatggagaccatcctggccaacacagtgaagcccctgctgtactag

SEQ ID NO: 113115 - DNA, 3480 bp, Artificial Sequence
  derived and/or modified sequence
atgcccggcacccccggcagcctggagatgggcctgctgaccttccgtgacgtcgccattgagttttcccccgaggagtggcagtgtctggatactgctcaacagaacctgtaccggaacgtcatgctcgaaaactaccgcaacctggcgttcttagggatctgtcctcactttccacaggacttttggccggaacaatctatggaggactctttccaaaaagtgctcctgcggaaatatgagaagtgtggacacgagaacttgcagcttcggaagggctgtaaatctgtggatgagtgcaaggttcacaaggagggctataataagcttaaccagtgcttgacaactgcacaaagtaaagtttttcagtgtgggaagtacctgaaggtgttctataaattcctgaactcaaatcggcacaccatcaggcatacgggaaagaaatgcttcaagtgcaagaagtgcgtgaagagtttctgtatcagactgcataagacgcaacataagtgtgtgtatatcaccgagaagtcctgcaaatgcaaggaatgcgaaaagacctttcattggtctagcacgcttaccaaccataaggagatacacaccgaggacaaaccctacaaatgcgaagagtgtggaaaagctttcaagcaattgtcaacccttactactcacaagatcatttgcgccaaggaaaagatctacaagtgtgaagaatgtggcaaagcctttctatggtcttcaacactgactcgtcataagaggattcacactggtgaaaaaccctataaatgtgaagagtgcggaaaggctttttcgcactcaagtaccctggccaagcataagagaatccacacgggcgaaaaaccttacaagtgcgaagagtgcgggaaagcgtttagcagatcaagcacgcttgcaaaacataagagaatccatacaggtgagaagccctataaatgtaaggagtgcggcaaggctttctcaaattctagcacactggctaatcacaagatcactcacactgaagaaaaaccctacaagtgtaaagagtgcgacaaagcttttaaacgcctttcaacactcacaaaacataaaattatccacgcaggtgaaaaactgtacaaatgcgaggaatgcggaaaggcttttaacaggtcatctaacctgacaattcacaaattcattcatactggggagaagccttacaaatgtgaagagtgcgggaaagccttcaactggtcttctagcttaaccaaacacaagcgtttccacacccgagaaaaaccatttaagtgcaaagagtgcggaaaggcctttatatggtcttcgactctcaccagacacaaacgcatacacaccggcgaaaaaccctacaaatgcgaagaatgcgggaaggcattccggcagagttccactctgactaaacataaaataattcacactggggagaaaccttataagttcgaggaatgcggcaaagcctttcgccagagcttaaccctgaacaagcataagatcattcatagtagggaaaaaccttataagtgcaaagaatgcggaaaagccttcaagcagttttcaacgctgacaacgcacaagatcattcacgcaggcaaaaaattgtacaagtgcgaagagtgcggcaaagcgttcaaccactcaagctccctctctacgcacaaaatcattcacactggagagaagtcatacaaatgcgaggaatgcgggaaggccttcctctggtcaagcacgctgcgcagacataagagaatccatacgggggagaaaccatacaagtgcgaagaatgtggtaaagcatttagtcactccagtgccctagccaagcataagcgcattcataccggcgaaaagccttacaagtgcaaggagtgtggcaaagctttctcgaacagctcaactctggccaaccacaagattacacacaccgaagaaaaaccttacaaatgcaaggagtgtgataagaccttcaaacgccttagtaccctgacgaagcataagattatccatgccggggaaaaactgtacaagtgcgaagagtgcggcaaagcattcaaccggagcagtaatctcaccatccataagttcatccataccggggagaaaccatataagtgcgaagagtgcggcaaagcttttaattggtccagcagcttgactaagcacaagagaattcacaccagagaaaagccttttaagtgtaaagaatgcggcaaagccttcatctggtctagcacgctcacaaggcacaagcggattcacactggcgaaaagccttacaagtgcgaggaatgtggcaaagccttttccaggagtagtacactcaccaagcacaaaaccatccatacaggtgagaaaccttacaaatgtaaggaatgtggcaaggctttcaaacatagctcggctttagctaaacacaagatcattcatgctggtgagaagttatataagtgtgaggaatgtggcaaagccttcaaccagtcctctaacctgacaacccacaaaattatacacactaaggaaaagccgtctaaatccgaggaatgcgacaaggccttcatttggtcctccacacttacggagcataaacgtatccatacgagggaaaaaacatataagtgcgaggagtgcgggaaggccttttctcagccaagccacctgaccactcacaaacgaatgcacaccggagaaaagccatataagtgcgaagagtgtggtaaggccttctcccagagctcgactctgaccacgcataaaattatacacactggtgaaaagccttacaaatgtgaagagtgcggtaaagctttccggaagagtagcaccctcaccgagcacaagatcatacatactggcgaaaagccatacaagtgcgaagaatgtgggaaagccttcagtcagtcgtctacgctgacaagacatacacgcatgcacactggagagaagccttataaatgtgaagagtgcggtaaggcatttaaccgatcgtcgaagttgaccacgcacaaaatcatccacaccggggagaagccgtataaatgtgaagaatgtggtaaagccttcatttcgtcttccactctcaacggccataagagaattcacactagagagaaaccgtataaatgtgaagagtgtggaaaagcattctcacagtcctctaccctgaccaggcacaaaaggctccatacaggcgaaaaaccctataagtgtggggagtgcggaaaagcattcaaggagtcctcagcacttactaaacacaaaatcatccacacgggagagaaaccgtacaaatgcgagaaatgcggcaaggctttcaatcagagctcgatcttaaccaaccacaaaaagatccacaccatcactcctgttatcccactcctctgggaagccgaagctgggggaagccgcggccaagaaatggaaaccatcctggctaatactgttaagcctctgctgtactag

SEQ ID NO: 113116 - DNA, 3480 bp, Artificial Sequence
  derived and/or modified sequence
atgccaggaactccaggtagcctggaaatggggctgttaacgttccgcgatgtggccatagaattcagtccagaggagtggcagtgccttgacaccgcccagcaaaatctttatcggaacgtaatgctggagaattatcgcaatttagcattcctcgggatttgtccccatttcccccaagacttttggccggagcaatccatggaagacagctttcaaaaggtccttctgagaaagtacgaaaaatgtgggcatgaaaatcttcaacttcgtaagggctgtaagtccgttgacgaatgcaaggtgcacaaggagggatataacaaactgaaccagtgcttgactaccgctcaaagcaaagtcttccagtgcggtaagtatctaaaggttttctacaaatttttaaactctaacagacatacaatacgccacaccggtaagaagtgcttcaagtgcaaaaaatgcgtcaaatctttttgcatcaggctgcataaaacccagcataagtgtgtgtacatcacagaaaaatcctgtaagtgcaaggagtgcgagaagacatttcactggtcaagcacactcacaaatcacaaagagattcatactgaggataagccttacaagtgtgaagagtgcgggaaggccttcaaacagctatctacccttaccacacataaaatcatttgcgcgaaggagaagatttacaaatgtgaagagtgtggaaaggccttcttgtggtcaagcacccttactcggcacaaaaggatccacaccggggaaaagccctataaatgcgaagaatgcggaaaagctttctcccactcgagcaccttagcgaagcataagcggatccacacgggcgagaaaccttacaagtgtgaagagtgcgggaaggcattcagtagatcaagcacacttgcgaagcacaagaggattcacacaggggaaaaaccctacaagtgcaaggaatgtggaaaggctttctccaactcatccacgctcgccaatcataagatcacacacacagaggagaagccctacaagtgcaaagagtgcgataaggcatttaaacggttgagcacgctgacaaagcataagatcattcatgccggtgagaagctatacaaatgtgaagagtgtggcaaggcatttaaccgtagtagcaatctaacaattcacaagtttatacacacaggtgaaaagccatacaagtgtgaagaatgtggcaaagcattcaattggtccagcagcctcactaagcacaaacggttccatactcgcgagaagccgttcaaatgtaaggagtgtggaaaggcttttatctggtcatccacactgaccagacacaaacgaattcacaccggcgagaagccgtacaagtgtgaagagtgcggaaaagcattccgacaaagctctacactgacaaaacacaaaatcatccacactggcgaaaagccctacaaatttgaggagtgcgggaaggcttttaggcagtctctgacattgaataagcacaagatcatccactccagagagaaaccctataaatgcaaggaatgcgggaaggcctttaagcagttcagcactctgaccacccacaaaatcattcacgcgggaaaaaaactgtacaagtgcgaggaatgtgggaaagcctttaatcactcctctagcctgagcacacacaaaatcatccataccggagagaagagctataaatgcgaggagtgcggcaaggctttcctgtggtcctcaacactgaggcgccataaacgtattcatactggcgagaaaccatacaaatgcgaggaatgtggaaaagctttcagtcatagctccgccctggccaagcacaaacgaatccacaccggggaaaagccctataagtgcaaggaatgcggcaaagcttttagtaacagctcaacactggccaatcataaaattactcacacagaggaaaagccatataagtgtaaggagtgtgataaaacatttaaaaggctcagcacccttacaaagcacaaaataatccacgctggtgaaaaactatataagtgtgaggagtgcggaaaggccttcaatagatccagtaatctcaccatccacaaatttatacatacaggcgaaaagccttataaatgcgaggagtgcggcaaagcattcaactggagcagctcactgaccaagcacaagcgaattcacacacgcgagaagcctttcaaatgcaaagagtgcggaaaagcctttatatggtcaagcaccttaacaagacataaaaggattcataccggagaaaagccctacaagtgtgaggagtgtggtaaggctttcagccggagctcgactctgaccaaacataagacgatccacacaggcgaaaagccatataaatgtaaggagtgtggaaaggcctttaaacattcatccgctctcgctaaacataaaattatacacgccggagagaaactctacaagtgcgaagaatgtggcaaagcgttcaatcaatcctccaatttgaccacacacaaaattatccatactaaagagaagccaagcaaaagcgaagaatgtgacaaagccttcatttggtctagcacccttacggaacacaaaaggatccatacacgcgagaagacgtacaagtgtgaggagtgcgggaaggcattcagccagccaagccaccttaccacacataagaggatgcacactggcgaaaaaccatacaagtgcgaagaatgcggcaaggctttctctcagtcaagcacacttactactcacaaaatcatccacactggggagaagccctataagtgcgaggagtgtggcaaggcgttccggaaatcgtccacattaacagagcacaaaattattcatactggggagaagccttataagtgtgaggagtgcgggaaagctttcagtcagtcctctactttaaccaggcacactagaatgcacaccggcgaaaagccatacaaatgcgaggaatgtggcaaggcttttaacagaagtagcaaattgacgacccacaaaattatccatacaggagaaaaaccttataaatgcgaagagtgtggaaaggcctttattagttctagtactctgaacgggcataaaaggatccacacaagggaaaaaccttacaaatgtgaggagtgcgggaaagcattttcacagtcttcgactcttaccagacacaagaggctgcacacaggagagaagccctacaaatgcggcgagtgtggaaaggctttcaaggaatctagcgcgctgaccaaacacaagattatccacactggcgaaaaaccatacaaatgtgaaaaatgcggcaaggcctttaatcagtccagtatcctcacaaaccacaagaaaatccacaccattacacccgtgattccgctcctctgggaggccgaagctgggggatcgcgagggcaggaaatggaaactatcttggctaacactgtcaagcctcttctttattag

SEQ ID NO: 113117 - DNA, 3572 bp, Artificial Sequence
  derived and/or modified sequence
aggtctcgacttcactgctctgtgtcctctgctccaggaggcccagcctgtgtggccctgtgacctgcaggtattggagagccacagctaagatgccaggaacccctggaagcctagaaatgggactgttgacatttagggatgtggccatagaattctctccggaggagtggcaatgtctggacactgcacagcagaatttatataggaatgtgatgttagagaactacagaaacctggccttcctgggtatatgtcctcattttcctcaagacttttggccagagcagagcatggaagattcttttcaaaaagtattactgagaaaatatgaaaaatgtggacatgagaatttacagttaagaaaaggttgtaaaagtgtggatgagtgtaaggtgcacaaagaaggttataataaacttaaccagtgtctcacaactgcccagagcaaagtatttcaatgtgggaaatatttgaaagtcttctataaatttttaaattcaaacagacatacgataagacatactggaaagaaatgcttcaaatgtaaaaaatgtgtcaagtcattttgcatccgtttacacaaaacccaacataaatgcgtttatattacagagaagtcctgtaaatgtaaagaatgtgaaaaaacctttcattggtcctcaacccttactaatcataaggaaattcatactgaagataaaccctacaaatgtgaagaatgtggcaaagcttttaagcagctctcaacccttactacacataaaataatctgtgctaaagagaaaatctacaagtgtgaagaatgtggcaaagcatttctatggtcctcaaccctaactagacataagaggatacacactggagagaaaccctacaaatgtgaagaatgtggcaaagcttttagccattcttcaacccttgctaaacataagagaattcatactggagagaaaccctacaaatgtgaagaatgtggcaaagcttttagccgttcttcaacccttgctaaacataagagaattcatactggagagaaaccctacaaatgtaaagaatgtggcaaagcttttagcaattcctcaacccttgctaatcataagataactcatactgaagagaaaccctacaaatgtaaagaatgtgacaaagcttttaagcgactctcaacccttactaaacataaaataatacatgctggagagaaactctacaaatgtgaagaatgtggcaaagcttttaatcgatcttcaaatcttactatacataagtttattcatactggagagaaaccttacaagtgtgaagaatgtggcaaagcatttaactggtcctcaagccttactaaacataaaagatttcatactagagagaaacccttcaaatgtaaagaatgtggcaaagcatttatatggtcttcaaccctaactagacataagaggatacacactggagagaagccctacaaatgtgaagaatgtggcaaagcttttaggcaatcctcaacccttactaaacataagataattcatactggagagaaaccctacaaatttgaagaatgtggcaaagcttttagacaatccttaacccttaataaacataagataattcatagtagagagaaaccctacaaatgtaaagaatgtggcaaagcttttaagcaattctcaacccttactacacataaaataattcatgctggaaagaaactctacaaatgtgaagaatgtggcaaagcttttaatcattcctcaagtctttctacacataagataattcatactggagagaagtcttacaagtgtgaagaatgtggcaaagcatttctatggtcctcaaccctaagaagacataagaggatacacactggagagaaaccctacaaatgtgaagaatgtggcaaagcttttagccattcttcagcccttgctaaacataagagaattcatactggagagaaaccctacaaatgtaaagaatgtggcaaagcttttagcaattcctcaacccttgctaatcataagataactcatactgaagagaaaccctacaaatgtaaagaatgtgacaaaacttttaagcgactctcaacccttactaaacataaaataatacatgctggagagaaactctacaaatgtgaagaatgtggcaaagcttttaatcgatcttcaaatcttactatacataagtttattcatactggagagaaaccttacaagtgtgaagaatgtggcaaagcatttaactggtcctcaagccttactaaacataaaagaattcatactagagagaaacccttcaaatgtaaagaatgtggcaaagcatttatatggtcttcaaccctaactagacataagaggatacacactggagagaagccctacaaatgtgaagaatgtggcaaagcttttagccgttcctcaacccttactaagcataagacaattcatactggagagaaaccctacaaatgtaaagaatgtggcaaagcttttaagcactcctcagcccttgctaaacataaaataatacatgctggagagaaactctacaaatgtgaggaatgtggcaaagcttttaatcaatcttcaaatcttacgacacataagataattcatactaaagagaaaccttccaagagtgaagaatgtgacaaagcatttatctggtcctcaacccttactgaacataagagaattcataccagagagaaaacctacaaatgtgaagaatgtggcaaagcatttagccagccttcacaccttactacacataagaggatgcacactggagagaaaccctacaaatgtgaagaatgtggcaaagcttttagccaatcctcaacccttactacacataagataattcatactggagagaaaccctacaaatgtgaagaatgtggcaaagcttttaggaaatcttcaactcttactgaacataagataattcatactggagagaaaccctacaaatgtgaagaatgtggcaaagcatttagccaatcctcaaccctaactagacatacgaggatgcacactggagagaaaccatacaaatgtgaagaatgtggcaaagcttttaatcgatcctcaaagcttactacacataagataattcatactggagagaaaccttacaagtgtgaagaatgtggcaaagcatttatatcatcctcaaccctaaatggacataagagaattcatactagagagaaaccctacaaatgtgaagaatgtggcaaagcatttagccaatcttcaaccctaactagacataagaggttgcacaccggagagaaaccctacaaatgtggagaatgtggcaaagcctttaaagagtcctcagctcttactaaacataagataattcacactggagagaaaccctacaaatgtgaaaaatgtggcaaagcctttaaccagtcttcaatccttactaaccataagaaaattcatactatcacacctgtaatcccactactttgggaggccgaggcgggcggatcacgaggtcaggagatggagaccatcctggctaacacagtgaaaccccttctctactaa

SEQ ID NO: 113118 - protein, 703 aa, Artificial Sequence
  derived and/or modified sequence
RKDQNVLSPVNCWNLLLNQVKRESRDHTTLSDIYLNNIIPRFVQVSEDSGRLFKKSKEVGQQLQDDLMKVLNELYSVMKTYHMYNADSISAQSKLKEAEKQEEKQIGKSVKQEDRQTPRSPDSTANVRIEEKHVRRSSVKKIEKMKEKRQAKYTENKLKAIKARNEYLLALEATNASVFKYYIHDLSDLIDCCDLGYHASLNRALRTFLSAELNLEQSKHEGLDAIENAVENLDATSDKQRLMEMYNNVFCPPMKFEFQPHMGDMASQLCAQQPVQSELVQRCQQLQSRLSTLKIENEEVKKTMEATLQTIQDIVTVEDFDVSDCFQYSNSMESVKSTVSETFMSKPSIAKRRANQQETEQFYFTKMKEYLEGRNLITKLQAKHDLLQKTLGESQRTDCSLARRSSTVRKQDSSQAIPLVVESCIRFISRHGLQHEGIFRVSGSQVEVNDIKNAFERGEDPLAGDQNDHDMDSIAGVLKLYFRGLEHPLFPKDIFHDLMACVTMDNLQERALHIRKVLLVLPKTTLIIMRYLFAFLNHLSQFSEENMMDPYNLAICFGPSLMSVPEGHDQVSCQAHVNELIKTIIIQHENIFPSPRELEGPVYSRGGSMEDYCDSPHGETTSVEDSTQDVTAEHHTSDDECEPIEAIAKFDYVGRTARELSFKKGASLLLYQRASDDWWEGRHNGIDGLIPHQYIVVQDTLIS

SEQ ID NO: 113119 - DNA, 2112 bp, Artificial Sequence
  derived and/or modified sequence
cgcaaagatcaaaatgttctttcccctgtgaactgttggaatctgttgcttaaccaagtgaaacgcgaatcaagggaccacacaactctttcagacatctatcttaacaacattattcctcggtttgtgcaggtatcggaagactcaggccgcctgttcaagaagagcaaagaagttggacaacagttgcaggacgatttgatgaaagtgctcaatgagttgtactcagttatgaaaacctatcacatgtacaatgctgacagcatttccgcacagtcaaagctaaaggaggctgagaagcaagaggagaagcagatcgggaagagcgtgaaacaggaggaccgacagactccgcggtcacccgactctacagcaaatgtgcggatcgaagagaagcatgttaggaggtcatccgtgaagaagattgaaaagatgaaagagaagcgccaggcaaaatataccgaaaacaagctgaaagccatcaaggctcgcaacgagtatctgctcgctctcgaagccacaaatgcttcagtttttaagtactatatccacgatctgagtgacctgatcgactgttgtgatctgggctatcacgccagcctgaatcgcgccctaaggacattcctgtcagccgaactcaacctggagcaatctaaacacgagggcttagatgcgattgagaacgcggtggaaaacctagatgctacaagcgacaaacagcgcctcatggagatgtataataacgtgttttgccctccgatgaagtttgaattccagccccatatgggcgacatggcctcacagctctgcgcccaacagcctgtccagtccgagctggtgcagcgctgccaacagctccagtcaagactcagcacccttaagatcgagaatgaggaagtaaagaagacaatggaagcgaccctccagacgatacaggatatagtgaccgtggaggatttcgacgtgtctgattgttttcagtactcaaactctatggagtccgttaagtccaccgtctccgaaacatttatgtccaaaccttcaattgccaagcgacgcgccaaccaacaagagaccgagcagttttacttcactaaaatgaaggagtatctggagggcagaaatttgatcaccaaactccaggctaagcacgacttgcttcaaaagacactaggcgaaagccagcggacagattgctccctggcccgcagaagcagcaccgtccgaaagcaagactcgtcacaagcaatcccacttgtggtcgagagttgtattaggtttatttcccgccatggactgcagcacgagggcattttccgggtatctggaagccaggtcgaggtgaacgatattaagaacgcttttgaaaggggtgaggatcctctagctggcgaccagaatgatcacgatatggatagtatcgcaggagtcttgaagctgtactttcgcggcctcgagcacccgctattccctaaggacatatttcacgatctaatggcctgcgtaacgatggacaatctgcaggaaagagcactgcacatacggaaagtgctgctggttctaccaaaaacaacactgataatcatgcgctatctgtttgctttcctgaatcatctgtcccagttttctgaagaaaatatgatggacccttacaacttggctatttgttttggcccatccctcatgtcagtgcctgaaggtcatgaccaggtgtcttgtcaagcccatgtgaacgagctgattaaaaccattattatccagcacgaaaatatcttcccctcccctagagagttagagggtcccgtgtatagcagaggcggtagtatggaagactattgcgattcacctcacggcgaaactacctcagtcgaggactccacccaggatgtcacagctgaacatcacacatccgatgatgaatgcgagccaatcgaggctatcgctaaatttgattacgtaggtcgcaccgccagagagttaagcttcaaaaaaggtgccagcttgctcctatatcagagggccagtgacgactggtgggagggccgtcacaatggcattgacgggctcatccctcatcagtatattgtcgtgcaagacacactcatctcatag

SEQ ID NO: 113120 - DNA, 2112 bp, Artificial Sequence
  derived and/or modified sequence
aggaaggaccagaatgtgctgagccctgtgaactgctggaacctgctgctgaaccaggtgaagcgggagagccgggaccacaccaccctgagtgacatctacctgaacaacatcatccccaggtttgtgcaggtgtctgaagattctggccgcctcttcaagaagagcaaggaggtgggccagcagctgcaggatgacctgatgaaggtgctgaatgagctgtacagcgtgatgaagacctaccacatgtacaatgctgacagcatcagcgcccagagcaagctgaaggaggccgagaagcaggaggagaagcagatcggcaagtctgtgaagcaggaggaccggcagacccccaggagcccagacagcacagccaacgtgagaattgaggagaagcacgtgagaagaagctctgtgaagaagattgagaagatgaaggagaagaggcaggccaagtacacagagaacaagctgaaggccatcaaggccagaaatgagtacctgctggccctggaggccaccaatgcctctgtgttcaagtactacatccatgacctgagtgacctgattgactgctgtgacctgggctaccacgccagcctgaacagagccctgcggaccttcctgtctgctgagctgaacctggagcagagcaagcatgagggcctggatgccattgaaaatgctgtggagaacctggatgccaccagtgacaagcagaggctgatggagatgtacaacaacgtgttctgcccccccatgaagtttgagttccagccccacatgggagacatggccagccagctgtgtgcccagcagcctgtgcagagcgagctggtgcagcgctgccagcagctgcagagccggctgagcaccctgaagattgaaaatgaggaggtgaagaagaccatggaggccaccctgcagaccatccaggacatcgtgacagtggaggactttgatgtgtctgactgcttccagtacagcaacagcatggagagcgtgaagagcacagtgtctgagaccttcatgagcaagcccagcatcgccaagaggcgggccaaccagcaggagacagagcagttctacttcaccaagatgaaggagtacctggagggcaggaacctgatcaccaagctgcaggccaagcatgacctgctgcagaagaccctgggggagagccagaggacagactgcagcctggcccggcgcagcagcacagtgaggaagcaggacagcagccaggccatccccctggtggtggagagctgcatccgcttcatcagcagacatggcctgcagcacgagggcatcttccgggtgtctggcagccaggtggaggtgaatgacatcaagaatgcctttgaaagaggagaggaccccctggccggggaccagaatgaccatgacatggacagcattgctggggtgctgaagctgtacttccggggcctggagcaccccctcttccccaaggacatcttccatgacctgatggcctgtgtgaccatggacaacctgcaggagcgggccctgcacatcaggaaggtgctgctggtgctgcccaagaccaccctcatcatcatgagatacctgtttgccttcctgaaccacctgagccagttcagcgaggagaacatgatggacccctacaacctggccatctgcttcggccccagcctgatgtctgtgcctgagggccatgaccaggtgtcctgccaggcccacgtgaatgagctgatcaagaccatcatcatccagcacgagaacatcttccccagcccccgggagctggagggccctgtgtacagccggggcggctccatggaggactactgtgacagcccccatggagagaccacctctgtggaggacagcacccaggatgtgacagctgagcaccacaccagtgatgatgaatgtgagcccatcgaggccatcgccaagtttgattatgtgggccgcacagcccgggagctgtccttcaagaagggggccagcctgctgctgtaccagagggccagtgatgactggtgggagggccgccacaacggcattgatggcctcatcccccaccagtacatcgtggtgcaggacaccctcatctcctag

SEQ ID NO: 113121 - DNA, 2112 bp, Artificial Sequence
  derived and/or modified sequence
cggaaggaccagaacgtgctgagccccgtgaactgctggaacctgctccttaaccaagtcaagagggagtcaagagaccacacgactctcagcgacatctatctgaacaacattatcccgaggttcgtccaggtatccgaagattctggacgcttgtttaaaaagagtaaggaagtcggacagcagctccaagacgatcttatgaaagttctgaacgagctttatagcgtaatgaagacgtatcacatgtacaacgccgatagcatctccgcccagagtaaactgaaggaggctgaaaagcaggaggaaaagcagataggaaagagtgtgaagcaggaggacagacagactccaaggtccccagactccacggccaatgttcggatcgaggagaagcacgtcaggcgctcttcagtcaagaaaattgaaaaaatgaaagagaaacggcaggccaaatacactgagaacaagttaaaagccattaaagcccggaatgagtacctgctagcgcttgaggctacaaatgcatcagtctttaaatactacatacacgacctgtctgacctgattgactgctgtgatctggggtatcatgcaagtctgaatcgagctcttagaacatttctctcggctgaactgaacttagagcagtctaaacatgagggacttgatgcaatcgaaaacgccgttgagaacctcgacgctaccagtgacaagcaacgacttatggagatgtataataacgttttttgccctcctatgaagtttgagtttcagccacatatgggggatatggcctcccagctctgtgcccaacaacccgttcaatctgagctcgtgcagcgctgtcagcagttgcagtctagactgtccacactcaagattgaaaacgaggaagtcaaaaagacaatggaggcgacgctgcagacaattcaggacattgttacagtggaggacttcgatgtctctgattgtttccagtattctaatagcatggagtctgtaaagagcaccgtgtccgaaacctttatgtcgaagccttcaatcgccaagaggcgggccaaccagcaggagacagaacagttttactttactaaaatgaaggaatacctcgaaggccgaaacctgattacaaaattacaggccaaacacgacctgttacagaagactctgggcgagagccagcgaacagattgttctctggcccgcagatcttcaaccgtgcgcaagcaggactcctcccaggcgatccctctcgtcgtggagtcctgtattcgcttcatcagtaggcacggcctacagcacgaggggattttccgcgtgtctgggtcccaagtggaagtcaacgacatcaagaacgccttcgagagaggagaagaccctttggctggggatcagaatgaccacgacatggactccatcgctggcgtgttaaaactttacttccgcggactcgagcaccctctctttcctaaagacatttttcatgacctcatggcgtgtgtgactatggacaatctccaagagagggctctacacatccggaaggtactcctggttctgcctaagacaaccctgattattatgcgatatctgttcgcctttcttaaccacctttctcaattttcagaggagaacatgatggacccctacaacttagccatttgtttcgggccatctctgatgagtgtgcccgaaggacatgatcaagtttcctgccaggcccatgtcaatgagctcatcaagaccatcatcattcagcatgagaatattttccccagcccccgcgaactcgagggccccgtgtattcacggggagggtcaatggaggactactgcgacagcccccatggagaaacaactagcgttgaagatagcactcaggacgtgacagccgagcatcatacctccgatgatgaatgtgagcctatcgaggcaatcgccaaattcgattacgtgggccgtaccgcgagagagctgagttttaaaaagggcgcttctttgttactttatcagagggcctcagacgattggtgggagggccggcacaatgggatcgatgggttgatcccccaccagtacatcgtggttcaagatacccttataagctag

SEQ ID NO: 113122 - DNA, 2112 bp, Artificial Sequence
  derived and/or modified sequence
agaaaggaccagaacgtgctgagccccgtcaactgttggaatctgttactgaatcaggtgaagcgagagtcgcgcgatcatacaaccttgagcgatatttacttaaataacatcataccgagattcgtccaggttagcgaagattccggcaggctcttcaaaaaaagtaaagaggtgggtcaacagcttcaagatgacttgatgaaagtactgaacgaactgtatagtgtcatgaaaacctaccacatgtataacgccgattcaattagcgcacagtcgaagctcaaggaagctgaaaagcaggaggaaaaacagataggtaaatcggtgaaacaggaggatagacaaacccccagaagcccagacagcaccgctaacgtccggattgaagaaaagcacgtgcgcaggtcttccgtcaaaaagatagaaaagatgaaagagaagagacaggctaagtacaccgagaacaaattgaaagcaatcaaagcacgcaatgagtacctgcttgcactcgaggccacaaacgcttccgtatttaaatattatatccatgaccttagtgatttaatcgattgttgtgatctgggataccatgcctccctcaatagagctctccggacattcctttctgctgaattgaatctggaacagtctaaacacgagggcctcgacgctattgaaaacgctgtcgagaacctggatgctaccagtgataagcagcgcctcatggaaatgtataacaacgtgttctgtccccctatgaagttcgagttccagccacacatgggggatatggcaagccagctgtgtgctcagcaacctgtgcaatcagagctggttcagaggtgtcagcaactgcagagcagattgagtacgctaaagatcgagaacgaggaagtcaagaaaacaatggaagctactcttcagactattcaggatatcgttactgttgaggactttgatgtaagcgattgttttcagtactcaaattccatggagtccgtcaagtctacagtttcagagacctttatgtccaagccgagcattgccaaacgtcgcgctaaccagcaagagaccgaacagttttacttcactaaaatgaaagaatacctcgagggcagaaatttgatcacaaaactgcaggccaaacacgacctattgcaaaaaaccctgggagagtctcagcgcacagactgttccctggcacgaaggtccagcaccgtgaggaagcaggactcaagccaggctatcccactggtagtggagagttgtatcagattcatctccaggcatggcctgcagcatgagggaatcttcagagtgtcggggtcgcaggtcgaggtcaatgatatcaagaacgcattcgagagaggagaagaccctttggctggggatcagaatgatcatgatatggactccatcgccggagtgcttaagctttatttccgcggactggaacaccctctgtttccaaaggatattttccacgaccttatggcctgcgtgacaatggataacctacaagaacgagccctccatataagaaaggtactgcttgtcctcccaaagaccacactcattataatgcgatacctgttcgcattcttaaaccacctgtcacagttcagtgaggaaaacatgatggatccttacaacttggccatctgctttggcccatctctgatgagtgtgcctgaaggacacgatcaggtatcttgccaggcgcacgttaatgagcttatcaagactattattatccaacatgaaaatatcttccccagtcctcgggaactggaggggccagtttacagccgtggaggtagcatggaggactactgtgacagcccccatggtgagacaacatcagtggaggatagcacccaggatgtgactgcagaacatcataccagcgatgatgagtgcgagcccatcgaagctattgccaagtttgattacgtggggaggacagccagggaactatcctttaaaaaaggggcaagtttattgttataccagagagcatcagacgactggtgggaagggagacataacggtatagatggactgatcccccatcaatacattgtggtccaggataccctgataagctag

SEQ ID NO: 113123 - DNA, 2484 bp, Artificial Sequence
  derived and/or modified sequence
aggaaggatcagaatgttctctctccagtcaactgctggaatctcctcttaaaccaggtgaagcgggaaagcagggaccataccaccctgagtgacatctacctgaataatatcattcctcgatttgtacaagtcagcgaggactcaggaagactctttaaaaagagtaaagaagtcggccagcagctccaagatgatttgatgaaggtcctgaacgagctctactcggtgatgaagacatatcacatgtacaatgccgacagcatcagtgctcagagcaaactaaaggaggcggagaagcaggaggagaagcaaattggtaaatcggtaaagcaggaggaccggcagaccccacgctcccctgactccacggccaacgttcgcattgaggagaaacatgtccggaggagctcagtgaagaagattgagaagatgaaggagaagcgtcaagccaagtacacggagaataagctgaaggccatcaaagcccggaatgagtacttgctggctttggaggcaaccaatgcatctgtcttcaagtactacatccatgacctatctgaccttattgattgttgtgacttaggctaccatgcaagtctgaaccgggctctacgcaccttcctctctgctgagttaaacctggaacagtcgaagcatgagggtctggatgccatcgagaatgcagtagaaaacctggatgccaccagtgacaagcagcgcctcatggagatgtacaacaacgtcttctgcccccctatgaagtttgagtttcagccccacatgggggatatggcttcccagctctgtgcccagcagcctgtccagagtgagctggtacagagatgccaacaactgcagtctcgcttatccactctaaagattgaaaacgaagaggtaaagaagacaatggaggccaccctgcaaaccatccaggacattgtgactgtcgaggactttgatgtgtctgactgcttccagtacagcaactccatggagtccgtcaagtccacggtctctgaaaccttcatgagcaagcccagcattgctaagaggagagccaaccagcaagagacagagcagttttatttcacaaaaatgaaagagtacctggagggcaggaacctcatcaccaagttacaagccaagcatgaccttctgcagaaaaccctgggagaaagtcagcggacagattgcagtctagccaggcgcagctcaactgtgaggaaacaggactccagccaggcaattcctctggtggtggaaagctgtatccggtttatcagcagacacggactacagcatgaaggaattttccgggtgtcaggatcccaggtggaagtgaatgacatcaaaaatgcctttgagagaggagaggaccccctggctggggaccagaacgaccatgacatggattccatagctggtgtcctgaagctttacttccgggggctggaacaccctctcttccccaaggacatctttcatgacctgatggcctgcgtcacaatggacaacctgcaggagagagctctgcacatccggaaagtcctcctagtcctgcccaaaaccactctgattatcatgagatacctctttgccttcctcaatcatttatcacagttcagtgaagagaacatgatggacccctacaacctcgccatctgcttcgggccctcgctaatgtcagtgccagagggccacgaccaggtgtcctgccaagcccacgtgaatgagctgatcaaaaccatcatcatccagcatgagaacatcttcccaagccccagggagctggagggccctgtctacagcagaggaggaagcatggaggattactgtgatagccctcatggagagactacctcggttgaagactcaacccaggatgtgaccgcagagcaccacacgagcgatgacgaatgtgagcccatcgaggccattgccaagtttgactacgtgggccggacagcccgagagctgtcctttaagaagggagcatccctgctgctttaccagcgggcttccgacgactggtgggaaggccggcacaatggcatcgacggactcatcccccatcagtacatcgtggtccaagacacgttgatatcctgagtgagtctgcaccctcccagcctcttcccggctcgttctgcagggaaatcctccctctgttgatagcatcgcaaacctggtggcaatctgtgcgtggacaggaccctcccaaatttagcattatgacttcaccacaggatcaagagaagatgaattgtgggggagaaggggctttctttgtcatcagtagccagaggggccaggagagcagtggagagacctgggaccggcttggatgctctgagcggggctagaggcgctacgacagtgtgtggcggtgtcctgccacgacgccgccgtctccagagccaccacacagttgactgtccttacccggcagtgctcaggacctcagccgataaaccacaacct

SEQ ID NO: 113124 - DNA, 2112 bp, Artificial Sequence
  derived and/or modified sequence
agaaaggaccagaacgtgctgagccccgtgaactgctggaacctgctgctgaaccaggtgaagagagagagcagagaccacaccaccctgagcgacatctacctgaacaacatcatccccagattcgtgcaggtgagcgaggacagcggcagactgttcaagaagagcaaggaggtgggccagcagctgcaggacgacctgatgaaggtgctgaacgagctgtacagcgtgatgaagacctaccacatgtacaacgccgacagcatcagcgcccagagcaagctgaaggaggccgagaagcaggaggagaagcagatcggcaagagcgtgaagcaggaggacagacagacccccagaagccccgacagcaccgccaacgtgagaatcgaggagaagcacgtgagaagaagcagcgtgaagaagatcgagaagatgaaggagaagagacaggccaagtacaccgagaacaagctgaaggccatcaaggccagaaacgagtacctgctggccctggaggccaccaacgccagcgtgttcaagtactacatccacgacctgagcgacctgatcgactgctgcgacctgggctaccacgccagcctgaacagagccctgagaaccttcctgagcgccgagctgaacctggagcagagcaagcacgagggcctggacgccatcgagaacgccgtggagaacctggacgccaccagcgacaagcagagactgatggagatgtacaacaacgtgttctgcccccccatgaagttcgagttccagccccacatgggcgacatggccagccagctgtgcgcccagcagcccgtgcagagcgagctggtgcagagatgccagcagctgcagagcagactgagcaccctgaagatcgagaacgaggaggtgaagaagaccatggaggccaccctgcagaccatccaggacatcgtgaccgtggaggacttcgacgtgagcgactgcttccagtacagcaacagcatggagagcgtgaagagcaccgtgagcgagaccttcatgagcaagcccagcatcgccaagagaagagccaaccagcaggagaccgagcagttctacttcaccaagatgaaggagtacctggagggcagaaacctgatcaccaagctgcaggccaagcacgacctgctgcagaagaccctgggcgagagccagagaaccgactgcagcctggccagaagaagcagcaccgtgagaaagcaggacagcagccaggccatccccctggtggtggagagctgcatcagattcatcagcagacacggcctgcagcacgagggcatcttcagagtgagcggcagccaggtggaggtgaacgacatcaagaacgccttcgagagaggcgaggaccccctggccggcgaccagaacgaccacgacatggacagcatcgccggcgtgctgaagctgtacttcagaggcctggagcaccccctgttccccaaggacatcttccacgacctgatggcctgcgtgaccatggacaacctgcaggagagagccctgcacatcagaaaggtgctgctggtgctgcccaagaccaccctgatcatcatgagatacctgttcgccttcctgaaccacctgagccagttcagcgaggagaacatgatggacccctacaacctggccatctgcttcggccccagcctgatgagcgtgcccgagggccacgaccaggtgagctgccaggcccacgtgaacgagctgatcaagaccatcatcatccagcacgagaacatcttccccagccccagagagctggagggccccgtgtacagcagaggcggcagcatggaggactactgcgacagcccccacggcgagaccaccagcgtggaggacagcacccaggacgtgaccgccgagcaccacaccagcgacgacgagtgcgagcccatcgaggccatcgccaagttcgactacgtgggcagaaccgccagagagctgagcttcaagaagggcgccagcctgctgctgtaccagagagccagcgacgactggtgggagggcagacacaacggcatcgacggcctgatcccccaccagtacatcgtggtgcaggacaccctgatcagctag

SEQ ID NO: 113125 - protein, 230 aa, Artificial Sequence
  derived and/or modified sequence
MAPAADREGYWGPTTSTLDWCEENYSVTWYIAEFLVGMGSWCFHMTLKYEMQLLDELPMIYSCCIFVYCMFECFKIKNSVNYHLLFTLVLFSLIVTTVYLKVKEPIFHQVMYGMLVFTLVLRSIYIVTWVYPWLRGLGYTSLGIFLLGFLFWNIDNIFCESLRNFRKKVPPIIGITTQFHAWWHILTGLGSYLHILFSLYTRTLYLRYRPKVKFLFGIWPVILFEPLRKH

SEQ ID NO: 113126 - DNA, 693 bp, Artificial Sequence
  derived and/or modified sequence
atggcccccgccgccgacagagagggctactggggccccaccaccagcaccctggactggtgcgaggagaactacagcgtgacctggtacatcgccgagttcctggtgggcatgggcagctggtgcttccacatgaccctgaagtacgagatgcagctgctggacgagctgcccatgatctacagctgctgcatcttcgtgtactgcatgttcgagtgcttcaagatcaagaacagcgtgaactaccacctgctgttcaccctggtgctgttcagcctgatcgtgaccaccgtgtacctgaaggtgaaggagcccatcttccaccaggtgatgtacggcatgctggtgttcaccctggtgctgagaagcatctacatcgtgacctgggtgtacccctggctgagaggcctgggctacaccagcctgggcatcttcctgctgggcttcctgttctggaacatcgacaacatcttctgcgagagcctgagaaacttcagaaagaaggtgccccccatcatcggcatcaccacccagttccacgcctggtggcacatcctgaccggcctgggcagctacctgcacatcctgttcagcctgtacaccagaaccctgtacctgagatacagacccaaggtgaagttcctgttcggcatctggcccgtgatcctgttcgagcccctgagaaagcactag

SEQ ID NO: 113127 - DNA, 693 bp, Artificial Sequence
  derived and/or modified sequence
atggctccggcagcagatcgagaggggtattggggccctacgacctccaccctggattggtgtgaggaaaactattcagtgacctggtacatcgctgaattcttagtgggcatggggtcctggtgctttcatatgacactaaaatacgagatgcaacttctggatgagcttccgatgatctactcctgttgcatttttgtgtactgcatgttcgagtgcttcaagatcaaaaacagtgtcaattaccatttgctgtttactttagtcctcttcagccttattgtcacgacagtctacctgaaagtgaaggagcccatcttccatcaggtgatgtacgggatgctcgttttcacactggtcctaagatccatctatatcgttacatgggtgtacccctggctccgtggtctgggctataccagcctagggattttcctgctcgggtttttattctggaatatagacaatattttctgcgagtcccttcgcaacttccgtaaaaaagtaccccccatcatagggattaccacccaatttcacgcatggtggcacatccttaccggcctggggagctatttgcatatccttttcagtctgtatactcggacactgtacttgaggtatagacccaaagtgaaatttctgtttggcatttggcccgtgattttgttcgagccactgcgcaagcattag

SEQ ID NO: 113128 - DNA, 693 bp, Artificial Sequence
  derived and/or modified sequence
atggccccagctgctgaccgggagggctactggggccccaccaccagcaccctggactggtgtgaggagaactacagcgtgacctggtacatcgccgagttcctggtgggcatgggctcctggtgcttccacatgaccctgaagtatgagatgcagctgctggatgagctgcccatgatctacagctgctgcatctttgtgtactgcatgtttgagtgcttcaagatcaagaacagcgtgaactaccacctgctcttcaccctggtgctcttcagcctcatcgtgaccaccgtgtacctgaaggtgaaggagcccatcttccaccaggtgatgtatggcatgctggtgttcaccctggtgctgcggagcatctacatcgtgacctgggtgtacccctggctgcggggcctgggctacaccagcctgggcatcttcctgctgggcttcctgttctggaacatcgacaacatcttctgtgagagcctgaggaacttcaggaagaaggtgccccccatcatcggcatcaccacccagttccacgcctggtggcacatcctgaccggcctgggcagctacctgcacatcctcttcagcctgtacaccaggaccctgtacctgcgctaccggcccaaggtgaagttcctgtttggcatctggcctgtgatcctgtttgagcccctgaggaagcactag

SEQ ID NO: 113129 - DNA, 929 bp, Artificial Sequence
  derived and/or modified sequence
gagcggagcgcctgggcggcggcggcggcggcgtgatggctccggccgcggaccgagagggctactggggccccacgacctccacgctggactggtgcgaggagaactactccgtgacctggtacatcgccgagttcttggtaggaatgggatcctggtgcttccacatgactctgaaatatgaaatgcagctattggatgaactcccaatgatatacagctgttgcatatttgtgtactgcatgtttgaatgtttcaagatcaagaactcagtaaactaccatctgctttttaccttagttctattcagtttaatagtaaccacagtttaccttaaggtaaaagagccgatattccatcaggtcatgtatggaatgttggtctttacattagtacttcgatctatttatattgttacatgggtttatccatggcttagaggactgggttatacatcattgggtatatttttattgggatttttattttggaatatagataacatattttgtgagtcactgaggaactttcgaaagaaggtaccacctatcataggtattaccacacaatttcatgcatggtggcatattttaactggccttggttcctatcttcacatccttttcagtttgtatacaagaacactttacctgagatataggccaaaagtgaagtttctctttggaatctggccagtgatcctgtttgagcctctcaggaagcattgatgaatcattccaccaagaaaacaaacaagcacctaccatagacctggcagaataaataaggaaatccttaaagatctacaagttcaaatatgtcatgaccatcacagcagaggagtgactttctgactaatgctgccacccacacagagaataaggagtagggcctgctgggtgtttagctcatggctttatcttatttgt

SEQ ID NO: 113130 - DNA, 693 bp, Artificial Sequence
  derived and/or modified sequence
atggcccccgccgccgaccgggagggctactggggccccaccaccagtaccctcgactggtgcgaggagaactattcagtgacatggtacattgccgagtttttggtaggtatgggatcctggtgcttccacatgacattaaagtacgagatgcagctactggacgaactgccaatgatttattcgtgctgcatttttgtctactgtatgttcgaatgtttcaaaatcaaaaattctgtaaactaccacctccttttcaccctcgtcctctttagcctgatagtgactaccgtgtacttgaaggtcaaagagccaatctttcatcaggtgatgtacggcatgcttgtgtttactcttgtcctacggtcaatatatatcgtcacctgggtctacccttggttgagaggccttggttatacatcacttgggatcttccttctaggcttcctgttctggaacattgataatattttttgcgagtcactgagaaactttcgcaaaaaggtccctcctattatcggtatcacaacccagttccacgcgtggtggcacatcttaactggcctggggtcttatctacatattcttttctctctctatactaggactctttatctgcgataccggcccaaggttaagttcctgtttggtatatggccagtgattctcttcgaaccactgagaaagcattag

SEQ ID NO: 113131 - DNA, 693 bp, Artificial Sequence
  derived and/or modified sequence
atggccccagctgcagatagagagggttattgggggcctacgacttccactctcgactggtgtgaggagaactacagtgttacctggtatatcgctgaatttcttgtgggtatgggttcttggtgcttccacatgactctcaaatacgagatgcagctgctagacgagctgcccatgatctactcatgctgcatctttgtgtattgtatgtttgagtgttttaagatcaagaactctgtgaactaccatcttttgtttacgctcgtactcttttcactgatcgttaccactgtctatctgaaagtgaaggaacccatctttcaccaggtgatgtatggcatgctcgtgttcaccctagttttgcgcagcatctatatcgtcacatgggtgtacccatggctgcgcggtctgggatacacaagtctgggaatatttcttctgggttttctgttctggaatattgataatatattttgcgaaagtctgcgcaattttaggaagaaggtgcccccaatcattggcattacaacacagtttcacgcctggtggcacatcctgacgggcttggggagttacttgcatatcctgttctcactgtacaccaggaccctttatctccgctaccggccaaaagtaaagtttctgtttgggatctggcctgtcatattattcgagccgcttcgcaaacattag

SEQ ID NO: 113132 - DNA, 519 bp, Artificial Sequence
  derived and/or modified sequence
atgatctacagctgctgcatcttcgtgtactgcatgttcgagtgcttcaagatcaagaacagcgtgaactaccacctgctgttcaccctggtgctgttcagcctgatcgtgaccaccgtgtacctgaaggtgaaggagcccatcttccaccaggtgatgtacggcatgctggtgttcaccctggtgctgagaagcatctacatcgtgacctgggtgtacccctggctgagaggcctgggctacaccagcctgggcatcttcctgctgggcttcctgttctggaacatcgacaacatcttctgcgagagcctgagaaacttcagaaagaaggtgccccccatcatcggcatcaccacccagttccacgcctggtggcacatcctgaccggcctgggcagctacctgcacatcctgttcagcctgtacaccagaaccctgtacctgagatacagacccaaggtgaagttcctgttcggcatctggcccgtgatcctgttcgagcccctgagaaagcactag

SEQ ID NO: 113133 - DNA, 405 bp, Artificial Sequence
  derived and/or modified sequence
atggcccagagcagactgatcggcaccagcaccagccaggtgatgtacggcatgctggtgttcaccctggtgctgagaagcatctacatcgtgacctgggtgtacccctggctgagaggcctgggctacaccagcctgggcatcttcctgctgggcttcctgttctggaacatcgacaacatcttctgcgagagcctgagaaacttcagaaagaaggtgccccccatcatcggcatcaccacccagttccacgcctggtggcacatcctgaccggcctgggcagctacctgcacatcctgttcagcctgtacaccagaaccctgtacctgagatacagacccaaggtgaagttcctgttcggcatctggcccgtgatcctgttcgagcccctgagaaagcactag

SEQ ID NO: 113134 - DNA, 519 bp, Artificial Sequence
  derived and/or modified sequence
atgatttactcttgctgcatcttcgtgtactgcatgtttgaatgttttaagatcaagaatagcgtcaactaccacctgctcttcacactggtcctgttctcacttattgttacaactgtctacctaaaagtgaaggaacctatctttcaccaggtaatgtacggaatgctggtatttacactggtgctaagaagcatatacattgtaacgtgggtgtatccctggctccgcggcctcggctacacttctctggggatctttctcctaggcttcctgttttggaatattgataacatattctgcgagtctctgcggaattttagaaaaaaagttcccccaatcattggcatcaccacccaattccacgcctggtggcacattctcactgggctcggatcttatctgcacatcctgttcagcctgtacacaagaaccctgtacctgcgatatcggcccaaggtgaaatttttatttggaatttggccagtaattttgtttgagcccctacggaaacactag

SEQ ID NO: 113135 - DNA, 405 bp, Artificial Sequence
  derived and/or modified sequence
atggcgcaatctcggttgataggtactagcacgtcccaagtcatgtatggcatgctggttttcactctagtcctgagatctatttatatcgtgacatgggtttacccatggttaagagggcttgggtacaccagcctgggcatatttctgttggggtttctgttctggaatattgataacattttttgtgaatcactgcgtaacttccgcaaaaaggtgccacccatcatcggcatcacaacccagttccacgcctggtggcacatccttacaggcctggggtcttatctgcacatcttattcagcctttacactcggactctgtacctaagataccggcctaaagtcaagtttttgttcggaatatggcctgttatcttgtttgagcccctccggaaacactag

SEQ ID NO: 113136 - DNA, 519 bp, Artificial Sequence
  derived and/or modified sequence
atgatctacagctgctgcatctttgtgtactgcatgtttgagtgcttcaagatcaagaacagcgtgaactaccacctgctcttcaccctggtgctcttcagcctcatcgtgaccaccgtgtacctgaaggtgaaggagcccatcttccaccaggtgatgtatggcatgctggtgttcaccctggtgctgcggagcatctacatcgtgacctgggtgtacccctggctgcggggcctgggctacaccagcctgggcatcttcctgctgggcttcctgttctggaacatcgacaacatcttctgtgagagcctgaggaacttcaggaagaaggtgccccccatcatcggcatcaccacccagttccacgcctggtggcacatcctgaccggcctgggcagctacctgcacatcctcttcagcctgtacaccaggaccctgtacctgcgctaccggcccaaggtgaagttcctgtttggcatctggcctgtgatcctgtttgagcccctgaggaagcactag

SEQ ID NO: 113137 - DNA, 405 bp, Artificial Sequence
  derived and/or modified sequence
atggcccagagccggctgattggcaccagcaccagccaggtgatgtatggcatgctggtgttcaccctggtgctgcggagcatctacatcgtgacctgggtgtacccctggctgcggggcctgggctacaccagcctgggcatcttcctgctgggcttcctgttctggaacatcgacaacatcttctgtgagagcctgaggaacttcaggaagaaggtgccccccatcatcggcatcaccacccagttccacgcctggtggcacatcctgaccggcctgggcagctacctgcacatcctcttcagcctgtacaccaggaccctgtacctgcgctaccggcccaaggtgaagttcctgtttggcatctggcctgtgatcctgtttgagcccctgaggaagcactag

SEQ ID NO: 113138 - DNA, 2978 bp, Artificial Sequence
  derived and/or modified sequence
atggcacaatctcggctcattggaacctccacctcccaggtcatgtatggaatgttggtctttacattagtacttcgatctatttatattgttacatgggtttatccatggcttagaggactgggttatacatcattgggtatatttttattgggatttttattttggaatatagataacatattttgtgagtcactgaggaactttcgaaagaaggtaccacctatcataggtattaccacacaatttcatgcatggtggcatattttaactggccttggttcctatcttcacatccttttcagtttgtatacaagaacactttacctgagatataggccaaaagtgaagtttctctttggaatctggccagtgatcctgtttgagcctctcaggaagcattgatgaatcattccaccaagaaaacaaacaagcacctaccatagacctggcagaataaataaggaaatccttaaagatctacaagttcaaatatgtcatgaccatcacagcagaggagtgactttctgactaatgctgccacccacacagagaataaggagtagggcctgctgggtgtttagctcatggctttatcttatttgtccccctcctcctttcacgctccagtttataaagaaacagagatgatgtgtgtgtatgcctcaaatgcagaaacagttgggcttttcttaacaggttaacagtttgtgctggttataagaaattaaccttcttttctttttgccaagggttgcatgtgaattatacctttcttaatatttgattaaataatgcagtcagctaagagccaacaaaaccccatatccagatagttagctgtgagccagcactcagctgtgtcagatttgattaatattgtattaatctcatggatggttctcaaaggtaaaaaaagagagagaaagagagagagctagctgtgggattctgtgtagttcttcactatctgttccagggctagtcggaggatcataagcaagctcagacctgcccccagttcagtacttgaccacatcccaggatttatggtgtctgtctatggccacagccaaccagaatgagtgggtcatcttataacctttctgaagctccatgaggacatgtatagaatgctgcaccttcagccagctctgctctgatctttgcagatctttaagttgtcactgtttctacggctagacaaatatgactggtggtctagactacccatagttcatcctcctcacataacttatttgaagttgtcagggaatgtcattacactctgatttttaaaattatgcagtattttccagttctcagagaggtcatggttgtgcccagggaagtgtgttgcattaactaaagctaaaattatcagaatcctatttacataaagcatattaaaatatctgctccttaattttctgaaggaaatagatgtaagtttctgctacttgaaacctacagaaccgacaaaaattagggtgctaaaaaaatgacagtgaaatctcatcgtaaggcagctagttctaatttgcatttgaatgtataacaaattgcatcacttttcacaaacttaacacctgcctggagtaaaaatctgatttgacccctctgctcatgtttcatcatatttgtagctctgcatcatttagcatttttatgactttttttgctttatataaattattgtaaaatccagattgtttttaccacatgatgacgtgactcaggattaaatcctgagctacagtttcaaaaggaaaatcatttttttcttatgcaaagatggtaaaacactgttgtcattttttccagtattcaataagtagcctttgtacaaatttaaaaccaaaaactattctgttgtttttcttcacctactagccttagtttttaaccaagtatccaaggatgtcaacttgacatccttcccttagcatgccaacaagccattagactgattcttccacctatttttatgaacctccaggaagaaaaacacttgccaaaacattaagagaactttgattctgccttaagagggtataaaactaaaccatttgaaggcacagcccataagactatacttgattttgccccaagattctgacttctggctacatttcacctgcagttacctgggctatcggccgtgatacattttttaattcatttgttttccaccattatatttttatacttttcagttagatatacttctgcataaagagtatatatacagtgtaggataaaggcatatcgtacatggcaatgctgttaaacatggtaagactgaggttctgcaggattaaagtcagattaagggtacagaaagcacaccttgatactgaggccatttagagcaatttgtttaatgagtggttcagccatcaccaccagtggccacctgttcaataaaattgcctagcaccacagtggagagtcatctacaccccaaggtgagctgtaagactggccaattctttgaagacctttttttctgttgggagaatggaaagcagaaagggaagccaggctctttaatgttccaagtcagctgtgcctcacacaaggctctctttttagctactaagtaacatactcaagactttgtatctgtgcagcattttatggaaatcactggtgacctataggatattactaaattatttcaatagctttatttttttcctacttggattctaggtggacattacagagttgaattcctcactaccccctcccgctgtcatttgttttattggaaaacttcatgttaactagagtgtacaaaaagtctgtttcctgctgagccaatagtgatttgtttgcatatcacctaatgtgaaaagtgctcatctgtgaactctacagcaaattatattttagaaaatactttgtgaggccgggcatggtggcagagcgagactccgtctcaaaaaaaaaaaaaaaaaaaaaaaagaaaagaa

SEQ ID NO: 113139 - DNA, 519 bp, Artificial Sequence
  derived and/or modified sequence
atgatctacagctgctgcatcttcgtgtactgcatgttcgagtgcttcaagatcaagaatagcgtcaactatcatttgctattcacccttgtgctgttctcactgatagtgaccactgtgtacctgaaggtaaaggagcccatctttcaccaggtgatgtacggtatgctggtttttactctcgtgctcaggagcatctatattgtcacttgggtgtacccatggctgagaggactcggatacacaagcctgggtattttcttactgggatttcttttctggaacatagacaatatattctgcgaatcactgcggaactttagaaagaaagtacctcccataattggaatcacaacccagtttcatgcatggtggcatatcctcaccgggctgggttcctacctacacattctattttcactgtatacacgcactctgtacctgcgttaccgcccaaaggtgaaatttttatttggtatctggcccgtgatactgttcgagccccttcgtaagcactag

SEQ ID NO: 113140 - DNA, 405 bp, Artificial Sequence
  derived and/or modified sequence
atggcccagagccggctgatcggcaccagcaccagccaggtgatgtacggcatgcttgtttttactcttgttctgcgcagcatatatatcgtgacctgggtttacccttggctaagaggacttggttacacctccctcggtatcttccttcttggctttttgttttggaacatcgataacattttctgcgagtcactgaggaactttaggaagaaggtacctccaattattggaatcaccacccagttccacgcttggtggcacatactgacagggctcggatcatatctgcatatcctcttctcgctgtatacccgcaccttgtacctccgatatcgaccgaaggtgaagtttttgtttggaatttggcctgtcattctgttcgaaccccttagaaaacactag

SEQ ID NO: 113141 - DNA, 519 bp, Artificial Sequence
  derived and/or modified sequence
atgatatactcatgctgcattttcgtttattgcatgttcgagtgtttcaaaattaagaattcagtcaattatcaccttctttttacgctggtactgtttagcctgattgtgactaccgtgtacctgaaagtcaaggaacctatttttcaccaggtaatgtatggaatgttagtgttcaccttggtcctgcggagtatctatatagtgacatgggtgtatccttggttacggggtctggggtatacttctctgggtattttccttttgggtttcctgttctggaatattgataatattttctgtgagtcactccgaaattttcgtaagaaggttccaccaatcataggcatcacaactcagttccatgcatggtggcatatcctgaccggcctgggttcttatctgcacattcttttcagcctttacacgcgtactctctacctgcgctataggccaaaggtcaaatttctgtttggcatatggccagtgatcctcttcgagccgcttaggaaacactag

SEQ ID NO: 113142 - DNA, 405 bp, Artificial Sequence
  derived and/or modified sequence
atggctcagtccagattgattggcacctccaccagccaggtgatgtatggtatgttagtgtttaccctggtgcttcggtccatttacattgtgacctgggtctacccttggctgaggggactagggtacacttccctgggtatttttctcctgggcttccttttctggaacatcgacaatattttttgcgagagtttaaggaactttcggaaaaaagtccccccaataatcggtattacaactcaattccatgcctggtggcacatcttgacgggactaggctcgtatttgcatatcctcttcagtctctacacacgtaccctgtacttaaggtaccgaccgaaggtcaaatttctcttcgggatctggccagttattctgttcgagcccctgcgaaaacattag

SEQ ID NO: 113143 - protein, 837 aa, Artificial Sequence
  derived and/or modified sequence
MVHPREAMFSIFCHEKWRSKLHCASQYSELLETTETPKRKRGEKGEVVETVEDVIVRKLTAERVEELKKVIKETQERYRRLKRDAELIQAGHMDSRLDELCNDIATKKKLEEEEAEVKRKATDAAYQARQAVKTPPRRLPTVMVRSPIDSASPGGDYPLGDLTPTTMEEATSGVNESEMAVASGHLNSTGVLLEVGGVLPMIHGGEIQQTPNTVAASPAASGAPTLSRLLEAGPTQFTTPLASFTTVASEPPVKLVPPPVESVSQATIVMMPALPAPSSAPAVSTTESVAPVSQPDNCVPMEAVGDPHTVTVSMDSSEISMIINSIKEECFRSGVAEAPVGSKAPSIDGKEELDLAEKMDIAVSYTGEELDFETVGDIIAIIEDKVDDHPEVLDVAAVEAALSFCEENDDPQSLPGPWEHPIQQERDKPVPLPAPEMTVKQERLDFEETENKGIHELVDIREPSAEIKVEPAEPEPVISGAEIVAGVVPATSMEPPELRSQDLDEELGSTAAGEIVEADVAIGKGDETPLTNVKTEASPESMLSPSHGSNPIEDPLEAETQHKFEMSDSLKEESGTIFGSQIKDAPGEDEEEDGVSEAASLEEPKEEDQGEGYLSEMDNEPPVSESDDGFSIHNATLQSHTLADSIPSSPASSQFSVCSEDQEAIQAQKIWKKAIMLVWRAAANHRYANVFLQPVTDDIAPGYHSIVQRPMDLSTIKKNIENGLIRSTAEFQRDIMLMFQNAVMYNSSDHDVYHMAVEMQRDVLEQIQQFLATQLIMQTSESGISAKSLRGRDSTRKQDASEKDSVPMGSPAFLLSLFDGGTRGRRCAIEADMKMKK

SEQ ID NO: 113144 - DNA, 2514 bp, Artificial Sequence
  derived and/or modified sequence
atggtgcaccccagagaggccatgttcagcatcttctgccacgagaagtggagaagcaagctgcactgcgccagccagtacagcgagctgctggagaccaccgagacccccaagagaaagagaggcgagaagggcgaggtggtggagaccgtggaggacgtgatcgtgagaaagctgaccgccgagagagtggaggagctgaagaaggtgatcaaggagacccaggagagatacagaagactgaagagagacgccgagctgatccaggccggccacatggacagcagactggacgagctgtgcaacgacatcgccaccaagaagaagctggaggaggaggaggccgaggtgaagagaaaggccaccgacgccgcctaccaggccagacaggccgtgaagaccccccccagaagactgcccaccgtgatggtgagaagccccatcgacagcgccagccccggcggcgactaccccctgggcgacctgacccccaccaccatggaggaggccaccagcggcgtgaacgagagcgagatggccgtggccagcggccacctgaacagcaccggcgtgctgctggaggtgggcggcgtgctgcccatgatccacggcggcgagatccagcagacccccaacaccgtggccgccagccccgccgccagcggcgcccccaccctgagcagactgctggaggccggccccacccagttcaccacccccctggccagcttcaccaccgtggccagcgagccccccgtgaagctggtgcccccccccgtggagagcgtgagccaggccaccatcgtgatgatgcccgccctgcccgcccccagcagcgcccccgccgtgagcaccaccgagagcgtggcccccgtgagccagcccgacaactgcgtgcccatggaggccgtgggcgacccccacaccgtgaccgtgagcatggacagcagcgagatcagcatgatcatcaacagcatcaaggaggagtgcttcagaagcggcgtggccgaggcccccgtgggcagcaaggcccccagcatcgacggcaaggaggagctggacctggccgagaagatggacatcgccgtgagctacaccggcgaggagctggacttcgagaccgtgggcgacatcatcgccatcatcgaggacaaggtggacgaccaccccgaggtgctggacgtggccgccgtggaggccgccctgagcttctgcgaggagaacgacgacccccagagcctgcccggcccctgggagcaccccatccagcaggagagagacaagcccgtgcccctgcccgcccccgagatgaccgtgaagcaggagagactggacttcgaggagaccgagaacaagggcatccacgagctggtggacatcagagagcccagcgccgagatcaaggtggagcccgccgagcccgagcccgtgatcagcggcgccgagatcgtggccggcgtggtgcccgccaccagcatggagccccccgagctgagaagccaggacctggacgaggagctgggcagcaccgccgccggcgagatcgtggaggccgacgtggccatcggcaagggcgacgagacccccctgaccaacgtgaagaccgaggccagccccgagagcatgctgagccccagccacggcagcaaccccatcgaggaccccctggaggccgagacccagcacaagttcgagatgagcgacagcctgaaggaggagagcggcaccatcttcggcagccagatcaaggacgcccccggcgaggacgaggaggaggacggcgtgagcgaggccgccagcctggaggagcccaaggaggaggaccagggcgagggctacctgagcgagatggacaacgagccccccgtgagcgagagcgacgacggcttcagcatccacaacgccaccctgcagagccacaccctggccgacagcatccccagcagccccgccagcagccagttcagcgtgtgcagcgaggaccaggaggccatccaggcccagaagatctggaagaaggccatcatgctggtgtggagagccgccgccaaccacagatacgccaacgtgttcctgcagcccgtgaccgacgacatcgcccccggctaccacagcatcgtgcagagacccatggacctgagcaccatcaagaagaacatcgagaacggcctgatcagaagcaccgccgagttccagagagacatcatgctgatgttccagaacgccgtgatgtacaacagcagcgaccacgacgtgtaccacatggccgtggagatgcagagagacgtgctggagcagatccagcagttcctggccacccagctgatcatgcagaccagcgagagcggcatcagcgccaagagcctgagaggcagagacagcaccagaaagcaggacgccagcgagaaggacagcgtgcccatgggcagccccgccttcctgctgagcctgttcgacggcggcaccagaggcagaagatgcgccatcgaggccgacatgaagatgaagaagtag

SEQ ID NO: 113145 - DNA, 2514 bp, Artificial Sequence
  derived and/or modified sequence
atggtgcatccccgcgaggctatgttctctattttctgtcatgagaagtggcggtccaagctccattgtgcatcccagtacagcgaactattggaaactactgaaactcccaagcgaaagaggggggaaaagggggaagtagtggagacagtggaagacgtcattgtcagaaagctaacagctgagagggtggaagagttgaagaaggtcattaaggagacacaagaaaggtaccgacgactaaaaagagacgcagagttgattcaggctggacatatggatagtcgcctcgatgaactctgtaacgatatcgccactaaaaaaaaattagaggaggaggaggccgaagtgaaacgaaaggccacggacgcggcctatcaggcccgtcaggctgttaaaaccccacctaggcgccttccgactgttatggtccgctctccgatagactctgcaagtcccgggggcgattatccgctgggagatctgaccccaacaactatggaggaggctacttcaggggttaatgagtccgagatggctgtcgcttcggggcacctcaattcgacaggagtcctgctcgaagttggtggcgtgctgccaatgattcacggaggggagattcaacaaacacctaacaccgtggctgccagccctgctgcgtctggggctcctaccctgagtcggctgttagaagcgggacccacccagtttaccaccccactcgcttcctttaccacagtggccagtgagccacctgttaagctggtgccccccccagtggagagcgttagccaagctaccatcgtgatgatgccagcccttcctgccccatcctccgcgcccgctgtctcgaccactgaatctgtagctcctgtgtcgcagcctgacaactgtgtgcctatggaagctgttggggatccccacacggtgacagttagtatggattccagcgagatcagcatgatcatcaattccattaaggaggaatgcttcaggtccggcgtcgctgaagcgcccgttggctcgaaggccccctctatcgatggcaaagaagagctcgatctcgccgagaagatggacatagccgtcagttatactggtgaggaattggatttcgagacagtgggcgatataatagcaatcattgaagataaggtggacgaccacccggaagtcttggatgtagccgctgtagaagcggctctctcattctgtgaagagaatgatgatcctcagtctttaccaggcccttgggaacacccaattcaacaggaaagagataagcccgttcccttacccgctccagaaatgacagttaaacaggaacgcctagactttgaggagaccgagaacaagggcatccatgaactcgtcgatataagagaaccttcagcagagattaaagtagagcccgctgagcccgagcccgtgatttccggcgcagagattgttgccggggttgttcccgccacatcaatggagccgcctgaactccgctcccaggatctcgacgaggagttaggtagtaccgcagcgggcgagattgtggaggctgatgttgcaattggcaagggggacgagactcccctgacaaacgtaaaaactgaggcatctcctgagtccatgctgagtccttcccatggaagtaaccccatcgaggaccctctggaggccgagacacagcacaaattcgaaatgagcgactcgctgaaggaagagtctggaactattttcgggtcccaaataaaagacgccccaggcgaggatgaagaagaagatggagttagcgaagcagcgtctctagaagaacccaaagaagaagatcagggcgaaggatatctgtcagagatggacaatgagccacctgtttcagagtctgacgacggattttccattcataacgctacgctgcagagtcacacactcgccgactccatccctagctcacctgcgtcttcacaattttccgtatgctctgaagaccaggaagccatccaggcgcagaagatctggaaaaaggctattatgctggtctggagagccgcggcaaaccatcgttacgcgaacgtttttctgcagcctgtcactgatgacattgcacccgggtaccatagcattgttcagaggccaatggatctgtccactatcaagaagaatattgagaatggcctaatccggtcaactgccgagtttcagagagacatcatgctcatgttccagaatgctgtgatgtataatagctctgatcacgacgtgtatcacatggcagtcgaaatgcaacgcgacgtgctggaacagatacagcaatttcttgcaacacagctgatcatgcagactagtgagtcgggcatctctgcaaagtctcttcgaggaagggatagcactcgaaaacaggatgcgtccgagaaagatagcgttccaatggggagtccagcctttctgttgtcactattcgatggaggaacaagagggcggcgatgtgccatcgaggccgacatgaagatgaaaaagtag

SEQ ID NO: 113146 - DNA, 2514 bp, Artificial Sequence
  derived and/or modified sequence
atggtgcacccccgggaggccatgttcagcatcttctgccacgagaagtggaggagcaagctgcactgtgccagccagtacagcgagctgctggagaccacagagacccccaagaggaagagaggagagaagggggaggtggtggagaccgtggaggatgtgattgtgaggaagctgacagctgagcgggtggaggagctgaagaaggtgatcaaggagacccaggagcgctacagaaggctgaagagagatgctgagctgatccaggccggccacatggacagccggctggatgagctgtgcaatgacatcgccaccaagaagaagctggaggaggaggaggccgaggtgaagaggaaggccacagatgctgcctaccaggcccggcaggccgtgaagaccccaccccggcggctgcccaccgtgatggtgcgcagccccatcgacagcgccagccctggaggagactaccccctgggggacctgacccccaccaccatggaggaggccaccagcggcgtgaatgaaagtgagatggctgtggccagcggccacctgaacagcactggagtgctgctggaggtgggcggcgtgctgcccatgattcatggaggagagatccagcagacccccaacacagtggccgccagccctgctgccagcggggcccccaccctgagccggctgctggaggccggccccacccagttcaccacccccctggccagcttcaccaccgtggccagcgagccccctgtgaagctggtgcccccacctgtggagagcgtgtcccaggccaccatcgtgatgatgcctgccctgcctgcccccagcagcgccccagctgtgtccaccacagagagcgtggcccctgtgtcccagcctgacaactgtgtgcccatggaggccgtgggggacccccacacagtgacagtgtccatggacagcagcgagatctccatgatcatcaacagcatcaaggaggagtgcttccgctctggagtggccgaggcccctgtgggcagcaaggcccccagcattgatggcaaggaggagctggacctggccgagaagatggacattgctgtgtcctacaccggggaggagctggactttgagaccgtgggggacatcatcgccatcatcgaggacaaggtggatgaccaccctgaggtgctggatgtggccgctgtggaggccgccctgtccttctgtgaagaaaatgatgacccccagagcctgcccggcccctgggagcaccccatccagcaggagcgggacaagcctgtgcccctgcctgcccctgagatgacagtgaagcaggagcggctggactttgaggagacagagaacaagggcatccacgagctggtggacatccgggagcccagcgctgagatcaaggtggagcctgctgagcctgagcccgtcatctctggagctgagatcgtggccggcgtggtgcctgccacctccatggagcccccagagctgcggagccaggacctggatgaggagctgggcagcacagctgctggggagatcgtggaggctgatgtggccatcggcaaaggagatgagacccccctgaccaacgtgaagacagaggccagccctgagagcatgctgagccccagccacggcagcaaccccatcgaggaccccctggaggccgagacccagcacaagtttgagatgtctgacagcctgaaggaggagagcggcaccatcttcggcagccagatcaaggatgcccctggagaagatgaggaggaggatggagtgtctgaggccgccagcctggaggagcccaaggaggaggaccagggcgagggctacctgtctgagatggacaatgaacctcctgtgtctgagagtgatgatggcttcagcatccacaatgccaccctgcagagccacaccctggccgacagcatccccagcagccctgccagcagccagttctctgtgtgcagcgaggaccaggaggccatccaggcccagaagatctggaagaaggccatcatgctggtgtggagggctgctgccaaccacagatatgccaacgtgttcctgcagcctgtgacagatgacatcgcccctggctaccacagcatcgtgcagaggcccatggacctgagcaccatcaagaagaacattgaaaatggcctcatccgcagcacagctgagttccagagggacatcatgctgatgttccagaatgctgtgatgtacaacagcagtgaccatgatgtgtaccacatggctgtggagatgcagagagatgtgctggagcagatccagcagttcctggccacccagctgatcatgcagaccagcgagagcggcatcagcgccaagagcctgcggggccgggacagcaccaggaagcaggatgccagcgagaaggacagcgtgcccatgggcagccctgccttcctgctgagcctgtttgatggcggcacccggggcagaagatgtgccattgaagctgacatgaagatgaagaagtag

SEQ ID NO: 113147 - DNA, 2514 bp, Artificial Sequence
  derived and/or modified sequence
atggtgcacccccgggaggccatgttcagcatcttctgccacgagaagtggaggtctaagttgcactgtgcaagccagtatagtgagctcctggagacaactgagacaccaaaaaggaagcggggcgagaagggcgaagtggtcgagactgttgaggatgttatcgtgcgcaaactgaccgccgaacgggtggaggaactgaaaaaggtaatcaaggagacacaggaacggtacaggcgcttgaagagagacgctgagcttatccaggccggccatatggacagtagactggatgagttgtgtaatgatatcgccacaaagaagaagctggaagaagaggaggccgaagtgaaacgcaaagcaaccgacgcagcataccaggcaaggcaggcagttaagacacctcccagaagactaccgactgtgatggtgagaagcccaattgattctgcgagtcctggcggggactaccctctgggggatctgactcctactacaatggaagaagctacatccggggttaatgaatccgagatggctgtggcctccggccacctaaattccaccggcgttctgttggaggttggtggcgtcctcccgatgatccacggtggggagattcagcagactcccaacacggttgcagcgtcacctgcagcttccggggcaccaacgctgagtcggctgctcgaagctgggcccactcaatttacgacacctctagctagctttaccacagttgctagcgaacctccggtgaagctggtacccccgcccgtggagtccgtgagtcaagccactattgttatgatgccagccctgccggcaccaagcagcgcgcccgccgtaagcaccactgaatcggtggcccccgtgagtcagcctgacaattgtgtgccaatggaggcggttggagatccacacaccgtcaccgtgtccatggattcatctgaaatcagtatgataataaattctatcaaggaagagtgttttcggagcggagtcgccgaggcccccgtagggagcaaggccccatccatcgacgggaaggaggaattggatctggccgagaaaatggacatcgctgtcagctacaccggtgaagagctggatttcgaaacagttggtgatattatcgcaataattgaagacaaggtcgatgatcaccccgaggtgctcgatgtagcggccgtggaagccgctctctcattttgcgaagaaaacgatgacccacaatcgctcccaggcccatgggagcacccgatacaacaggagcgagataaacccgtccccctccctgcccctgaaatgacagtgaaacaggagaggttggactttgaggaaactgagaataagggcatacatgagctggtggacattagggagccaagtgccgaaatcaaggtcgaacccgcggagcccgagcctgtgatttcgggtgctgagatagtggcaggagtggtgcctgccaccagtatggagccgcccgaactcagatctcaggatctggatgaggagctaggctccactgccgctggtgaaatagttgaggcagatgtggcgatcggcaagggagacgaaacacctctcaccaacgtcaagacagaagccagcccggagagcatgctgtcaccaagccacgggtcaaatcctatcgaggacccactcgaggcggagactcagcataagttcgaaatgagcgactctctgaaagaggagtccggaaccattttcggcagccagatcaaagacgcaccaggcgaggatgaagaggaagacggcgtatcagaagcagcaagtctggaggagccaaaggaggaagaccagggagaaggctatctgagcgagatggacaatgagccgccagtaagtgagtccgatgatggctttagtattcacaatgcaaccttacagtcccacaccttggccgattcaataccatcctctcctgcttcttcccaattctcagtatgttctgaggaccaggaagccatccaagcccagaagatctggaagaaagctatcatgctggtgtggcgcgctgctgctaatcataggtacgcaaatgtattcttgcaaccagtaactgatgacatagctcccggatatcactctattgtccagcgccccatggacctcagcactatcaaaaaaaatatcgaaaacggcctgatcaggtctacggcagaattccagcgtgatatcatgctgatgttccagaatgcagttatgtataactcttctgatcacgacgtgtaccatatggccgtggaaatgcagcgcgatgtgttggagcaaattcaacagtttttagccacccagctcattatgcagacttcggaatccggcattagtgctaaatcgcttcgcggcagagattccactcgcaagcaagacgcctccgaaaaggattctgtacccatgggaagtcccgccttcctgctgtccctgttcgatggagggacccgaggaaggcgttgtgcaatagaagcagatatgaaaatgaaaaagtag

SEQ ID NO: 113148 - DNA, 2514 bp, Artificial Sequence
  derived and/or modified sequence
atggttcatccccgagaggcaatgttctctatcttctgccacgagaagtggcgctctaaactgcattgcgcatcccaatactcagaactactggagaccacggagactcctaagaggaagaggggggaaaagggcgaagtggtggaaacagttgaggatgttatagtcaggaagctgaccgccgaacgagtggaggaactcaagaaggtgatcaaggaaacacaggaacgctaccggcgactgaagcgcgatgctgagttgattcaggctggccacatggattcacggctggacgagctatgcaacgatatcgctactaaaaagaagttggaggaggaagaagcggaggtgaaacgtaaggcgacagatgcggcatatcaagccagacaggccgtgaagactcctccacgtcggctgcccaccgtcatggtcaggtctcccatcgattcagcttctcctggcggagactaccccttaggggacctgacccccactaccatggaggaggcaactagcggcgttaatgagtccgagatggctgtcgcgagcggtcatctcaattctacgggagtgctgttagaggttggcggagtactgccaatgatacatggcggagaaatccagcaaacgccaaataccgtggccgcatcccccgcagctagtggcgctcccaccctaagtcgcttattggaggcgggtccgacacagtttacaactcctcttgcttcttttacgacagttgcttcggagccaccagtgaaactcgttcctccaccagttgaatctgtgtcgcaagccaccatagtaatgatgcccgcactacctgccccaagctctgcacctgccgtcagcactactgagtcagtggccccagtaagccagcccgataattgtgtgcccatggaggctgtaggagaccctcacactgtgacagtctctatggatagcagcgagatcagcatgatcatcaattccattaaggaggaatgctttcgaagtggagtggctgaggcgccagtcggttcaaaggccccatctatcgacggcaaagaagaattggacctggctgaaaagatggatatcgcagtttcttatacaggcgaagagcttgatttcgaaaccgtgggggacatcatcgctatcatcgaagacaaggtggatgatcaccctgaagtgctggatgtggctgccgttgaagcggctcttagcttctgcgaggagaatgatgaccctcaaagcttgccagggccttgggagcatccaattcagcaagagagggacaagcctgttccattgcctgctccagaaatgaccgtcaagcaggagcgccttgatttcgaggaaaccgaaaataaaggtattcatgagttggtcgacattagggagccgtcagctgagataaaagttgagcctgccgaacccgaaccagtgatttccggcgcagagatagtggctggcgttgtgccagctaccagcatggagccacccgaactgagatctcaggatttggacgaggaactgggatccaccgcagctggtgagatagtggaggccgatgttgccatcggcaagggagatgagacacccctcacgaatgtaaagacggaagcttcacccgaatccatgctgtcaccaagccatggatccaaccccattgaggatcccttagaggccgagacacaacataagttcgaaatgagcgactcccttaaggaggagtcaggtaccatcttcgggtcccaaattaaagatgcgcctggcgaggacgaagaagaggatggtgtctcagaggccgcaagtctggaagagccaaaagaagaagaccagggggaggggtacctgtctgaaatggacaatgagcctcccgtctccgagtctgacgacggcttttctatccacaatgcaactttgcagtcccacacgttggcagattcaataccctcaagccccgcatcttctcagttctctgtgtgcagcgaggatcaggaggccattcaggcccagaagatatggaagaaagccattatgctagtctggcgcgctgctgcgaatcatcgatacgcaaacgttttcctccagccagtcaccgacgacatcgcgccaggatatcactcaatcgtccagcgccctatggatctaagcactatcaaaaagaacatcgagaacgggctgataagatccactgccgaattccagcgggatatcatgttgatgtttcagaatgcggtgatgtataattcgagcgatcatgacgtgtatcacatggccgtcgagatgcagcgcgatgtgcttgaacagatccagcaatttttggccacccagcttattatgcagacgtctgaatctggtatctctgccaagagcctccggggacgcgactctacaaggaagcaggatgctagcgagaaggattcggtccccatgggaagccctgccttcttactgtccctgttcgacgggggaacaagagggcgacgctgcgcaatcgaggcggacatgaaaatgaagaagtag

SEQ ID NO: 113149 - DNA, 2868 bp, Artificial Sequence
  derived and/or modified sequence
gacttcggggccaagatggcgacgggaacgggcaaacacaagctgctaagcactggccccacagagccatggtccatccgagagaagctatgtttagcatcttctgtcatgagaagtggcgatcaaaattgcattgtgcttcccagtactcggagcttttagagaccactgagacaccaaaacggaaacgaggtgaaaagggagaagtggtggaaactgttgaagatgttattgttcggaaattgactgctgagcgagttgaagaactaaagaaagtgataaaggaaacccaggagagatatagacggctaaagagagatgcagaactaattcaagctggacacatggacagcagactggatgagctttgcaatgacattgcaacgaaaaagaaattggaagaagaggaggctgaagtaaagaggaaggctacagatgctgcataccaggctcgtcaagcagtaaaaacacccccccggaggttacccactgtgatggttcgctctcctatagattctgcctccccaggaggtgattatccacttggggacttgactccaaccactatggaagaggctacctctggggtcaatgagagtgaaatggctgtggcttctggccacctgaacagtacaggtgtcctcctggaggtaggcggggtccttcccatgatacatggtggggagatacagcaaacacccaatactgttgcagcctcccctgctgcatcaggtgctcccactctttcccggcttttagaagctggtcctacacagttcaccacacctcttgcttccttcactactgttgccagtgagcctccagttaaacttgtgccaccccctgtagagtctgtgtcccaagctaccattgtcatgatgcctgcgctgccagcaccatcctctgctccggctgtctccactactgaaagtgtagctccagtgagtcaacccgacaactgtgttcccatggaggctgtgggggatccacatactgtgactgtttccatggacagcagtgaaatatccatgatcatcaattctatcaaagaagagtgttttcgatcaggggtagcagaggctcctgttggatcaaaggctcccagcatagatgggaaggaagaattagatctggctgagaagatggatattgctgtgtcttacacaggtgaagagctggattttgagactgttggagacatcattgccatcattgaggacaaggtagatgatcatcctgaagtgctggatgtggcagcagtggaagcagcactgtcattttgtgaagaaaatgatgatcctcagtccctgcctggcccctgggagcatcctatccagcaggagcgggacaagccagtacctctccctgcaccagaaatgacggtcaagcaagagagactggactttgaggaaacggaaaacaagggaatacatgaactggtggacatcagggagcccagtgcagagatcaaggtggaacctgcagaaccagagccagtcatttcaggagccgaaatagtagctggagttgttccagccacaagtatggagccaccagaactcaggagtcaggacttagatgaggaactgggaagtactgcagctggagagattgttgaagcagatgttgccattgggaaaggcgatgagactccacttacaaatgtgaagacagaggcatcccctgaaagcatgttgtctccatcacatggctcaaatcccattgaagatcctttagaggcagagactcagcacaagtttgaaatgtcagactcattgaaagaagaatcagggactatttttggaagccagataaaggatgccccaggtgaggatgaggaggaagatggtgtcagtgaagcggccagcctagaggagcctaaggaagaggatcaaggagaaggctacttgtcagaaatggataatgaacctcctgtgagcgagagtgatgatggcttcagcatacacaatgctacactgcagtcacacacactggcagactccatccccagcagccctgcttcttcacagttctctgtctgtagtgaggatcaggaagctattcaggcacagaaaatttggaagaaagccatcatgcttgtatggagagctgcagctaatcataggtatgccaatgtcttcctgcagcctgttacagatgacatagcacctggctaccacagcattgtgcagaggcctatggatttgtcaactattaagaaaaacatagaaaatggactgatccgaagcacagctgaatttcagcgtgacattatgctgatgtttcagaatgctgtaatgtacaatagctcagaccatgatgtctatcacatggcagtggagatgcagcgagatgtcttggaacagatccagcaattcttggccacgcagttgattatgcaaacatccgagtctgggatcagtgctaaaagtcttcgagggagagattctacccgcaaacaggatgcttcagagaaggacagtgtcccaatgggctctcctgccttccttctctctctctttgatggaggaaccaggggacgccgctgtgccattgaagcagatatgaagatgaaaaagtgaagcctcagagttaccctctttgagccgaacctaaaataaaagtaaacaagatagagcttgggcttgcgggcccagttccagaggtggaagttacagaagaggaggtacctgggccacacgacatgagctggaaaatctctcttagagagttggagtagcacaattgcctgttttagggcagaaaccatgggctatgttaatgtcctaatgtgtagctagcagatcgtagctagtttgtattgtcttgtcaattgtacagactttttaaaaaaaacaaccaccagtg

SEQ ID NO: 113150 - DNA, 1329 bp, Artificial Sequence
  derived and/or modified sequence
atgagcgcctgcagagagatcgccctgctgagagagctgaagcaccccaacgtgatcgccctgcagaaggtgttcctgagccacagcgacagaaaggtgtggctgctgttcgactacgccgagcacgacctgtggcacatcatcaagttccacagagccagcaaggccaacaagaagcccatgcagctgcccagaagcatggtgaagagcctgctgtaccagatcctggacggcatccactacctgcacgccaactgggtgctgcacagagacctgaagcccgccaacatcctggtgatgggcgagggccccgagagaggcagagtgaagatcgccgacatgggcttcgccagactgttcaacagccccctgaagcccctggccgacctggaccccgtggtggtgaccttctggtacagagcccccgagctgctgctgggcgccagacactacaccaaggccatcgacatctgggccatcggctgcatcttcgccgagctgctgaccagcgagcccatcttccactgcagacaggaggacatcaagaccagcaaccccttccaccacgaccagctggacagaatcttcagcgtgatgggcttccccgccgacaaggactgggaggacatcagaaagatgcccgagtaccccaccctgcagaaggacttcagaagaaccacctacgccaacagcagcctgatcaagtacatggagaagcacaaggtgaagcccgacagcaaggtgttcctgctgctgcagaagctgctgaccatggaccccaccaagagaatcaccagcgagcaggccctgcaggacccctacttccaggaggaccccctgcccaccctggacgtgttcgccggctgccagatcccctaccccaagagagagttcctgaacgaggacgaccccgaggagaagggcgacaagaaccagcagcagcagcagaaccagcaccagcagcccaccgcccccccccagcaggccgccgcccccccccaggccccccccccccagcagaacagcacccagaccaacggcaccgccggcggcgccggcgccggcgtgggcggcaccggcgccggcctgcagcacagccaggacagcagcctgaaccaggtgccccccaacaagaagcccagactgggccccagcggcgccaacagcggcggccccgtgatgcccagcgactaccagcacagcagcagcagactgaactaccagagcagcgtgcagggcagcagccagagccagagcaccctgggctacagcagcagcagccagcagagcagccagtaccaccccagccaccaggcccacagatactag

SEQ ID NO: 113151 - DNA, 1326 bp, Artificial Sequence
  derived and/or modified sequence
agcctgaccagaaacatccagctgctgagagagctgaagcaccccaacgtgatcgccctgcagaaggtgttcctgagccacagcgacagaaaggtgtggctgctgttcgactacgccgagcacgacctgtggcacatcatcaagttccacagagccagcaaggccaacaagaagcccatgcagctgcccagaagcatggtgaagagcctgctgtaccagatcctggacggcatccactacctgcacgccaactgggtgctgcacagagacctgaagcccgccaacatcctggtgatgggcgagggccccgagagaggcagagtgaagatcgccgacatgggcttcgccagactgttcaacagccccctgaagcccctggccgacctggaccccgtggtggtgaccttctggtacagagcccccgagctgctgctgggcgccagacactacaccaaggccatcgacatctgggccatcggctgcatcttcgccgagctgctgaccagcgagcccatcttccactgcagacaggaggacatcaagaccagcaaccccttccaccacgaccagctggacagaatcttcagcgtgatgggcttccccgccgacaaggactgggaggacatcagaaagatgcccgagtaccccaccctgcagaaggacttcagaagaaccacctacgccaacagcagcctgatcaagtacatggagaagcacaaggtgaagcccgacagcaaggtgttcctgctgctgcagaagctgctgaccatggaccccaccaagagaatcaccagcgagcaggccctgcaggacccctacttccaggaggaccccctgcccaccctggacgtgttcgccggctgccagatcccctaccccaagagagagttcctgaacgaggacgaccccgaggagaagggcgacaagaaccagcagcagcagcagaaccagcaccagcagcccaccgcccccccccagcaggccgccgcccccccccaggccccccccccccagcagaacagcacccagaccaacggcaccgccggcggcgccggcgccggcgtgggcggcaccggcgccggcctgcagcacagccaggacagcagcctgaaccaggtgccccccaacaagaagcccagactgggccccagcggcgccaacagcggcggccccgtgatgcccagcgactaccagcacagcagcagcagactgaactaccagagcagcgtgcagggcagcagccagagccagagcaccctgggctacagcagcagcagccagcagagcagccagtaccaccccagccaccaggcccacagatactag

SEQ ID NO: 113152 - DNA, 756 bp, Artificial Sequence
  derived and/or modified sequence
atgagcgcctgcagagagatcgccctgctgagagagctgaagcaccccaacgtgatcgccctgcagaaggtgttcctgagccacagcgacagaaaggtgtggctgctgttcgactacgccgagcacgacctgtggcacatcatcaagttccacagagccagcaaggccaacaagaagcccatgcagctgcccagaagcatggtgaagagcctgctgtaccagatcctggacggcatccactacctgcacgccaactgggtgctgcacagagacctgaagcccgccaacatcctggtgatgggcgagggccccgagagaggcagagtgaagatcgccgacatgggcttcgccagactgttcaacagccccctgaagcccctggccgacctggaccccgtggtggtgaccttctggtacagagcccccgagctgctgctgggcgccagacactacaccaaggccatcgacatctgggccatcggctgcatcttcgccgagctgctgaccagcgagcccatcttccactgcagacaggaggacatcaagaccagcaaccccttccaccacgaccagctggacagaatcttcagcgtgatgggcttccccgccgacaaggactgggaggacatcagaaagatgcccgagtaccccaccctgcagaaggacttcagaagaaccacctacgccaacagcagcctgatcaagtacatggagaagcacaaggtgaagcccgacagcaaggtgttcctgctgtag

SEQ ID NO: 113153 - DNA, 5883 bp, Artificial Sequence
  derived and/or modified sequence
tctctgacaagaaacattcagcttttgcgagaattgaagcaccctaatgtgattgcattgcagaaggtgttcctttctcacagtgacaggaaggtatggctgctgtttgattatgcagagcatgacttgtggcatattattaagtttcaccgtgcatcaaaagcaaataaaaagcccatgcagttgccaagatctatggttaaatccttactttaccagattcttgatggtatccattacctccatgcaaattgggtgcttcacagagacttgaaaccagcaaatatcctagtaatgggagaaggtcctgagagggggagagtcaaaatagctgacatgggttttgccagattattcaattctcctctaaagccactagcagatttggatccagtagttgtgacattttggtatcgggctccagaacttttgcttggtgcaaggcattatacaaaggccattgatatatgggcaataggttgtatatttgctgaattgttgacttcggaacctatttttcactgtcgtcaggaagatataaaaacaagcaatccctttcatcatgatcaactggatcggatatttagtgtcatggggtttcctgcagataaagactgggaagatattagaaagatgccagaatatcccacacttcaaaaagactttagaagaacaacgtatgccaacagtagcctcataaagtacatggagaaacacaaggtcaagcctgacagcaaagtgttcctcttgcttcagaaactcctgaccatggatccaaccaagagaattacctcggagcaagctctgcaggatccctattttcaggaggaccctttgccaacattagatgtatttgccggctgccagattccataccccaaacgagaattccttaatgaagatgatcctgaagaaaaaggtgacaagaatcagcaacagcagcagaaccagcatcagcagcccacagcccctccacagcaggcagcagcccctccacaggcgcccccaccacagcagaacagcacccagaccaacgggaccgcaggtggggctggggccggggtcgggggcaccggagcagggttgcagcacagccaggactccagcctgaaccaggtgcctccaaacaagaagccacggctagggccttcaggcgcaaactcaggtggacctgtgatgccctcggattatcagcactccagttctcgcctgaattaccaaagcagcgttcagggatcctctcagtcccagagcacacttggctactcttcctcgtctcagcagagctcacagtaccacccatctcaccaggcccaccggtactgaccagctcccgttgggccaggccagcccagcccagagcacaggctccagcaatatgtctgcattgaaaagaaccaaaaaaatgcaaactatgatgccatttaaaactcatacacatgggaggaaaaccttatatactgagcattgtgcaggactgatagctcttctttattgacttaaagaagattcttgtgaagtttccccagcaccccttccctgcatgtgttccattgtgacttctctgataaagcgtctgatctaatcccagcacttctgtaaccttcagcatttctttgaaggatttcctggtgcacctttctcatgctgtagcaatcactatggtttatcttttcaaagctcttttaataggattttaatgttttagaaacaggattccagtggtgtatagttttatacttcatgaactgatttagcaacacaggtaaaaatgcaccttttaaagcactacgttttcacagacaataactgttctgctcatggaagtcttaaacagaaactgttactgtcccaaagtactttactattacgttcgtatttatctagtttcagggaaggtctaataaaaagacaagcggtgggacagagggaacctacaaccaaaaactgcctagatctttgcagttatgtgctttatgccacgaagaactgaagtatgtggtaatttttatagaatcattcatatggaactgagttcccagcatcatcttattctgaatagcattcagtaattaagaattacaattttaaccttcatgtagctaagtctaccttaaaaagggtttcaagagctttgtacagtctcgatggcccacaccaaaacgctgaagagagtaacaactgcactaggatttctgtaaggagtaattttgatcaaaagacgtgttacttccctttgaaggaaaagtttttagtgtgtattgtacataaagtcggcttctctaaagaaccattggtttcttcacatctgggtctgcgtgagtaactttcttgcataatcaaggttactcaagtagaagcctgaaaattaatctgcttttaaaataaagagcagtgttctccattcgtatttgtattagatatagagtgactatttttaaagcatgttaaaaatttaggttttattcatgtttaaagtatgtattatgtatgcataattttgctgttgttactgaaacttaattctatcaagaatctttttcattgcactgaatgatttcttttgcccctaggagaaaacttaataattgtgcctaaaaactatgggcggatagtataagactatactagacaaagtgaatatttgcatttccattatctatgaattagtggctgagttctttcttagctgctttaaggagcccctcactccccagagtcaaaaggaaatgtaaaaacttagagctcccattgtaatgtaaggggcaagaaatttgtgttcttctgaatgctactagcagcaccagccttgttttaaatgttttcttgagctagaagaaatagctgattattgtatatgcaaattacatgcatttttaaaaactattctttctgaacttatctacctggttatgatactgtgggtccatacacaagtaaaataagattagacagaagccagtatacattttgcactattgatgtgatactgtagccagccaggaccttactgatctcagcataataatgctcactaataatgaagtctgcatagtgacactcatcaagactgaagatgaagcaggttacgtgctccattggaaggagtttctgatagtctcctgctgttttaccccttccattttttaaaataagaaattagcagccctctgcataatgtagctgcctatatgcagttttatcctgtgccctaaagcctcactgtccagagctgttggtcatcagatgcttattgcaccctcaccatgtgcctggtgccctgctgggtagagaacacagaggacagggcatacttcttgtccttaaggagcttgtgatctgtgacagtaagccctcctgggatgtctgtgccatgtgattgacttacaagtgaaactgtcttataatatgaaggtctttttgtttacttctaaacccacttgggtagttactatccccaaatctgttctgtaaataatattatggaagggtttctatgtcagtctaccttagagaaagccagtgattcaatatcacaaaaggcattgacgtatctttgaaatgttcacagcagccttttaacaacaactgggtggtccttgtaggcagaacatactctcctaagtggttgtaggaaattgcaaggaaaatagaaggtctgttcttgctctcaaggaggttacctttaataaaagaagacaaacccagatagatatgtaaaccaaaatactatgccccttaatactttataagcagcattgttaaatagttcttacgcttatacattcacagaactaccctgttttccttgtatataatgacttttgctggcagaactgaaatataaactgtaaggggatttcgtcagttgctcccagtatacaatatcctccaggacatagccagaaatctccattccacacatgactgagttcctatccctgcactggtactggctcttttctcctctttccttgcctcagggttcgtgctacccactgattccctttacccttagtaataattttggatcattttctttcctttaaaggggaacaaagccttttttttttttgagacggagtgttgctctgtcacccaagctggagtgcagtggcacgatcttggctcactccaacctccaccttccaggttcaagtgattctcctgcctcagcctcccgagtagctgggactacgggcacgcaccaccacgtctggctaatttttgtatttttagtagagatggggtttcaccctattggtcaggctggtcttgaattcctcacctcaggtcatccgcctgtctcggcctcccgaagtgctgggattataggtgtgagccaccgcacccagttgggaacaaagcctttttaacacacgtaagggccctcaaaccgtgggacctctaaggagacctttgaagctttttgagggcaaactttacctttgtggtccccaaatgatggcatttctctttgaaatttattagatactgttatgtcccccaagggtacaggaggggcatccctcagcctatgggaacacccaaactaggaggggttattgacaggaaggaatgaatccaagtgaaggctttctgctcttcgtgttacaaaccagtttcagagttagctttctggggaggtgtgtgtttgtgaaaggaattcaagtgttgcaggacagatgagctcaaggtaaggtagctttggcagcagggctgatactatgaggctgaaacaatccttgtgatgaagtagatcatgcagtgacatacaaagaccaaggattatgtatatttttatatctctgtggttttgaaactttagtacttagaattttggccttctgcactactcttttgctcttacgaacataatggactcttaagaatggaaagggatgacatttacctatgtgtgctgcctcattcctggtgaagcaactgctacttgttctctatgcctctaaaatgatgctgttttctctgctaaaggtaaaagaaaagaaaaaaatagttggaaaataagacatgcaacttgatgtgcttttgagtaaatttatgcagcagaaactatacaatgaaggaagaattctatggaaattacaaatccaaaactctatgatgatgtcttcctagggagtagagaaaggcagtgaaatggcagttagaccaacagaggcttgaaggattcaagtacaagtaatattttgtataaaacatagcagtttaggtccccataatcctcaaaaatagtcacaaatataacaaagttcattgttttagggtttttaaaaaacgtgttgtacctaaggccatacttactcttctatgctatcactgcaaaggggtgatatgtatgtattatataaaaaaaaaaacccttaatgcactgttatctcctaaatatttagtaaattaatactatttaatttttttaaagatttgtctgtgtagacactaaaagtattacacaaaatctggactgaaggtgtcctttttaacaacaatttaaagtactttttatatatgttatgtagtatatcctttctaaactgcctagtttgtatattcctataattcctatttgtgaagtgtacctgttcttgtctcttttttcagtcattttctgcacgcatccccctttatatggttatagagatgactgtagcttttcgtgctccactgcgaggtttgtgctcagagccgctgcaccccagcgaggcctgctccatggagtgcaggacgagctactgctttggagcgagggtttcctgcttttgagttgacctgacttccttcttgaaatgactgttaaaactaaaataaattacattgcatttattttatattcttggttgaaataaaatttaattgactttg

SEQ ID NO: 113154 - DNA, 1329 bp, Artificial Sequence
  derived and/or modified sequence
atgtccgcttgccgggaaattgcattactccgtgagctcaaacacccaaatgtgatagctctccaaaaagtattcctgagtcattctgatcggaaagtgtggctcctttttgactacgctgagcacgacctgtggcatatcatcaaattccacagagcatcaaaggctaacaaaaagccaatgcagttgcccaggagcatggtcaagagcttgttgtatcagatattggacggtattcactacctacatgccaattgggtgctgcatcgagatttgaaacccgctaatatcctcgtcatgggggaaggccctgagcgcggtcgggtaaaaatcgcggacatgggatttgcacgcctatttaacagtccactgaagcctctagctgacctcgacccagtcgtcgtcacgttttggtaccgtgcccccgaacttctccttggcgcgcgccattacaccaaagccatcgacatttgggctatcggttgtatttttgccgaacttctgacatcagagccaatattccactgtcggcaagaggatatcaagacatctaacccctttcaccacgatcagttagatcgcattttttcagtcatgggcttccctgcagacaaggactgggaagatattagaaaaatgcctgagtaccctacactccaaaaagactttcggagaacaacatacgctaacagcagcctgatcaaatacatggaaaagcacaaagttaaacctgattctaaagtcttcttactgctccagaaactgctgaccatggatcccacaaagcgtattacctctgagcaggccctgcaagatccctatttccaggaagatccgcttcccacactggacgttttcgccgggtgtcagatcccatacccaaaaagagagtttcttaacgaagacgatccggaggagaaaggcgataagaatcagcagcagcagcaaaaccagcaccaacaacctactgctccacctcagcaggctgccgcaccacctcaagcgccccccccccagcagaactccacccagactaatggcaccgcaggcggcgcgggggcgggtgtcgggggaacgggtgctgggcttcagcatagtcaggactcatctctgaatcaagtgcctccaaataagaaaccgcgtctggggccctccggagcaaactctgggggccccgttatgccatctgactaccagcatagtagctcccgtctgaactaccaatcatccgttcagggctcttctcagagtcagtcaaccctcgggtactccagcagctctcagcaaagctctcaataccatcccagtcaccaagcccatcggtactag

SEQ ID NO: 113155 - DNA, 1326 bp, Artificial Sequence
  derived and/or modified sequence
agcctaacgaggaatatacaactccttcgagaactcaaacaccctaacgtgattgcgctgcaaaaggtgttcctttcacatagcgatcggaaagtctggttgttgttcgattacgccgagcacgatctgtggcacatcataaagtttcatcgggcctcaaaggctaacaagaagcctatgcaactccctaggtctatggtgaaatcacttttgtaccagattctggatggaatccattatcttcatgcaaactgggtgctccaccgtgatttaaaacccgccaatatcctcgtcatgggggaagggcccgagcgcggtcgcgtcaagatcgctgacatgggatttgcacgcctttttaactctcccctgaaacccttggctgacctggaccccgtggtggtcacattctggtacagggctccagagctccttctcggcgctcggcattacaccaaagcaattgacatttgggcaatcggctgcatattcgctgagctcctcaccagcgaacctatcttccactgccggcaggaagatatcaagaccagtaacccgttccaccatgatcagttagaccgcatcttctctgtcatggggtttcccgcggataaagattgggaagacattcgtaagatgccagaatatcccaccctgcagaaggactttcggagaacgacgtatgccaactctagtctcattaagtacatggagaaacacaaagtgaagcctgactccaaggtgtttctccttctgcagaagctgttaaccatggaccccaccaagcgcattacatccgaacaggcactacaggacccctacttccaggaagatcctttgcctaccctggatgtgttcgcaggctgtcagatcccataccctaagcgggagtttttgaacgaggacgatcctgaggaaaaaggtgacaagaatcagcagcagcaacagaatcagcaccagcagcccaccgctccaccacagcaagcggcggctccacctcaagcaccacctccccaacagaatagtacgcagaccaacggcacagccgggggggcgggggctggcgtaggagggaccggtgccggcctgcagcactcccaggactccagtctgaatcaggtgccaccaaataaaaagccccgactcgggccgagcggggccaacagtggtggcccggttatgccaagcgactaccagcattcttcctccaggttaaattatcaaagctctgtacaaggcagttcacaatcccagtctactcttggctacagtagttcgtcacagcaatcctctcagtatcatcctagtcaccaagcccacagatactag

SEQ ID NO: 113156 - DNA, 756 bp, Artificial Sequence
  derived and/or modified sequence
atgtccgcctgtagagaaattgcacttctacgggagctgaagcaccccaatgtgattgctctgcagaaggtcttcttgtcccactctgaccggaaggtatggctgctgtttgactatgccgagcatgacctgtggcacatcatcaagtttcatcgagcctccaaggcaaataagaaacccatgcaacttccccggtcgatggtcaaatctctactatatcagattctggacggaattcactatctccacgctaattgggtactccaccgcgatcttaaacccgccaatattcttgtcatgggggaagggcctgaacgcggacgcgttaaaatcgccgacatggggtttgccagactgttcaacagccccttaaagcctctagccgacctcgaccctgtggtggtgactttttggtacagagcaccagaactgttgttgggcgcccgccactatacaaaagccatcgacatctgggcaattgggtgtatctttgcagaactactcacatccgagcccatctttcattgcaggcaggaagacatcaaaacttccaatcctttccaccatgaccagctggaccgaatcttttcagtcatgggctttcctgcagacaaggattgggaggacattcgaaaaatgccagagtacccaaccctgcagaaggacttccgacggaccacgtacgcgaactcgtccttgatcaaatacatggaaaaacacaaggttaagccagatagcaaagtctttctgctctag

SEQ ID NO: 113157 - DNA, 1329 bp, Artificial Sequence
  derived and/or modified sequence
atgtctgcctgccgggagatcgccctgctgcgggagctgaagcaccccaacgtgattgccctgcagaaggtgttcctgagccacagcgacaggaaggtgtggctgctgtttgattatgcagagcatgacctgtggcacatcatcaagttccaccgggccagcaaggccaacaagaagcccatgcagctgcccaggtccatggtgaagagcctgctgtaccagatcctggatggcatccactacctgcacgccaactgggtgctgcaccgggacctgaagccagccaacatcctggtgatgggagagggccctgagcggggccgggtgaagattgctgacatgggctttgcccggctcttcaacagccccctgaagcccctggccgacctggaccctgtggtggtgaccttctggtaccgggcccctgagctgctgctgggcgcccggcactacaccaaggccatcgacatctgggccatcggctgcatctttgctgagctgctgaccagcgagcccatcttccactgccggcaggaggacatcaagaccagcaaccccttccaccacgaccagctggaccgcatcttctctgtgatgggcttccctgctgacaaggactgggaggacatcaggaagatgcctgagtaccccaccctgcagaaggacttccggaggaccacctacgccaacagcagcctcatcaagtacatggagaagcacaaggtgaagccagacagcaaggtgttcctgctgctgcagaagctgctgaccatggaccccaccaagaggatcaccagcgagcaggccctgcaggacccctacttccaggaggaccccctgcccaccctggatgtgtttgctggctgccagatcccctaccccaagcgggagttcctgaatgaagatgatcctgaggagaagggggacaagaaccagcagcagcagcagaaccagcaccagcagcccacagccccaccccagcaggccgccgccccaccccaggcccccccaccccagcagaacagcacccagaccaacggcacagctggaggagctggggccggcgtgggcggcactggagctggcctgcagcacagccaggacagcagcctgaaccaggtgccccccaacaagaagccccggctgggccccagcggggccaacagcggcggccctgtgatgcccagcgactaccagcacagcagcagccggctgaactaccagagctctgtgcagggcagcagccagagccagagcaccctgggctacagcagcagcagccagcagagcagccagtaccaccccagccaccaggcccaccgctactag

SEQ ID NO: 113158 - DNA, 1326 bp, Artificial Sequence
  derived and/or modified sequence
agcctgaccaggaacatccagctgctgcgggagctgaagcaccccaacgtcatcgccctgcagaaggtgttcctgagccacagcgacaggaaggtgtggctgctgtttgattatgcagagcatgacctgtggcacatcatcaagttccaccgggccagcaaggccaacaagaagcccatgcagctgcccaggtccatggtgaagagcctgctgtaccagatcctggatggcatccactacctgcacgccaactgggtgctgcaccgggacctgaagccagccaacatcctggtgatgggagagggccctgagcggggccgggtgaagattgctgacatgggctttgcccggctcttcaacagccccctgaagcccctggccgacctggaccctgtggtggtgaccttctggtaccgggcccctgagctgctgctgggcgcccggcactacaccaaggccatcgacatctgggccatcggctgcatctttgctgagctgctgaccagcgagcccatcttccactgccggcaggaggacatcaagaccagcaaccccttccaccacgaccagctggaccgcatcttctctgtgatgggcttccctgctgacaaggactgggaggacatcaggaagatgcctgagtaccccaccctgcagaaggacttccggaggaccacctacgccaacagcagcctcatcaagtacatggagaagcacaaggtgaagccagacagcaaggtgttcctgctgctgcagaagctgctgaccatggaccccaccaagaggatcaccagcgagcaggccctgcaggacccctacttccaggaggaccccctgcccaccctggatgtgtttgctggctgccagatcccctaccccaagcgggagttcctgaatgaagatgatcctgaggagaagggggacaagaaccagcagcagcagcagaaccagcaccagcagcccacagccccaccccagcaggccgccgccccaccccaggcccccccaccccagcagaacagcacccagaccaatggaacagctgggggcgctggggccggcgtgggcggcaccggggccggcctgcagcacagccaggacagcagcctgaaccaggtgccccccaacaagaagccccggctgggccccagcggggccaacagcggcggccctgtgatgcccagcgactaccagcacagcagcagccggctgaactaccagagctctgtgcagggcagcagccagagccagagcaccctgggctacagcagcagcagccagcagagcagccagtaccaccccagccaccaggcccaccgctactag

SEQ ID NO: 113159 - DNA, 756 bp, Artificial Sequence
  derived and/or modified sequence
atgtctgcctgccgggagatcgccctgctgcgggagctgaagcaccccaacgtgattgccctgcagaaggtgttcctgagccacagcgacaggaaggtgtggctgctgtttgattatgcagagcatgacctgtggcacatcatcaagttccaccgggccagcaaggccaacaagaagcccatgcagctgcccaggtccatggtgaagagcctgctgtaccagatcctggatggcatccactacctgcacgccaactgggtgctgcaccgggacctgaagccagccaacatcctggtgatgggagagggccctgagcggggccgggtgaagattgctgacatgggctttgcccggctcttcaacagccccctgaagcccctggccgacctggaccctgtggtggtgaccttctggtaccgggcccctgagctgctgctgggcgcccggcactacaccaaggccatcgacatctgggccatcggctgcatctttgctgagctgctgaccagcgagcccatcttccactgccggcaggaggacatcaagaccagcaaccccttccaccacgaccagctggaccgcatcttctctgtgatgggcttccctgctgacaaggactgggaggacatcaggaagatgcctgagtaccccaccctgcagaaggacttccggaggaccacctacgccaacagcagcctcatcaagtacatggagaagcacaaggtgaagccagacagcaaggtgttcctgctgtag

SEQ ID NO: 113160 - DNA, 1329 bp, Artificial Sequence
  derived and/or modified sequence
atgagcgcctgccgggagatcgccctgctgcgggagctgaagcaccctaacgtgatcgcgctccagaaagtgttcctgtcacacagcgaccggaaagtctggctcctttttgactacgcggaacatgacctgtggcacattattaagttccatcgcgctagcaaagcaaacaagaagcctatgcagcttccgcgtagcatggtcaaaagtctgctttaccagatccttgatggcatccactatttacacgctaactgggttctgcacagggacttaaaaccagccaacatcctcgtcatgggcgaaggccccgagagaggacgggttaaaattgcagacatggggtttgctagattgttcaattccccattgaaacctttagctgacctggatccagttgtggtcacattctggtaccgcgctcctgaactgttgctcggggctcgtcactacaccaaagcaatagacatttgggccatcggctgtatcttcgccgaattgttgacatccgaacccattttccattgtcgacaagaggacataaagacatctaatccgttccatcacgatcagttggacaggatcttttcggtcatgggatttcccgctgataaggactgggaggacatccggaagatgccagaataccctaccctgcagaaggacttcaggcggacaacctacgcaaatagcagcctgataaaatacatggagaaacacaaggtcaagcccgactctaaggtctttttattgctacagaagcttctgacaatggacccaacaaagcggattaccagtgagcaagcactccaagatccctattttcaggaagacccgttgccaaccctggacgtcttcgcggggtgccaaatcccctaccccaagagagagttcttgaatgaagatgatcccgaggaaaaaggtgacaagaaccagcagcagcagcagaaccagcaccaacagcccacagctccacctcaacaggccgctgctcccccacaggctcccccacctcagcagaactctactcagactaacggaactgccggcggggcaggtgccggcgttggaggtaccggagccgggctgcagcacagccaggactcttcactaaatcaggtgcccccgaataagaaacctaggcttgggcctagcggcgccaacagcggggggccagtgatgccgtccgattatcagcactctagttcccgtctaaactaccagagtagcgtgcagggcagctctcagtcacagtctactcttgggtactcatcctcctcacagcagagctcacagtaccacccgagtcatcaggctcacagatactag

SEQ ID NO: 113161 - DNA, 1326 bp, Artificial Sequence
  derived and/or modified sequence
agcctgacccggaacatccagctgctgcgggagctgaagcaccccaacgtgattgcgctccagaaggtgtttctgagtcactcagacagaaaggtgtggctgttgtttgattacgccgaacacgatctttggcacattatcaagttccaccgtgcgtccaaggccaacaaaaagccaatgcagttgcctaggagcatggtaaaatccttgctttaccagattctcgatgggattcattacctccacgccaactgggtgctgcaccgggacttaaagccagccaacattcttgtgatgggtgagggtccggagaggggtagggtcaaaatcgcagacatggggtttgccaggttgttcaattctccactgaagccactcgccgaccttgacccggtggtggtaaccttttggtatcgggcgccggaacttttgctgggcgccagacactacacgaaggccattgacatatgggcaatcggctgtattttcgccgaattactcacttcagaaccgatattccattgccggcaggaagatatcaagacctccaatccttttcaccacgaccaactcgacagaatattctctgtgatggggtttcccgctgacaaggattgggaggacataaggaagatgccggagtacccgacactccagaaggattttaggaggactacctacgcaaattcgtcgctcatcaagtacatggaaaagcataaagttaagccggattcaaaagtcttcctgctcttgcagaagctcttgaccatggaccccacaaaaaggattacgagcgaacaggcactgcaggatccctactttcaggaggatcccctgcccaccctggatgtgtttgccgggtgtcagatcccctaccctaagagggagtttcttaatgaggacgaccccgaggaaaaaggtgacaaaaaccagcagcagcaacagaaccagcatcagcagcctaccgcgccgcctcagcaggccgctgcacccccacaggcccctcccccgcagcagaattctacccagaccaatgggaccgctgggggggcaggagctggagtagggggcaccggagccggcctgcagcatagccaggatagctcattgaaccaggtgccaccgaacaagaaacctcgtttgggaccaagcggggcaaattctggcggcccagtgatgccttctgactatcaacattccagttctaggctgaactatcaaagctcagttcagggctcatcgcagagtcagagcactttaggctatagcagctccagtcagcagtctagtcagtatcacccttcccaccaagctcacagatactag

SEQ ID NO: 113162 - DNA, 756 bp, Artificial Sequence
  derived and/or modified sequence
atgagcgcctgccgggagatcgccctgctgcgggagctgaagcaccctaacgtgattgccttgcagaaggtgtttctgagccatagcgacagaaaagtctggcttcttttcgattacgcggaacatgatctctggcacatcatcaaatttcacagagcatccaaagccaacaaaaaacctatgcaactgcctagaagcatggtgaagagtctcctttaccagatactcgacgggatccactatttacacgccaattgggtcctgcacagggatctgaaaccagctaatattctggtcatgggtgaggggcctgaaaggggtagagtcaagatagccgacatgggatttgctaggctgtttaactcaccactcaaacccctcgcagacctggaccccgttgtggttacattctggtacagagcccctgaactgctgttgggcgcacgccattataccaaggcaatcgatatctgggcaattggatgcatattcgctgaattgctgaccagcgagccaatctttcattgcaggcaggaggacataaaaacgagtaacccgtttcaccacgatcagctcgatagaattttcagcgtgatgggcttccctgcagataaagattgggaggacatcaggaagatgcccgagtaccctactctacagaaagattttagacgtaccacctacgctaattcttccttaattaagtacatggagaagcataaagtgaagcctgattccaaagtttttctgctctag

SEQ ID NO: 113163 - DNA, 1329 bp, Artificial Sequence
  derived and/or modified sequence
atgagcgcatgtagagagatcgccctgttgcgggaactcaagcaccccaatgttatcgccctgcaaaaggtgtttctcagccacagtgataggaaggtgtggctactgttcgactatgccgagcatgatctgtggcacatcatcaaattccatcgggcttccaaagctaacaagaaacctatgcagttgccgcgatctatggtgaagtctctgctgtaccagatcctggacggcatccactacctgcatgctaactgggtgttacaccgcgatctgaagccagccaatattctggtcatgggcgaaggccctgaacggggacgtgtcaagatagcagacatgggtttcgcgaggctgtttaattctcctttgaaaccccttgcagacctggatcctgtggtcgttacattttggtaccgggcacccgagttgctgttgggtgcaaggcactacacaaaggcaattgacatctgggccattggttgcatctttgctgagctgctgacaagtgagcccatttttcactgccgacaggaggacattaagacatccaaccccttccaccatgaccaactggaccgtattttttcagtcatgggctttcccgctgacaaggactgggaggatatacgcaagatgccagagtaccctacactgcagaaggatttcaggcgcactacgtacgccaatagtagtcttataaagtatatggagaaacacaaagtgaagccggactcaaaagtctttctgctgttacagaaactgctgaccatggatcccaccaaaaggattacctccgaacaggccttacaagatccatacttccaagaagatcctctgcccacattggatgtatttgccggatgccagattccctacccaaagcgcgagttcctcaatgaggacgatcctgaggaaaaaggggataaaaaccagcagcagcagcagaaccagcatcagcaacccactgcgccaccgcagcaagccgcagccccaccacaggcacccccaccccagcaaaattcaactcagactaacggaaccgcgggaggcgctggagcaggcgtgggaggaaccggcgcaggcctgcagcactcgcaggacagctctctgaatcaggtgcccccaaataaaaaaccacgcctggggccaagcggcgctaatagcgggggacccgtcatgccttcagactaccagcactcctcctcgcgactcaattaccaatcgtctgtccagggaagcagccaaagccagtcaactcttgggtattcctccagcagccagcagagctcccaatatcacccttcacaccaggctcataggtattag

SEQ ID NO: 113164 - DNA, 1326 bp, Artificial Sequence
  derived and/or modified sequence
tcactcacaagaaacattcagctactgcgggagctaaaacaccccaacgtcatagcactccagaaggtgttcttgtcgcacagcgatcggaaagtgtggcttctcttcgattatgcagaacatgatctctggcacattattaaatttcacagagcctccaaagccaataagaagcccatgcagctcccgcgttctatggtgaagagcttactttatcagatattagatgggattcactatctgcacgccaattgggtactccatagagatctgaaaccagcaaatattctggtaatgggagagggtcccgagagagggagggtgaaaatagcagatatggggttcgcccgactctttaattcacctcttaagcctttagccgatttagatccagttgtggtgactttctggtacagggctcccgagttgttgctcggagctagacactatacaaaagcgatcgacatttgggctattggatgcatctttgcagaattgctgacaagtgagccaattttccattgtcgccaggaggatatcaaaacctccaatccatttcatcacgatcagctggatcggatcttttctgttatgggatttccagcagataaagactgggaggatattagaaaaatgcccgagtatcccactctgcagaaggacttcagacggacaacctacgctaattcctcacttataaaatacatggagaagcacaaggtgaagcccgactccaaggtgtttttgctccttcaaaaacttctaacgatggacccaacaaaaagaattacttccgagcaggcgttacaggatccctattttcaggaagaccctttgcctaccctcgacgtgttcgctggttgtcagattccatatccaaagagagagttcctgaatgaagacgatcctgaggagaaaggtgataaaaaccagcagcagcagcagaaccagcatcaacagccaactgctcccccacaacaagccgctgccccaccccaagcaccccctcctcagcaaaacagcactcagactaatggaaccgctggcggagccggagccggtgtgggcggaactggcgcagggttgcagcactcccaggactcttccctgaatcaggtcccacccaacaagaagccacgattgggcccaagcggggctaattccggcggtcccgtcatgccttccgactaccagcatagctcttcccgcctcaattatcagagctcggtgcagggcagcagccagagtcagtccacccttggctattcttcttcaagccaacaatccagtcagtaccacccttctcaccaggcccatagatattag

SEQ ID NO: 113165 - DNA, 756 bp, Artificial Sequence
  derived and/or modified sequence
atgtcagcgtgcagggagattgctctgctgcgagagttgaagcaccctaatgtcattgcactacagaaggtatttcttagtcacagtgacaggaaagtgtggttgctctttgactatgcggagcatgatctgtggcatatcattaagttccacagagccagcaaggccaacaagaagcccatgcaactgccacgctctatggtcaaatccctcctataccagatcctggacggcattcactatttgcatgctaactgggtcctccacagagacttaaagccagctaacatcctggtaatgggcgaaggacccgagagaggcagagtaaagatagccgacatgggttttgcgagactgtttaatagccccctgaagcccctggcagacctggaccctgtagtagtgaccttctggtatagagccccagagttgctgctgggtgccagacactatactaaagccatagatatatgggctataggttgtatctttgccgagctgctcacaagcgagccgatatttcactgtcggcaggaggatatcaagacctcaaatccatttcaccacgatcagctcgatcgaattttcagtgtcatggggttcccagccgataaggattgggaggatattcgcaagatgcccgaatatccaaccctacagaaagattttcggagaaccacatacgcgaatagctcactcattaagtatatggaaaagcataaagtgaaacccgatagcaaggtttttttattgtag

SEQ ID NO: 113166 - protein, 193 aa, Artificial Sequence
  derived and/or modified sequence
MPVWGGGNKCGACGRTVYHAEEVQCDGRSFHRCCFLCMVCRKNLDSTTVAIHDEEIYCKSCYGKKYGPKGYGYGQGAGTLNMDRGERLGIKPESVQPHRPTTNPNTSKFAQKYGGAEKCSRCGDSVYAAEKIIGAGKPWHKNCFRCAKCGKSLESTTLTEKEGEIYCKGCYAKNFGPKGFGYGQGAGALVHAQ

SEQ ID NO: 113167 - DNA, 901 bp, Artificial Sequence
  derived and/or modified sequence
gggatctcggactccctggaccctccctccagcccagcctcgctagctccgcctgcggtacgtgctcccgcctccgactcaaaatgcctgtctggggaggtggaaacaagtgtggggcctgtgggaggaccgtgtaccacgcagaagaggtgcagtgtgatggcaggagcttccaccgctgctgctttctctgcatggtttgcaggaaaaatttagatagcacaacagtggcaattcacgatgaagagatctactgcaaatcctgctacggaaagaagtatgggccaaaaggctacggttatggccagggcgctggcacgcttaacatggaccgtggcgagaggctgggcatcaaaccagagagtgttcagcctcacaggcctacaacaaatccaaacacttctaaatttgctcagaaatatggaggtgctgagaagtgttccagatgtggggattctgtatatgctgccgagaagataattggagctggaaagccctggcacaaaaactgtttccgatgtgcaaagtgtgggaagagtcttgaatcaacaactctgactgaaaaagaaggtgaaatctattgtaaaggatgctatgcaaagaactttgggcccaagggatttggctatggccaaggagcaggggctcttgttcatgcccagtaagatgtaaaccctgaactaaacatcacacactgagaatctcttcataatctaggcacagataatctttaacactaaactactgtgaaattctaccagcattaagtactgtatatcgccctgtacttggataggctggctaactcgtaggaagagagcactgtatggtatccttttgctttattcaccagcattttgggggaacatttcttttacattttaaataaaacttcagcttg

SEQ ID NO: 113168 - DNA, 582 bp, Artificial Sequence
  derived and/or modified sequence
atgcccgtgtgggggggcgggaataaatgcggagcgtgtggccgtacagtgtaccatgcagaggaggtccaatgtgacggacgcagctttcaccggtgttgcttcttgtgcatggtgtgtaggaaaaatctcgacagtacgaccgtggccatccatgatgaggaaatttactgtaaaagctgttacggaaagaagtatggccccaaaggttacgggtacggacaaggggctgggaccctgaatatggatagaggcgaacggcttggcattaaacctgaatccgttcagccgcaccgcccgacgactaaccccaacacatctaaattcgcacagaaatacggtggcgctgagaaatgctcaaggtgtggcgacagcgtgtatgcagcagagaaaattataggagccggtaagccctggcacaagaactgcttccgatgtgccaaatgtggaaaatctctggaaagtacaaccttgacagagaaggagggcgagatctactgcaaaggctgctatgcaaaaaattttggccctaaggggtttggatatggacagggtgctggcgctcttgtgcatgcccagtag

SEQ ID NO: 113169 - DNA, 582 bp, Artificial Sequence
  derived and/or modified sequence
atgccagtttggggtggtggtaataagtgcggcgcgtgcggcaggacagtgtaccacgctgaggaggtacagtgcgacggcaggtcatttcaccgctgttgctttctgtgtatggtttgccgtaagaatctagacagcaccacggtcgccatccatgatgaggaaatttactgcaagtcctgctacggcaaaaaatacggccctaagggttacggctatgggcagggcgctggcactctcaatatggatcgcggggagcggcttggtatcaaaccagaatctgtccagccccacaggccaactacaaatcccaatacgtcaaagttcgcacagaaatatggtggagcagaaaagtgttcccgctgcggtgactctgtttacgctgctgagaagatcataggagcgggtaaaccatggcacaagaattgcttcaggtgcgccaagtgcgggaagtctctggaatccactactctgactgagaaagagggtgaaatttactgcaagggctgttatgccaagaatttcggcccgaagggctttggctacgggcagggagcgggagccctggtgcacgcacagtag

SEQ ID NO: 113170 - DNA, 582 bp, Artificial Sequence
  derived and/or modified sequence
atgcctgtgtggggcggcggcaacaagtgtggggcctgtggccgcacagtgtaccacgccgaggaggtgcagtgtgatggccgctccttccaccgctgctgcttcctgtgcatggtgtgcaggaagaacctggacagcaccaccgtggccatccatgatgaggagatctactgcaagagctgctacggcaagaagtatggccccaagggctacggctacggccagggcgccggcaccctgaacatggacagaggagagcggctgggcatcaagccagagagcgtgcagccccaccggcccaccaccaaccccaacaccagcaagtttgcccagaagtatggaggagctgagaagtgcagccgctgtggggacagcgtgtatgctgctgagaagatcattggagctgggaagccctggcacaagaactgcttccgctgtgccaagtgtgggaagagcctggagagcaccaccctgacagagaaggagggggagatctactgcaagggctgctacgccaagaactttggccccaagggcttcggctacggccagggcgctggggccctggtgcacgcccagtag

SEQ ID NO: 113171 - DNA, 582 bp, Artificial Sequence
  derived and/or modified sequence
atgcccgtgtggggcggcggcaacaagtgcggcgcctgcggccggactgtttaccacgctgaagaggttcagtgcgatggacgatctttccacagatgctgtttcttgtgcatggtatgcagaaaaaacctcgattccacaacggtggccattcacgacgaggagatttattgcaaaagctgctacgggaaaaagtacggccctaagggatacggatatggccagggtgccggaaccctgaacatggatcggggcgagcggctcgggattaaaccggagtctgttcagccgcacaggcctacaactaatcccaataccagcaaatttgctcagaaatacggaggggccgagaagtgctcccgctgtggcgactccgtttatgcagcagagaagatcatcggggcaggtaaaccttggcacaagaattgcttccgttgtgctaagtgtggaaagtctctggaatctacaactcttacagagaaggaaggcgagatctattgcaagggatgttacgctaagaattttggtccaaaaggattcgggtatgggcagggggcaggcgctttggttcacgcccagtag

SEQ ID NO: 113172 - DNA, 582 bp, Artificial Sequence
  derived and/or modified sequence
atgcccgtgtggggcggcggcaacaagtgcggcgcctgcggccggacagtttaccacgctgaagaagttcaatgcgatgggcgctctttccatcgttgctgcttcctgtgtatggtctgcagaaagaatcttgattccacaaccgtcgccatccacgacgaagagatttactgcaagagttgttacggcaaaaagtacggccccaagggctacgggtacggacagggcgctggcacgttgaacatggatcggggcgaacgcttaggtattaagccagaatcggtgcagccccaccgccccacaactaaccccaatactagcaaatttgcacaaaagtatggcggcgcagagaaatgttcccgatgtggcgactcagtgtatgccgccgagaaaataatcggcgctggcaagccctggcataagaattgcttcagatgtgcaaagtgtggcaagtcacttgagtctactacacttacagaaaaggagggggagatttattgcaaaggttgttatgccaaaaactttggcccgaaaggcttcgggtacggccaaggggctggcgcactagtccatgcacagtag

SEQ ID NO: 113173 - DNA, 582 bp, Artificial Sequence
  derived and/or modified sequence
atgcccgtgtgggggggagggaataaatgcggcgcttgcggacgcactgtgtaccacgccgaagaggtgcagtgtgacggtcgaagttttcaccggtgttgctttctgtgtatggtctgcagaaaaaacctcgatagcaccacggtggctatccatgacgaggagatctactgtaagtcatgctacggcaagaagtatgggccaaagggctatggatatggacaaggtgccggtacactgaacatggacaggggggaacggctgggaatcaaacctgagagcgtacagccccaccggcctacgaccaatccaaatacatccaaatttgcccagaagtacggcggagcagaaaagtgtagcagatgtggtgactcagtctacgctgctgagaaaatcatcggagcaggcaaaccatggcacaagaactgttttaggtgcgcgaaatgtggcaagtcacttgagtccactactctgacggaaaaggaaggcgagatctattgtaagggatgctatgccaagaattttggccctaagggctttgggtacggtcagggagcaggcgctctcgtgcatgcccagtag

SEQ ID NO: 113174 - DNA, 582 bp, Artificial Sequence
  derived and/or modified sequence
atgcccgtctggggaggaggcaacaaatgcggggcttgcggaaggacagtgtaccacgctgaagaggtgcagtgcgatggcaggagcttccatagatgctgtttcctgtgcatggtctgccggaaaaatttggattccacgactgtagccatacacgatgaggaaatctactgcaagtcttgttacggtaagaaatacggcccaaagggttacggttacggccagggggcaggaactctcaatatggacaggggtgaaagactcggtatcaaacccgagagtgtccagccccataggcctaccaccaaccctaatacctccaaatttgctcagaaatatggaggcgcagagaaatgcagccgctgtggggacagcgtttatgccgctgagaaaatcataggcgctggtaagccctggcataaaaattgctttaggtgtgctaaatgcggtaaaagcttagagtcaactactctgactgaaaaggagggagaaatatattgcaaagggtgttatgctaaaaacttcggtccaaaggggttcggctatggacagggcgcaggcgcactcgtgcacgcacagtag

SEQ ID NO: 113175 - DNA, 943 bp, Artificial Sequence
  derived and/or modified sequence
caccgagcgctctttaaaaggcaccggcgcgcgcttcgcctgggatctcggactccctggaccctccctccagcccagcctcgctagctccgcctgcggtacgtgctcccgcctccgactcaaaatgcctgtctggggaggtggaaacaagtgtggggcctgtgggaggaccgtgtaccacgcagaagaggtgcagtgtgatggcaggagcttccaccgctgctgctttctctgcatggtttgcaggaaaaatttagatagcacaacagtggcaattcacgatgaagagatctactgcaaatcctgctacggaaagaagtatgggccaaaaggctacggttatggccagggcgctggcacgcttaacatggaccgtggcgagaggctgggcatcaaaccagagagtgttcagcctcacaggcctacaacaaatccaaacacttctaaatttgctcagaaatatggaggtgctgagaagtgttccagatgtggggattctgtatatgctgccgagaagataattggagctggaaagccctggcacaaaaactgtttccgatgtgcaaagtgtgggaagagtcttgaatcaacaactctgactgaaaaagaaggtgaaatctattgtaaaggatgctatgcaaagaactttgggcccaagggatttggctatggccaaggagcaggggctcttgttcatgcccagtaagatgtaaaccctgaactaaacatcacacactgagaatctcttcataatctaggcacagataatctttaacactaaactactgtgaaattctaccagcattaagtactgtatatcgccctgtacttggataggctggctaactcgtaggaagagagcactgtatggtatccttttgctttattcaccagcattttgggggaacatttcttttacattttaaataaaacttcagcttga

SEQ ID NO: 113176 - DNA, 754 bp, Artificial Sequence
  derived and/or modified sequence
gcctgggatctcggactccctggaccctccctccagcccagcctcgctagctccgcctgcgaatgcctgtctggggaggtggaaacaagtgtggggcctgtgggaggaccgtgtaccacgcagaagaggtgcagtgtgatggcaggagcttccaccgctgctgctttctctgcatggtttgcaggaaaaatttagatagcacaacagtggcaattcacgatgaagagatctactgcaaatcctgctacggaaagaagtatgggccaaaaggctacggttatggccagggcgctggcacgcttaacatggaccgtggcgagaggctgggcatcaaaccagagagtgttcagcctcacaggcctacaacaaatccaaacacttctaaatttgctcagaaatatggaggtgctgagaagtgttccagatgtggggattctgtatatgctgccgagaagataattggagctggaaagccctggcacaaaaactgtttccgatgtgcaaagtgtgggaagagtcttgaatcaacaactctgactgaaaaagaaggtgaaatctattgtaaaggatgctatgcaaagaactttgggcccaagggatttggctatggccaaggagcaggggctcttgttcatgcccagtaagatgtaaaccctgaactaaacatcacacactgagaatctcttcataatctaggcacagataatctttaacactaaactactgtgaaattctaccagcattaagtactgta

SEQ ID NO: 113177 - DNA, 582 bp, Artificial Sequence
  derived and/or modified sequence
atgcccgtgtggggcggcggcaacaagtgcggcgcctgcggcagaaccgtgtaccacgccgaggaggtgcagtgcgacggcagaagcttccacagatgctgcttcctgtgcatggtgtgcagaaagaacctggacagcaccaccgtggccatccacgacgaggagatctactgcaagagctgctacggcaagaagtacggccccaagggctacggctacggccagggcgccggcaccctgaacatggacagaggcgagagactgggcatcaagcccgagagcgtgcagccccacagacccaccaccaaccccaacaccagcaagttcgcccagaagtacggcggcgccgagaagtgcagcagatgcggcgacagcgtgtacgccgccgagaagatcatcggcgccggcaagccctggcacaagaactgcttcagatgcgccaagtgcggcaagagcctggagagcaccaccctgaccgagaaggagggcgagatctactgcaagggctgctacgccaagaacttcggccccaagggcttcggctacggccagggcgccggcgccctggtgcacgcccagtag

SEQ ID NO: 113178 - protein, 757 aa, Artificial Sequence
  derived and/or modified sequence
LAKKITLKKKLEEEEAEVKRKATDAAYQARQAVKTPPRRLPTVMVRSPIDSASPGGDYPLGDLTPTTMEEATSGVTPGTLPSTPVTSFPGIPDTLPPGSAPLEAPMTPVTDDSPQKKMLGQKATPPPSPLLSELLKKGSLLPTSPRLVNESEMAVASGHLNSTGVLLEVGGVLPMIHGGEIQQTPNTVAASPAASESVSQATIVMMPALPAPSSAPAVSTTESVAPVSQPDNCVPMEAVGDPHTVTVSMDSSEISMIINSIKEECFRSGVAEAPVGSKAPSIDGKEELDLAEKMDIAVSYTGEELDFETVGDIIAIIEDKVDDHPEVLDVAAVEAALSFCEENDDPQSLPGPWEHPIQQERDKPVPLPAPEMTVKQERLDFEETENKGIHELVDIREPSAEIKVEPAEPEPVISGAEIVAGVVPATSMEPPELRSQDLDEELGSTAAGEIVEADVAIGKGDETPLTNVKTEASPESMLSPSHGSNPIEDPLEAETQHKFEMSDSLKEESGTIFGSQIKDAPGEDEEEDGVSEAASLEEPKEEDQGEGYLSEMDNEPPVSESDDGFSIHNATLQSHTLADSIPSSPASSQFSVCSEDQEAIQAQKIWKKAIMLVWRAAANHRYANVFLQPVTDDIAPGYHSIVQRPMDLSTIKKNIENGLIRSTAEFQRDIMLMFQNAVMYNSSDHDVYHMAVEMQRDVLEQIQQFLATQLIMQTSESGISAKSLRGRDSTRKQDASEKDGGTRGRRCAIEADMKMKK

SEQ ID NO: 113179 - DNA, 318 bp, Artificial Sequence
  derived and/or modified sequence
atgtgccaggggggtgattttacaagacacaacgggacaggcggtaagagtatttatggcgagaaattcgaagatgaaaatttcatcctaaagcacaccggacccggcatcctcagcatggctaacgcagggccaaacactaatggttcccagttttttatttgcactgcgaagacagagtggctggatgggaagcatgtggtgttcggcaaggtcaaagaaggtatgaacatcgtggaggcaatggagcgttttggcagcagaaacggcaagacatctaagaaaatcactattgctgactgtggacagctggaatag

SEQ ID NO: 113180 - DNA, 318 bp, Artificial Sequence
  derived and/or modified sequence
atgtgccagggcggggacttcaccaggcacaatggaactggaggcaagagcatctatggagagaagtttgaagatgagaacttcatcctgaagcacactggacctggcatcctgtccatggccaatgccggccccaacaccaacggcagccagttcttcatctgcacagccaagacagagtggctggatggcaagcacgtggtgtttgggaaggtgaaggagggcatgaacatcgtggaggccatggagagatttggcagcagaaatggcaagaccagcaagaagatcaccatcgctgactgtggccagctggagtag

SEQ ID NO: 113181 - DNA, 318 bp, Artificial Sequence
  derived and/or modified sequence
atgtgccagggcggcgacttcacccggcacaacggcaccggcggcaaaagcatttacggagagaaatttgaggatgagaatttcatcctgaagcacacggggcctggtatactgtccatggccaacgcggggccaaacaccaacggctcacagttcttcatttgtacagccaaaactgagtggctcgacgggaaacacgttgtgtttgggaaggtcaaggaggggatgaatatcgtcgaagctatggaaagattcgggagccgcaatggaaaaacatcgaaaaagatcaccatcgcagattgtgggcagctggagtag

SEQ ID NO: 113182 - DNA, 318 bp, Artificial Sequence
  derived and/or modified sequence
atgtgccagggcggagattttacacgtcataatggaacaggagggaagtctatttacggcgagaagtttgaggacgaaaatttcattctgaagcacactggtcccggtatcctgtcaatggccaatgccggaccaaacaccaatgggtcccagttcttcatttgtacggcaaaaactgagtggcttgatggaaagcatgtggtctttggtaaggtgaaggagggcatgaatatagtggaggctatggagagattcgggtccagaaacggcaagacatcgaagaagatcaccattgccgactgcggtcagctcgagtag

SEQ ID NO: 113183 - DNA, 318 bp, Artificial Sequence
  derived and/or modified sequence
atgtgccagggcggcgacttcaccagacacaacggcaccggcggcaagagcatctacggcgagaagttcgaggacgagaacttcatcctgaagcacaccggccccggcatcctgagcatggccaacgccggccccaacaccaacggcagccagttcttcatctgcaccgccaagaccgagtggctggacggcaagcacgtggtgttcggcaaggtgaaggagggcatgaacatcgtggaggccatggagagattcggcagcagaaacggcaagaccagcaagaagatcaccatcgccgactgcggccagctggagtag

SEQ ID NO: 113184 - protein, 866 aa, Artificial Sequence
  derived and/or modified sequence
MFFACYCALRTNVKKYRYQDEDAPHDHSLPRLTHEVRGPELVHVSEKNLSQIENVHGYVLQSHISPLKASPAPIIVNTDTLDTIPYVNGTEIEYEFEEITLERGNSGLGFSIAGGTDNPHIGDDPGIFITKIIPGGAAAEDGRLRVNDCILRVNEVDVSEVSHSKAVEALKEAGSIVRLYVRRRRPILETVVEIKLFKGPKGLGFSIAGGVGNQHIPGDNSIYVTKIIDGGAAQKDGRLQVGDRLLMVNNYSLEEVTHEEAVAILKNTSEVVYLKVGKPTTIYMTDPYGPPDITHSYSPPMENHLLSGNNGTLEYKTSLPPISPGRYSPIPKHMLVDDDYTRPPEPVYSTVNKLCDKPASPRHYSPVECDKSFLLSAPYSHYHLGLLPDSEMTSHSQHSTATRQPSMTLQRAVSLEGEPRKVVLHKGSTGLGFNIVGGEDGEGIFVSFILAGGPADLSGELQRGDQILSVNGIDLRGASHEQAAAALKGAGQTVTIIAQYQPEDYARFEAKIHDLREQMMNHSMSSGSGSLRTNQKRSLYVRAMFDYDKSKDSGLPSQGLSFKYGDILHVINASDDEWWQARRVMLEGDSEEMGVIPSKRRVERKERARLKTVKFNAKPGVIDSKGDIPGLGDDGYGTKTLKHVSSNASDSESSYRGQEDLILSYEPVTRQEINYTRPVIILGPMKDRINDDLISEFPDKFGSCVPHTTRPKRDYEVDGRDYHFVISREQMEKDIQEHKFIEAGQYNDNLYGTSVQSVRFVAERGKHCILDVSGNAIKRLQVAQLYPIAIFIKPRSLEPLMEMNKRLTEEQAKKTYDRAIKLEQEFGEYFTAIVQGDTLEDIYNQCKLVIEEQSGPFIWIPSKEKL

SEQ ID NO: 113185 - protein, 852 aa, Artificial Sequence
  derived and/or modified sequence
MFFACYCALRTNVKKYRYQDEDAPHDHSLPRLTHEVRGPELVHVSEKNLSQIENVHGYVLQSHISPLKASPAPIIVNTDTLDTIPYVNGTEIEYEFEEITLERGNSGLGFSIAGGTDNPHIGDDPGIFITKIIPGGAAAEDGRLRVNDCILRVNEVDVSEVSHSKAVEALKEAGSIVRLYVRRRRPILETVVEIKLFKGPKGLGFSIAGGVGNQHIPGDNSIYVTKIIDGGAAQKDGRLQVGDRLLMVNNYSLEEVTHEEAVAILKNTSEVVYLKVGKPTTIYMTDPYGPPDITHSYSPPMENHLLSGNNGTLEYKTSLPPISPGRYSPIPKHMLVDDDYTRPPEPVYSTVNKLCDKPASPRHYSPVECDKSFLLSAPYSHYHLGLLPDSEMTSHSQHSTATRQPSMTLQRAVSLEGEPRKVVLHKGSTGLGFNIVGGEDGEGIFVSFILAGGPADLSGELQRGDQILSVNGIDLRGASHEQAAAALKGAGQTVTIIAQYQPEDYARFEAKIHDLREQMMNHSMSSGSGSLRTNQKRSLYVRAMFDYDKSKDSGLPSQGLSFKYGDILHVINASDDEWWQARRVMLEGDSEEMGVIPSKRRVERKERARLKTVKFNAKPGVIDSKGDIPGLGDDGYGTKTLRGQEDLILSYEPVTRQEINYTRPVIILGPMKDRINDDLISEFPDKFGSCVPHTTRPKRDYEVDGRDYHFVISREQMEKDIQEHKFIEAGQYNDNLYGTSVQSVRFVAERGKHCILDVSGNAIKRLQVAQLYPIAIFIKPRSLEPLMEMNKRLTEEQAKKTYDRAIKLEQEFGEYFTAIVQGDTLEDIYNQCKLVIEEQSGPFIWIPSKEKL

SEQ ID NO: 113186 - DNA, 2601 bp, Artificial Sequence
  derived and/or modified sequence
atgttcttcgcctgttactgcgccctgagaactaacgtgaaaaagtaccggtatcaggatgaggacgcccctcatgaccactccttgccccggttaacccatgaagtgcggggcccagagctggtgcacgtgagtgaaaagaacctttctcagattgagaacgtccatggctatgtgctccagagtcatataagccccctgaaagcaagccctgcccccatcatcgtaaacacagatactctcgatacgattccatatgttaatggcactgagatcgagtatgagttcgaagaaattaccctggaacggggcaactccgggttgggcttctcaatcgcaggtggaactgataatcctcatattggagatgacccaggaatcttcattacaaaaatcattcctggaggcgccgctgcggaagatgggagactgcgagtgaacgattgcatattgcgcgtcaatgaggtagatgtgtccgaagtgagccacagtaaggccgtggaagctttgaaggaagctggtagcatcgtgcgcctatatgtgagacggcgacggcctattctcgagaccgtggtagaaatcaagttgtttaaaggacccaaagggctgggctttagtatcgcaggcggggtcggtaatcaacacattcctggcgataactcaatatatgtgacaaaaataatagatggaggggccgcacagaaagatgggcgtcttcaggtgggggatcggctgctcatggtcaacaactactccctcgaggaggtcactcacgaagaagctgttgcaattctaaagaacacttccgaggtcgtgtacttgaaagtgggaaagccaacgaccatctatatgaccgacccatatggaccgccggatattacacacagttacagtcctcccatggagaatcacttgctcagtggcaataatggaacactggagtataaaactagcctcccacctatttctcctggcagatactcgcccatccccaagcatatgctggtggacgatgattatactcggccacccgaacctgtgtattcgaccgtgaataaactgtgcgataaaccagcatcgcctagacactactcccctgtcgaatgtgataaatccttcttgctgtctgctccctactcccattaccacctcggtctgctgcctgacagcgagatgacctcccacagccagcactccactgccaccaggcagccatctatgacccttcagcgtgctgtgagtctagagggtgagccccgtaaggtggtgttgcacaagggatccactggcttggggtttaatatagtagggggggaggatggtgagggtatttttgtgagcttcattttggccggtggccccgccgacctgagcggtgagctacagcggggcgaccagattctatcggttaatggaatcgaccttcgaggagctagtcacgaacaggcagcagccgccctgaagggagccggtcagaccgtgactattattgcacagtatcaaccagaggactatgctagatttgaggctaagatccacgatctccgcgagcaaatgatgaaccactccatgagcagtggctccggtagcctaaggacgaaccagaaacgcagcctgtacgtacgcgccatgttcgattatgataaatccaaagactcaggcctgccttcacagggtctgtcctttaaatacggcgatattctgcatgtgataaatgcgagcgacgatgaatggtggcaagcaagaagggtgatgcttgagggcgacagtgaagaaatgggcgtgatacctagcaaacgtcgtgtcgagcggaaggaacgcgcccggctgaagacagtgaagtttaacgccaaaccaggtgtaattgacagcaagggcgacattcctggcctgggcgacgacgggtacggcacaaagactctcaagcacgtgagcagtaatgcctccgacagcgagagcagctatcgcggccaggaagatcttatattatcttatgaacctgttacccgccaggaaattaattatacgcggcctgtgatcattcttgggcccatgaaagatagaatcaatgacgaccttatctcagaatttccagataagtttgggtcctgcgtaccccacacgacacgtcctaagcgcgactatgaagtggacgggagggattatcacttcgtaattagccgtgaacaaatggagaaggatattcaggaacataaattcatcgaagctggccagtacaatgacaatctgtacggtaccagtgtgcaatcagtgcgctttgtggcagaacgcggcaaacactgcatacttgacgtaagcggcaatgccatcaagcgacttcaggtggctcagctgtaccctattgccatttttatcaaaccccgctccctagaacctctgatggagatgaataaaaggctgactgaagagcaggcaaagaagacgtatgacagagccataaaattagagcaagagttcggggaatattttacagctatagttcagggcgacacgctggaggacatttataatcagtgtaaacttgtcatcgaagaacagtctggaccctttatatggattccgtctaaagaaaagctttag

SEQ ID NO: 113187 - DNA, 2559 bp, Artificial Sequence
  derived and/or modified sequence
atgttcttcgcgtgctactgcgcactccggaccaacgtgaagaagtacaggtaccaggatgaggatgcgccacatgaccactcccttccccgcttgacccacgaagtgcgggggccagaactggtccacgtctcggagaaaaatctctctcagattgagaacgtgcatggatatgttctacagtcacacatcagccctttaaaggcgtcccctgccccgataattgtcaatacagacacattggacacgataccctatgtcaatggaaccgagattgagtacgagtttgaggaaatcaccctcgaacgagggaattcaggactgggatttagcatagcgggaggcactgataatccacatattggggatgatccaggcatatttatcactaaaatcataccgggcggagcggctgcggaggatggacggttgagagtaaatgactgcatcttgagggtcaatgaggtggacgtctctgaggtgtcgcactcgaaagccgtcgaagctctgaaagaagctgggtccatagtccgcctgtacgtgcgtcgccggagacccattcttgaaactgtggttgagataaagctcttcaaaggtcccaagggcctcgggttttcaatagctggaggggtgggcaaccagcacatccccggcgataactccatttatgtgaccaagatcattgacgggggcgcagctcagaaagatgggcgccttcaggtaggagataggttactgatggttaacaattactcactcgaagaggttactcatgaggaggcagtagctatccttaagaacactagcgaagtcgtgtacctaaaggtcggtaagcctaccactatctacatgactgacccttatgggccccccgacatcacacatagttattccccgccaatggagaatcacctcctcagcggcaataacgggacactggagtataagacttccctgccccccattagcccaggacgttactcccctatccctaagcatatgcttgtggacgacgactacacaaggccaccagagcccgtttacagcacggtaaacaagctgtgtgacaagccagcttccccccgacactactcccccgttgaatgcgataagagctttctgctaagcgccccgtactctcactatcacctggggttgctccctgactccgagatgacctcccattcccagcactcaacggccaccagacaacccagcatgacactccagcgagcagtgtccctagaaggcgagcccagaaaagttgtcctccacaaaggctccaccggcctaggcttcaacattgtggggggcgaggatggagaagggatattcgtcagctttattcttgcgggaggcccagctgacctcagcggagagctccaacgtggggaccagattctgagtgttaacggaatagatctgcgcggcgcatcccacgagcaggccgcagctgcgttgaagggcgcgggacaaaccgtgaccattattgcccagtaccagcctgaggattacgccagattcgaggcgaagattcacgatttgagggagcaaatgatgaaccattccatgtcatctggctccggaagtctgcggacaaatcagaagaggagtttgtatgtgcgcgccatgttcgactacgataagagcaaagattccggtttgccatctcaaggcttatctttcaagtacggcgatatcctccacgtgatcaatgccagtgacgacgaatggtggcaggccaggagagttatgctggaaggagacagtgaagaaatgggggtaattccaagtaagagaagagtcgaacgaaaagaacgtgcaaggctgaaaaccgtgaaatttaatgctaagcctggcgttatcgacagcaagggggatattccgggtttaggcgacgacgggtatggaacaaagacactgaggggccaagaagatcttatccttagttacgagcctgtgacaagacaggagattaactacacaaggccagtcattattctgggccctatgaaagacaggatcaacgatgatctaatcagcgagttccccgataagttcgggtcctgcgtgcctcatactacgagaccaaagagagactacgaagtcgatggacgcgactaccactttgtcatcagcagagagcagatggaaaaggacattcaggaacataagttcattgaagcagggcaatataacgacaacctttacggcacatccgtccagagcgtgcgttttgtggcggagcgcgggaagcattgtattttggatgtcagtggcaacgctatcaaacgtctgcaggtggcgcagctgtaccctatcgccatcttcattaaacctcgctcccttgaacccctcatggaaatgaacaaacgccttactgaagaacaggccaaaaaaacttatgacagggctattaaactggaacaggaattcggggagtatttcacagcaatagtgcagggcgacaccctggaagacatttataatcagtgtaaactcgttattgaagagcaaagcggtccttttatctggatccctagcaaggaaaagctttag

SEQ ID NO: 113188 - DNA, 2601 bp, Artificial Sequence
  derived and/or modified sequence
atgttctttgcctgctactgtgccctgcggaccaacgtgaagaagtaccgctaccaggatgaagatgcccctcatgaccacagcctgccccggctgacccatgaggtgcggggccctgagctggtgcacgtgtctgagaagaacctgagccagattgaaaatgtgcacggctacgtgctgcagagccacatcagccccctgaaggccagccctgcccccatcatcgtgaacacagacaccctggacaccatcccctacgtgaatggaacagaaattgaatatgaatttgaggagatcaccctggagcggggcaacagcggcctgggcttcagcattgctgggggcacagacaacccccacatcggagatgatcctggcatcttcatcaccaagatcatccctgggggcgctgctgctgaagatggccgcctgcgggtgaatgactgcatcctgcgggtgaatgaggtggatgtgtctgaggtgagccacagcaaggctgtggaggccctgaaggaggccggcagcatcgtgcggctgtatgtgagaagaagaagacccatcctggagaccgtggtggagatcaagctgttcaagggccccaagggcctgggcttcagcattgctgggggcgtgggcaaccagcacatccctggggacaacagcatctacgtgaccaagatcattgatggaggagctgcccagaaggatggccgcctgcaggtgggggaccggctgctgatggtgaacaactacagcctggaggaggtgacccatgaggaggccgtggccatcctgaagaacaccagcgaggtggtgtacctgaaggtgggcaagcccaccaccatctacatgacagacccctacggccccccagacatcacccacagctacagcccccccatggagaaccacctgctgagcggcaacaacggcaccctggagtacaagaccagcctgccccccatcagccctggccgctacagccccatccccaagcacatgctggtggatgatgactacaccaggcctcctgagcctgtgtacagcacagtgaacaagctgtgtgacaagccagccagccccaggcactacagccctgtggagtgtgacaagagcttcctgctgagcgccccctacagccactaccacctgggcctgctgcctgacagcgagatgaccagccacagccagcacagcacagccacccggcagcccagcatgaccctgcagagagctgtgtccctggagggggagcccaggaaggtggtgctgcacaagggcagcacaggcctgggcttcaacatcgtgggcggagaagatggagagggcatctttgtgtccttcatcctggccggcggccctgctgacctgagcggggagctgcagagaggagaccagatcctgtctgtgaatggaattgacctgcggggggccagccatgagcaggccgctgctgccctgaagggggccggccagacagtgaccatcatcgcccagtaccagccagaagattatgccaggtttgaggccaagatccatgacctgcgggagcagatgatgaaccacagcatgagcagcggcagcggcagcctgcggaccaaccagaagaggagcctgtatgtgcgggccatgtttgattatgacaagagcaaggacagcggcctgcccagccagggcctgtccttcaagtacggggacatcctgcacgtgatcaatgccagtgatgatgagtggtggcaggcccggcgggtgatgctggagggggacagcgaggagatgggcgtcatccccagcaagagaagagtggagaggaaggagcgggcccggctgaagacagtgaagttcaatgccaagccaggagtcatcgacagcaaaggagacatccctggcctgggagatgatggctacggcaccaagaccctgaagcacgtgagcagcaatgccagtgacagcgagagcagctaccggggccaggaggacctgatcctgtcctatgagcctgtgacccggcaggagatcaactacaccaggcctgtgatcatcctgggccccatgaaggaccgcatcaatgatgacctgatcagcgagttcccagacaagtttggcagctgtgtgccccacaccacccggcccaagagggactatgaggtggatggccgggactaccacttcgtcatcagccgggagcagatggagaaggacatccaggagcacaagttcattgaagctggccagtacaatgacaacctgtatggcacctctgtgcagagcgtgcgctttgtggccgagcggggcaagcactgcatcctggatgtgtctggaaatgccatcaagaggctgcaggtggcccagctgtaccccatcgccatcttcatcaagcccaggagcctggagcccctgatggagatgaacaagaggctgacagaggagcaggccaagaagacctatgaccgggccatcaagctggagcaggagtttggagagtacttcaccgccatcgtgcagggcgacaccctggaggacatctacaaccagtgcaagctggtgattgaggagcagagcggccccttcatctggatccccagcaaggagaagctgtag

SEQ ID NO: 113189 - DNA, 2559 bp, Artificial Sequence
  derived and/or modified sequence
atgttctttgcctgctactgtgccctgcggaccaacgtgaagaagtaccgctaccaggatgaagatgcccctcatgaccacagcctgccccggctgacccatgaggtgcggggccctgagctggtgcacgtgtctgagaagaacctgagccagattgaaaatgtgcacggctacgtgctgcagagccacatcagccccctgaaggccagccctgcccccatcatcgtgaacacagacaccctggacaccatcccctacgtgaatggaacagaaattgaatatgaatttgaggagatcaccctggagcggggcaacagcggcctgggcttcagcattgctgggggcacagacaacccccacatcggagatgatcctggcatcttcatcaccaagatcatccctgggggcgctgctgctgaagatggccgcctgcgggtgaatgactgcatcctgcgggtgaatgaggtggatgtgtctgaggtgagccacagcaaggctgtggaggccctgaaggaggccggcagcatcgtgcggctgtatgtgagaagaagaagacccatcctggagaccgtggtggagatcaagctgttcaagggccccaagggcctgggcttcagcattgctgggggcgtgggcaaccagcacatccctggggacaacagcatctacgtgaccaagatcattgatggaggagctgcccagaaggatggccgcctgcaggtgggggaccggctgctgatggtgaacaactacagcctggaggaggtgacccatgaggaggccgtggccatcctgaagaacaccagcgaggtggtgtacctgaaggtgggcaagcccaccaccatctacatgacagacccctacggccccccagacatcacccacagctacagcccccccatggagaaccacctgctgagcggcaacaacggcaccctggagtacaagaccagcctgccccccatcagccctggccgctacagccccatccccaagcacatgctggtggatgatgactacaccaggcctcctgagcctgtgtacagcacagtgaacaagctgtgtgacaagccagccagccccaggcactacagccctgtggagtgtgacaagagcttcctgctgagcgccccctacagccactaccacctgggcctgctgcctgacagcgagatgaccagccacagccagcacagcacagccacccggcagcccagcatgaccctgcagagagctgtgtccctggagggggagcccaggaaggtggtgctgcacaagggcagcacaggcctgggcttcaacatcgtgggcggagaagatggagagggcatctttgtgtccttcatcctggccggcggccctgctgacctgagcggggagctgcagagaggagaccagatcctgtctgtgaatggaattgacctgcggggggccagccatgagcaggccgctgctgccctgaagggggccggccagacagtgaccatcatcgcccagtaccagccagaagattatgccaggtttgaggccaagatccatgacctgcgggagcagatgatgaaccacagcatgagcagcggcagcggcagcctgcggaccaaccagaagaggagcctgtatgtgcgggccatgtttgattatgacaagagcaaggacagcggcctgcccagccagggcctgtccttcaagtacggggacatcctgcacgtgatcaatgccagtgatgatgagtggtggcaggcccggcgggtgatgctggagggggacagcgaggagatgggcgtcatccccagcaagagaagagtggagaggaaggagcgggcccggctgaagacagtgaagttcaatgccaagccaggagtcatcgacagcaaaggagacatccctggcctgggagatgatggctacggcaccaagaccctgcggggccaggaggacctgatcctgtcctatgagcctgtgacccggcaggagatcaactacaccaggcctgtgatcatcctgggccccatgaaggaccgcatcaatgatgacctgatcagcgagttcccagacaagtttggcagctgtgtgccccacaccacccggcccaagagggactatgaggtggatggccgggactaccacttcgtcatcagccgggagcagatggagaaggacatccaggagcacaagttcattgaagctggccagtacaatgacaacctgtatggcacctctgtgcagagcgtgcgctttgtggccgagcggggcaagcactgcatcctggatgtgtctggaaatgccatcaagaggctgcaggtggcccagctgtaccccatcgccatcttcatcaagcccaggagcctggagcccctgatggagatgaacaagaggctgacagaggagcaggccaagaagacctatgaccgggccatcaagctggagcaggagtttggagagtacttcaccgccatcgtgcagggcgacaccctggaggacatctacaaccagtgcaagctggtgattgaggagcagagcggccccttcatctggatccccagcaaggagaagctgtag

SEQ ID NO: 113190 - DNA, 2601 bp, Artificial Sequence
  derived and/or modified sequence
atgttcttcgcctgctactgcgccctgcggaccaacgtgaagaagtaccgataccaggacgaggacgccccccacgaccatagtctgcccagactgacgcacgaggttcgaggaccagaactggtccatgtgagtgagaagaatctgtcccagatcgaaaatgttcatgggtacgttcttcagtctcacatctcccccctgaaagcctcacctgcccctataattgtcaataccgatactttggatacgatcccttacgtaaatgggactgagatagagtacgaattcgaggagatcacgttggaacgggggaacagcggactcggcttcagcatcgccggggggactgacaatccccatataggagatgatccaggaatcttcattacaaagatcatccccggaggagctgcggccgaggacgggcgccttcgcgttaacgattgcatcctgagagtgaacgaagtggatgtcagcgaggttagccactctaaagcagttgaggccctcaaggaagccgggtccatcgtgcggctctatgttcgtcgaagacgccccatcctcgaaacagtagtggaaatcaagctctttaaaggccctaagggtttaggcttttccattgccggaggcgtgggcaatcagcacattcctggggacaattcgatctacgtgacgaagattattgatggaggggctgcgcaaaaggatggaagattgcaggtgggagatcgattgctgatggtaaacaactacagcctggaggaggttactcatgaagaagcagtggctatcctcaagaacacctccgaggtggtttacctcaaggtcggcaagcccaccactatctacatgactgatccctacgggccaccagatatcacacactcttattccccacccatggagaatcatctgctctccggtaataatggcactttggagtacaaaactagcctccccccgatcagccccggcagatatagcccaatacctaaacatatgctggtagatgacgattacactcgcccccccgaacccgtatattcaacggtcaacaaactgtgtgataagcccgcctccccccggcattatagcccggtagaatgtgacaaaagtttcctgctctctgctccctacagtcattatcatctggggttgcttccagactcagaaatgacaagccatagtcagcacagcaccgcaacccgccagcccagcatgaccttgcagcgcgctgtatctttggaaggtgaaccccggaaggttgtgctgcacaaaggatcaaccggtcttgggttcaacatcgtcggaggtgaagatggggaaggaatttttgtttcttttatcttagcggggggccccgctgacctgagtggtgagctgcagcgaggtgaccagattcttagtgtaaacgggattgacctgaggggcgccagtcacgagcaagccgccgccgctctgaaaggtgccggccagacagtcaccatcatcgcgcagtaccagcccgaagactatgcacggtttgaagccaaaattcacgatttgagagagcagatgatgaaccactctatgagctccggctcaggaagtctaaggacaaatcaaaaacgcagcctgtacgttcgagcgatgttcgactacgacaaatcgaaggactcgggcttgcctagccaaggactgtcttttaagtacggcgacattctgcacgtgatcaacgctagcgatgacgaatggtggcaggcgaggcgggtgatgttggaaggtgactccgaagaaatgggcgtgattccatctaagagaagggtcgagcggaaagaaagagctcggcttaagactgtgaaattcaacgctaaacccggtgttatcgattcaaagggcgacataccaggattgggagatgacgggtatggtactaagactttgaagcatgtgtcaagcaacgcttctgattctgaatcaagctatagaggacaggaagatctgattctgtcttacgagcccgttacaagacaggaaattaattacaccaggcctgtcatcattttaggtccaatgaaggaccggattaatgacgacctgatcagtgaatttcccgacaagttcggatcttgcgtgcctcacaccaccagacctaaacgggattacgaggtcgacggtagagattatcactttgtcatctctcgtgaacagatggagaaggatatccaggagcacaagtttattgaagccgggcagtacaatgacaacctctacgggactagtgttcagtctgtaagattcgtggccgagcgaggtaaacactgcatccttgatgtgagtggaaacgccatcaagcggcttcaggtggcacagctgtaccccatcgccatctttattaaacctagatcactcgagccccttatggagatgaacaagcgattgacggaagagcaggcaaagaaaacgtacgaccgtgctatcaaactggaacaggagttcggcgagtattttacagcaatcgtgcagggggacacacttgaagatatctacaatcagtgtaagctggtgatagaagagcaatccggcccgttcatctggatcccatcaaaagagaagctttag

SEQ ID NO: 113191 - DNA, 2559 bp, Artificial Sequence
  derived and/or modified sequence
atgttcttcgcctgctactgcgccctgcggaccaacgtgaagaagtaccgctaccaggatgaagatgcgccccatgaccactctctgccacgcttaactcatgaggtgaggggccctgagcttgtacacgtttccgaaaagaacctgagccagatcgaaaatgtgcatggatacgtcttgcagtcacacatttcacccctgaaagcttctccagccccgatcatcgttaacacggacaccctggacaccattccctatgtgaatggcactgaaattgaatacgagtttgaagagatcacccttgagcgcggaaattctggtcttggtttttccattgctgggggaacggataatccccatatcggcgatgaccccgggatatttatcacaaagattattccaggtggagctgccgctgaggatggacgcctgagagtcaacgattgtatcctgcgggtcaacgaggttgacgttagtgaggtgtctcattcgaaggccgtagaagctttgaaggaagcgggttcaattgtcagactctatgtaaggcgccggagaccaatacttgagaccgtagtggagatcaagctgttcaaaggccccaaaggtctgggtttttcgattgccggcggagttggcaatcagcatatacctggagataactctatttacgtcactaagattatagacgggggagccgcccagaaagacggccgcctccaggttggcgatcggctcttgatggtgaacaactatagtctcgaagaagtgacacacgaggaagccgtagccatcctcaaaaatacatcagaggtcgtttatctgaaggtgggcaaaccaacaactatctacatgactgatccttatggcccaccagacatcacgcactcctactcgccacctatggagaaccacctgttgtccggaaataatggtaccctagagtacaagactagtctcccaccgatctccccagggagatatagccccatccccaagcatatgctggtcgacgatgattacacccgcccaccagagccggtttacagcaccgtgaataaactctgcgacaagcccgcatccccacgacattactcccctgtggagtgcgacaagagtttcctgctctccgctccatactcgcattatcatttaggtctcctgccggattcggaaatgacgtctcactcacagcattccacagccacacgacagcctagcatgaccctgcagcgggccgtaagtcttgagggtgagccaagaaaggtggttttacataaaggctcaacgggactcggctttaacatcgtcggcggcgaagatggggagggaatatttgtctcctttatcttagctggagggcctgcggatctgtctggtgagctgcagcgtggggaccagatactgtctgtgaatggaattgatctccgcggggcttcccatgaacaggcggccgcagcgctcaaaggcgcagggcagacggttacaatcatcgcccaataccaacctgaggattatgcccggttcgaagcaaagatacatgatctgcgcgagcagatgatgaatcacagcatgagcagtggatctggaagtctgaggacgaatcaaaagcgctctctgtatgtgcgagccatgttcgattatgacaagtccaaggattcagggttaccttcccaaggccttagctttaagtacggagacatcctccacgttataaacgcctccgacgatgagtggtggcaagctcgcagggtcatgctggagggggatagcgaggagatgggagtcattccttccaaacgcagggtagagcggaaggaacgggcccggctgaaaacagtcaagtttaatgccaaaccaggagtcatcgatagtaaaggggatattccaggattgggcgatgacggctacggaacgaagaccttacgcggacaggaggatttgatcctgtcctacgagcccgttacccgtcaggagatcaattacacacggcctgtgataattttgggacccatgaaagaccgcatcaacgacgatttgataagtgagttccccgataagttcggcagctgcgtgccgcatacgacacgccccaagcgcgattatgaggttgacggacgcgattaccattttgtgattagcagggagcagatggaaaaagacattcaagagcacaagtttatagaggccgggcagtacaacgacaacttgtatggcacatcagtccagtctgttaggtttgtggctgagcgaggaaaacactgcatccttgatgtgtctggtaatgcgattaaaaggttgcaagtggctcagttgtaccccatcgcaatttttattaagccacggagcctggagccactgatggaaatgaacaagcgtttaactgaggaacaggcaaaaaaaacatatgacagagcaattaaactggagcaagagttcggggaatattttactgccattgtgcagggcgatacgctcgaagatatctataatcagtgtaaactggtcatagaagagcagtctgggcctttcatttggatcccgtctaaagagaaactgtag

SEQ ID NO: 113192 - DNA, 2601 bp, Artificial Sequence
  derived and/or modified sequence
atgtttttcgcgtgctactgcgccctccgtacgaacgtgaagaagtaccgttatcaggacgaggacgcacctcacgaccattctctcccacgccttactcacgaagtcagaggaccggagctggtacacgtgagcgaaaagaacctgtcccagattgaaaacgtccacgggtatgtcctgcagagccacatttccccactgaaggctagcccggcacccataatagtgaatacggacaccttagacaccattccctatgtcaacgggaccgaaattgaatatgaattcgaagaaatcactctcgaaagaggaaattccgggctgggctttagtatcgccggaggcacggataatccccacattggagacgacccgggaatcttcattacaaagattatacctggtggcgctgccgctgaggacggtcgtctgagggtgaatgactgcattctgcgagtgaacgaagtggacgttagcgaagtgagtcattccaaagccgttgaggcactgaaggaggcaggttctatcgtgaggctatacgtcaggaggaggcgacccattttagagaccgtagtagagatcaaattgtttaagggtcctaaagggctcggcttttccatcgccggaggagtggggaatcagcacatcccgggtgacaatagcatttatgtgactaaaataatcgatggcggtgctgcccagaaagacggcagactgcaggtgggcgaccgcctccttatggtaaataactactccttggaggaggtgacccatgaggaggcagtcgcaattcttaaaaacacatctgaagtggtgtatcttaaggtaggtaagcccacaacaatctatatgacggatccttacggtcctccggatataacgcattcttattcccctcctatggagaatcacttactctcaggaaataatggaactttggagtacaagacttctcttcccccaatctcaccaggaaggtacagtcctatccctaagcacatgttggtagacgacgactatacccggcctcctgaacctgtgtactccacagttaataagctgtgcgataagcccgcttctcctaggcactatagtccagtagagtgtgacaagagcttccttctgagtgctccctactcacactaccacttaggccttttgccagattctgagatgacttctcatagtcagcacagtacagccacccggcagccgtccatgactctgcagagggccgtcagcctggagggagagcctaggaaggtggtcctgcataaaggctccacagggttgggattcaacatagtcggcggagaagatggagagggtatttttgtgtcctttatcctggccggaggtcccgctgacttgtctggtgagcttcagaggggtgaccagatcctaagcgtgaatggcatcgatcttcggggtgcatctcatgaacaggccgcagctgctttgaaaggagccggacagacagttaccattatcgctcagtatcagcctgaagattacgcccgtttcgaagcgaaaatccacgatctgagggaacagatgatgaaccacagtatgagtagcggcagtggaagcctgaggactaaccagaaaagaagtctatatgtacgggcaatgtttgattatgataagagcaaagacagtggccttccttctcagggactttcctttaagtacggagacattctgcacgtcatcaatgctagtgacgacgagtggtggcaggccaggagggtcatgctcgagggagactccgaagaaatgggcgtgatcccaagcaaaaggcgcgtggagagaaaagagcgagcaagactgaaaactgtgaagtttaacgcaaaaccaggcgtaattgactcgaaaggggacatccccggtctaggtgatgatgggtatggcaccaaaacactcaagcacgtatctagcaacgccagtgacagcgagtcaagctaccggggtcaggaggacctcatcttgtcctacgaacctgtgactaggcaggaaatcaactacacaagacctgtcattatcctcgggcctatgaaggaccgaatcaatgatgatctcatctctgaatttcctgataaatttggaagctgcgtgccacacaccacccgccctaaacgcgactatgaggtggacggaagagactaccatttcgtgatctcacgtgaacaaatggagaaggatatccaggagcacaaatttattgaggctgggcagtacaatgacaacctctacggcactagtgtacaatccgtcaggttcgtcgccgagaggggcaaacattgcatactcgacgtctcaggcaacgccattaaacgcctgcaggtagcccaactgtatccaatagctatcttcattaagcccagatcacttgaaccgctgatggagatgaacaagcgactgactgaggagcaagccaagaaaacatacgaccgcgcaattaaactggaacaggaattcggagagtacttcacagctattgtgcagggggacaccctggaggacatatacaatcagtgtaagctcgttattgaagagcagtccgggccatttatctggatacccagcaaagaaaagctgtag

SEQ ID NO: 113193 - DNA, 2559 bp, Artificial Sequence
  derived and/or modified sequence
atgttctttgcttgttactgcgctctcagaacgaacgtgaaaaaataccgataccaggatgaggacgccccacacgaccattcccttccaagactcacccacgaagtaaggggacccgagctggtccacgtgagcgagaaaaatctgtcccagattgaaaacgtccatggatacgttttacagagtcacattagcccgttgaaggcttctccagcgcctatcatcgtcaacactgataccctcgacactattccatatgtcaacggaaccgagattgagtatgagttcgaagagattactcttgagcgcggtaattccggcctaggcttctccatcgccggagggaccgataaccctcatattggtgatgatccaggcatatttattaccaaaatcatccccggtggggcagcagcggaagatggaaggttgcgcgtgaatgattgcatcttgagggttaatgaagtggatgtgtcagaggtgtcccactcaaaggcagtggaggctctgaaagaggctggcagcatcgtgcgcctttatgtgcgacggcgtagaccaattctcgagaccgtagttgaaatcaagctcttcaaggggcctaaggggctgggcttctcaattgccggtggggttggaaaccagcacatccctggcgacaattcaatctatgtcacaaagatcattgacggaggagcagcacagaaggatggacgccttcaggtaggcgatcggctgctcatggttaataattactcacttgaagaagttacacacgaagaggcggtggccatcctgaaaaacactagcgaggtggtatatctcaaagtcggcaaacctacaactatctacatgacagatccatatgggcctcctgacatcacccactcatatagtcctccaatggaaaaccatctcctctccggcaacaatgggaccctcgaatacaaaacctcgcttccccctatctctcccggacgctatagccctattcccaaacacatgctcgtggacgacgactatacccggccacccgagccagtctactctactgttaacaaattgtgtgacaagccggcttcccccaggcactactctccagtggagtgtgataagtcttttctgttgagtgctccatactctcactaccacctgggcctcttacctgacagcgagatgacaagccattcacagcatagtaccgctacacgacagccatcaatgacacttcaacgcgctgtgtctttggagggagagccccgaaaggtggtactgcacaaaggctccactggactaggcttcaacattgtgggcggagaggacggagagggcattttcgtatctttcatcctcgccggaggcccagctgacctgagcggggagctccaacgtggtgaccagattctgtctgtcaacggaatagacctaagaggcgcatctcacgaacaggcggcagccgctctgaaaggagctgggcaaacggtcaccatcatagcacagtaccagcctgaggactatgctagatttgaagccaaaatccatgacctccgagaacagatgatgaatcactctatgtccagtggcagcggctcactgaggacaaaccaaaaaagatccctctacgtgagagctatgttcgactacgacaagagcaaggactccgggctgccatctcaaggactgtccttcaaatatggggacattctccatgtgatcaatgcaagtgatgacgagtggtggcaggcaagaagagtcatgctggagggggatagcgaagagatgggagtgatcccctccaagaggagagtagagcgcaaagagagagccaggctcaaaacagtgaagttcaacgctaaacctggtgtgatcgattcaaaaggagacattcctggtctcggcgacgatggatacggaacgaagacgctgagaggacaggaggatctgatactgagctatgagcccgtgacccgccaggaaatcaattacactagacccgtgataattctcggcccaatgaaagacagaatcaatgacgatcttatatcagagtttccagataagttcgggtcctgcgttcctcacacgaccaggccgaaaagagactacgaggtggatggcagggactaccacttcgtgataagcagagagcaaatggaaaaggacatccaggagcacaaatttatcgaagccggacagtacaacgacaatttatacggaacttccgtccagagtgttagattcgtggccgagcgtgggaagcattgtatcttagacgtttcaggaaacgctataaaacgcctgcaggttgcccaactgtaccctatcgcaatctttataaagccgcgatctcttgaaccgctgatggaaatgaacaagaggctgacagaggagcaggcaaagaagacgtatgacagggccatcaagctagaacaggaatttggggagtacttcacagcaatcgtgcagggcgacactctggaagatatttataaccagtgcaagctcgttatagaagaacagagtgggcctttcatatggatacccagtaaggagaagctgtag

SEQ ID NO: 113194 - DNA, 2601 bp, Artificial Sequence
  derived and/or modified sequence
atgttcttcgcctgctactgcgccctgagaaccaacgtgaagaagtacagataccaggacgaggacgccccccacgaccacagcctgcccagactgacccacgaggtgagaggccccgagctggtgcacgtgagcgagaagaacctgagccagatcgagaacgtgcacggctacgtgctgcagagccacatcagccccctgaaggccagccccgcccccatcatcgtgaacaccgacaccctggacaccatcccctacgtgaacggcaccgagatcgagtacgagttcgaggagatcaccctggagagaggcaacagcggcctgggcttcagcatcgccggcggcaccgacaacccccacatcggcgacgaccccggcatcttcatcaccaagatcatccccggcggcgccgccgccgaggacggcagactgagagtgaacgactgcatcctgagagtgaacgaggtggacgtgagcgaggtgagccacagcaaggccgtggaggccctgaaggaggccggcagcatcgtgagactgtacgtgagaagaagaagacccatcctggagaccgtggtggagatcaagctgttcaagggccccaagggcctgggcttcagcatcgccggcggcgtgggcaaccagcacatccccggcgacaacagcatctacgtgaccaagatcatcgacggcggcgccgcccagaaggacggcagactgcaggtgggcgacagactgctgatggtgaacaactacagcctggaggaggtgacccacgaggaggccgtggccatcctgaagaacaccagcgaggtggtgtacctgaaggtgggcaagcccaccaccatctacatgaccgacccctacggcccccccgacatcacccacagctacagcccccccatggagaaccacctgctgagcggcaacaacggcaccctggagtacaagaccagcctgccccccatcagccccggcagatacagccccatccccaagcacatgctggtggacgacgactacaccagaccccccgagcccgtgtacagcaccgtgaacaagctgtgcgacaagcccgccagccccagacactacagccccgtggagtgcgacaagagcttcctgctgagcgccccctacagccactaccacctgggcctgctgcccgacagcgagatgaccagccacagccagcacagcaccgccaccagacagcccagcatgaccctgcagagagccgtgagcctggagggcgagcccagaaaggtggtgctgcacaagggcagcaccggcctgggcttcaacatcgtgggcggcgaggacggcgagggcatcttcgtgagcttcatcctggccggcggccccgccgacctgagcggcgagctgcagagaggcgaccagatcctgagcgtgaacggcatcgacctgagaggcgccagccacgagcaggccgccgccgccctgaagggcgccggccagaccgtgaccatcatcgcccagtaccagcccgaggactacgccagattcgaggccaagatccacgacctgagagagcagatgatgaaccacagcatgagcagcggcagcggcagcctgagaaccaaccagaagagaagcctgtacgtgagagccatgttcgactacgacaagagcaaggacagcggcctgcccagccagggcctgagcttcaagtacggcgacatcctgcacgtgatcaacgccagcgacgacgagtggtggcaggccagaagagtgatgctggagggcgacagcgaggagatgggcgtgatccccagcaagagaagagtggagagaaaggagagagccagactgaagaccgtgaagttcaacgccaagcccggcgtgatcgacagcaagggcgacatccccggcctgggcgacgacggctacggcaccaagaccctgaagcacgtgagcagcaacgccagcgacagcgagagcagctacagaggccaggaggacctgatcctgagctacgagcccgtgaccagacaggagatcaactacaccagacccgtgatcatcctgggccccatgaaggacagaatcaacgacgacctgatcagcgagttccccgacaagttcggcagctgcgtgccccacaccaccagacccaagagagactacgaggtggacggcagagactaccacttcgtgatcagcagagagcagatggagaaggacatccaggagcacaagttcatcgaggccggccagtacaacgacaacctgtacggcaccagcgtgcagagcgtgagattcgtggccgagagaggcaagcactgcatcctggacgtgagcggcaacgccatcaagagactgcaggtggcccagctgtaccccatcgccatcttcatcaagcccagaagcctggagcccctgatggagatgaacaagagactgaccgaggagcaggccaagaagacctacgacagagccatcaagctggagcaggagttcggcgagtacttcaccgccatcgtgcagggcgacaccctggaggacatctacaaccagtgcaagctggtgatcgaggagcagagcggccccttcatctggatccccagcaaggagaagctgtag

SEQ ID NO: 113195 - DNA, 2559 bp, Artificial Sequence
  derived and/or modified sequence
atgttcttcgcctgctactgcgccctgagaaccaacgtgaagaagtacagataccaggacgaggacgccccccacgaccacagcctgcccagactgacccacgaggtgagaggccccgagctggtgcacgtgagcgagaagaacctgagccagatcgagaacgtgcacggctacgtgctgcagagccacatcagccccctgaaggccagccccgcccccatcatcgtgaacaccgacaccctggacaccatcccctacgtgaacggcaccgagatcgagtacgagttcgaggagatcaccctggagagaggcaacagcggcctgggcttcagcatcgccggcggcaccgacaacccccacatcggcgacgaccccggcatcttcatcaccaagatcatccccggcggcgccgccgccgaggacggcagactgagagtgaacgactgcatcctgagagtgaacgaggtggacgtgagcgaggtgagccacagcaaggccgtggaggccctgaaggaggccggcagcatcgtgagactgtacgtgagaagaagaagacccatcctggagaccgtggtggagatcaagctgttcaagggccccaagggcctgggcttcagcatcgccggcggcgtgggcaaccagcacatccccggcgacaacagcatctacgtgaccaagatcatcgacggcggcgccgcccagaaggacggcagactgcaggtgggcgacagactgctgatggtgaacaactacagcctggaggaggtgacccacgaggaggccgtggccatcctgaagaacaccagcgaggtggtgtacctgaaggtgggcaagcccaccaccatctacatgaccgacccctacggcccccccgacatcacccacagctacagcccccccatggagaaccacctgctgagcggcaacaacggcaccctggagtacaagaccagcctgccccccatcagccccggcagatacagccccatccccaagcacatgctggtggacgacgactacaccagaccccccgagcccgtgtacagcaccgtgaacaagctgtgcgacaagcccgccagccccagacactacagccccgtggagtgcgacaagagcttcctgctgagcgccccctacagccactaccacctgggcctgctgcccgacagcgagatgaccagccacagccagcacagcaccgccaccagacagcccagcatgaccctgcagagagccgtgagcctggagggcgagcccagaaaggtggtgctgcacaagggcagcaccggcctgggcttcaacatcgtgggcggcgaggacggcgagggcatcttcgtgagcttcatcctggccggcggccccgccgacctgagcggcgagctgcagagaggcgaccagatcctgagcgtgaacggcatcgacctgagaggcgccagccacgagcaggccgccgccgccctgaagggcgccggccagaccgtgaccatcatcgcccagtaccagcccgaggactacgccagattcgaggccaagatccacgacctgagagagcagatgatgaaccacagcatgagcagcggcagcggcagcctgagaaccaaccagaagagaagcctgtacgtgagagccatgttcgactacgacaagagcaaggacagcggcctgcccagccagggcctgagcttcaagtacggcgacatcctgcacgtgatcaacgccagcgacgacgagtggtggcaggccagaagagtgatgctggagggcgacagcgaggagatgggcgtgatccccagcaagagaagagtggagagaaaggagagagccagactgaagaccgtgaagttcaacgccaagcccggcgtgatcgacagcaagggcgacatccccggcctgggcgacgacggctacggcaccaagaccctgagaggccaggaggacctgatcctgagctacgagcccgtgaccagacaggagatcaactacaccagacccgtgatcatcctgggccccatgaaggacagaatcaacgacgacctgatcagcgagttccccgacaagttcggcagctgcgtgccccacaccaccagacccaagagagactacgaggtggacggcagagactaccacttcgtgatcagcagagagcagatggagaaggacatccaggagcacaagttcatcgaggccggccagtacaacgacaacctgtacggcaccagcgtgcagagcgtgagattcgtggccgagagaggcaagcactgcatcctggacgtgagcggcaacgccatcaagagactgcaggtggcccagctgtaccccatcgccatcttcatcaagcccagaagcctggagcccctgatggagatgaacaagagactgaccgaggagcaggccaagaagacctacgacagagccatcaagctggagcaggagttcggcgagtacttcaccgccatcgtgcagggcgacaccctggaggacatctacaaccagtgcaagctggtgatcgaggagcagagcggccccttcatctggatccccagcaaggagaagctgtag

SEQ ID NO: 113196 - DNA, 2872 bp, Artificial Sequence
  derived and/or modified sequence
gtgtggggcttgcgctgtgctgagaagctgaataccggtccatatgctccttatttactgcaatgttctttgcatgttactgtgcactccggactaacgtgaagaagtatcgatatcaagatgaggacgctccacatgatcattccttacctcgactaacccacgaagtaagaggcccagaactcgtgcatgtatcagaaaagaacctctctcaaatagaaaatgtccatggatatgtcttgcagtctcatatttctcctctgaaggccagtcctgctcctataattgtcaacacagatactttggacacaattccttatgtcaatgggacagaaattgaatatgaatttgaagaaattacactggagagggggaattctggcctgggattcagtattgctggggggacagataatccccacattggagatgaccctggcatatttattacgaagattataccaggaggtgctgcagcagaggatggcagactcagggtcaatgattgtatcttgcgggtgaatgaggttgatgtgtcagaggtttcccacagtaaagcggtggaagccctgaaggaagcagggtctatcgttcggctgtatgtgcgtagaagacgacctattttggagaccgttgtggaaatcaaactgttcaaaggccctaaaggtttaggcttcagtattgcaggaggtgtggggaaccaacacattcctggagacaacagcatttatgtaactaaaattatagatggaggagctgcacaaaaagatggaaggttgcaagtaggagatagactactaatggtaaacaactacagtttagaagaagtaacacacgaagaggcagtagcaatattaaagaacacatcagaggtagtttatttaaaagttggcaaacccactaccatttatatgactgatccttatggtccacctgatattactcactcttattctccaccaatggaaaaccatctactctctggcaacaatggcactttagaatataaaacctccctgccacccatctctccaggaaggtactcaccaattccaaagcacatgcttgttgacgacgactacaccaggcctccggaacctgtttacagcactgtgaacaaactatgtgataagcctgcttctcccaggcactattcccctgttgagtgtgacaaaagcttcctcctctcagctccctattcccactaccacctaggcctgctacctgactctgagatgaccagtcattcccaacatagcaccgcaactcgtcagccttcaatgactctccaacgggccgtctccctggaaggagagcctcgcaaggtagtcctgcacaaaggctccactggcctgggcttcaacattgtcggtggggaagatggagaaggtatttttgtgtccttcattctggctggtggaccagcagacctaagtggggagctccagagaggagaccagatcctatcggtgaatggcattgacctccgtggtgcatcccacgagcaggcagctgctgcactaaagggggctggacagacagtgacgattatagcacaatatcaacctgaagattacgctcgatttgaggccaaaatccatgacctacgagagcagatgatgaaccacagcatgagctccgggtccggatccctgcgaaccaatcagaaacgctccctctacgtcagagccatgttcgactacgacaagagcaaggacagtgggctgccaagtcaaggacttagttttaaatatggagatattctccacgttatcaatgcctctgatgatgagtggtggcaagccaggagagtcatgctggagggagacagtgaggagatgggggtcatccccagcaaaaggagggtggaaagaaaggaacgtgcccgattgaagacagtgaagtttaatgccaaacctggagtgattgattcgaaaggggacatccccggattaggtgacgacggttatggaacaaagactctgaaacatgtttcttctaatgccagcgatagcgaaagtagctaccgaggacaagaagacctcattctttcctatgagcctgttacaaggcaggaaataaactacacccggccggtgattatcctggggcccatgaaggatcggatcaatgacgacttgatatctgaattccctgataaatttggctcctgtgtgcctcatactacgaggccaaagcgagactacgaggtggatggcagagactatcactttgtcatttccagagaacaaatggagaaagatatccaagagcacaagtttatagaagccggccagtacaatgacaatttatatggaaccagtgtgcagtctgtgagatttgtagcagaaagaggcaaacactgtatacttgatgtatcaggaaatgctatcaagcggttacaagttgcccagctctatcccattgccatcttcataaaacccaggtctctggaacctcttatggagatgaataagcgtctaacagaggaacaagccaagaaaacctatgatcgagcaattaagctagaacaagaatttggagaatattttacagctattgtccaaggagatactttagaagatatatataaccaatgcaagcttgttattgaagagcaatctgggcctttcatctggattccctcaaaggaaaagttataaattagctactgcgcctctgacaacgacagaagagcatttagaagaacaaaatatatataacatactacttggaggcttttatgtttttgttgcatttatgtttttgcagtcaatgtgaattcttacgaatgtacaacacaaactgtatgaagccatgaaggaaacagaggggccaaagggtgggacagaaaagacattgcagtatgaag

SEQ ID NO: 113197 - DNA, 2891 bp, Artificial Sequence
  derived and/or modified sequence
aatccagtgatttaaaatgctagaaggaaaagcaactgaggtcttaactttcagacgctgaattctcatctaattgaaattactgggcataatgctatatatagccaatgaagagattttgagctctcactcagtgccttcaagacatgtcgttttgtagtcagagaaaacagagatcaatgcattttcaaactgacagagggaacggatgctctttagtagcacatgcccaggatcgtgtgtgtggggcttgcgctgtgctgagaagctgaataccggtccatatgctccttatttactgcaatgttctttgcatgttactgtgcactccggactaacgtgaagaagtatcgatatcaagatgaggacgctccacatgatcattccttacctcgactaacccacgaagtaagaggcccagaactcgtgcatgtatcagaaaagaacctctctcaaatagaaaatgtccatggatatgtcttgcagtctcatatttctcctctgaaggccagtcctgctcctataattgtcaacacagatactttggacacaattccttatgtcaatgggacagaaattgaatatgaatttgaagaaattacactggagagggggaattctggcctgggattcagtattgctggggggacagataatccccacattggagatgaccctggcatatttattacgaagattataccaggaggtgctgcagcagaggatggcagactcagggtcaatgattgtatcttgcgggtgaatgaggttgatgtgtcagaggtttcccacagtaaagcggtggaagccctgaaggaagcagggtctatcgttcggctgtatgtgcgtagaagacgacctattttggagaccgttgtggaaatcaaactgttcaaaggccctaaaggtttaggcttcagtattgcaggaggtgtggggaaccaacacattcctggagacaacagcatttatgtaactaaaattatagatggaggagctgcacaaaaagatggaaggttgcaagtaggagatagactactaatggtaaacaactacagtttagaagaagtaacacacgaagaggcagtagcaatattaaagaacacatcagaggtagtttatttaaaagttggcaaacccactaccatttatatgactgatccttatggtccacctgatattactcactcttattctccaccaatggaaaaccatctactctctggcaacaatggcactttagaatataaaacctccctgccacccatctctccaggaaggtactcaccaattccaaagcacatgcttgttgacgacgactacaccaggcctccggaacctgtttacagcactgtgaacaaactatgtgataagcctgcttctcccaggcactattcccctgttgagtgtgacaaaagcttcctcctctcagctccctattcccactaccacctaggcctgctacctgactctgagatgaccagtcattcccaacatagcaccgcaactcgtcagccttcaatgactctccaacgggccgtctccctggaaggagagcctcgcaaggtagtcctgcacaaaggctccactggcctgggcttcaacattgtcggtggggaagatggagaaggtatttttgtgtccttcattctggctggtggaccagcagacctaagtggggagctccagagaggagaccagatcctatcggtgaatggcattgacctccgtggtgcatcccacgagcaggcagctgctgcactaaagggggctggacagacagtgacgattatagcacaatatcaacctgaagattacgctcgatttgaggccaaaatccatgacctacgagagcagatgatgaaccacagcatgagctccgggtccggatccctgcgaaccaatcagaaacgctccctctacgtcagagccatgttcgactacgacaagagcaaggacagtgggctgccaagtcaaggacttagttttaaatatggagatattctccacgttatcaatgcctctgatgatgagtggtggcaagccaggagagtcatgctggagggagacagtgaggagatgggggtcatccccagcaaaaggagggtggaaagaaaggaacgtgcccgattgaagacagtgaagtttaatgccaaacctggagtgattgattcgaaaggggacatccccggattaggtgacgacggttatggaacaaagactctgagaggacaagaagacctcattctttcctatgagcctgttacaaggcaggaaataaactacacccggccggtgattatcctggggcccatgaaggatcggatcaatgacgacttgatatctgaattccctgataaatttggctcctgtgtgcctcatactacgaggccaaagcgagactacgaggtggatggcagagactatcactttgtcatttccagagaacaaatggagaaagatatccaagagcacaagtttatagaagccggccagtacaatgacaatttatatggaaccagtgtgcagtctgtgagatttgtagcagaaagaggcaaacactgtatacttgatgtatcaggaaatgctatcaagcggttacaagttgcccagctctatcccattgccatcttcataaaacccaggtctctggaacctcttatggagatgaataagcgtctaacagaggaacaagccaagaaaacctatgatcgagcaattaagctagaacaagaatttggagaatattttacagctattgtccaaggagatactttagaagatatatataaccaatgcaagcttgttattgaagagcaatctgggcctttcatctggattccctcaaaggaaaagttataaattagctactgcgcctctgacaacgacag

SEQ ID NO: 113198 - protein, 814 aa, Artificial Sequence
  derived and/or modified sequence
MHLEGRDGRRYPGAPAVELLQTSVPSGLAELVAGKRRLPRGAGGADPSHSCPRGAAGQSSWAPAGQEFASFLTKGRSHSSLPQMSSSRSKDSCFTENTPLLRNSLQEKGSRCIPVYHPEFITAEESWEDSSADWERRYLLSREVSGLSASASSEKGDLLDSPHIRLRLSKLRRCVQWLKVMGLFAFVVLCSILFSLYPDQGKLWQLLALSPLENYSVNLSSHVDSTLLQVDLAGALVASGPSRPGREEHIVVELTQADALGSRWRRPQQVTHNWTVYLNPRRSEHSVMSRTFEVLTRETVSISIRASLQQTQAVPLLMAHQYLRGSVETQVTIATAILAGVYALIIFERPSLTHVVEWIDFETLALLFGMMILVAIFSETGFFDYCAVKAYRLSRGRVWAMIIMLCLIAAVLSAFLDNVTTMLLFTPVTIRLCEVLNLDPRQVLIAEVIFTNIGGAATAIGDPPNVIIVSNQELRKMGLDFAGFTAHMFIGICLVLLVCFPLLRLLYWNRKLYNKEPSEIVELKHEIHVWRLTAQRISPASREETAVRRLLLGKVLALEHLLARRLHTFHRQISQEDKNWETNIQELQKKHRISDGILLAKCLTVLGFVIFMFFLNSFVPGIHLDLGWIAILGAIWLLILADIHDFEIILHRVEWATLLFFAALFVLMEALAHLHLIEYVGEQTALLIKMVPEEQRLIAAIVLVVWVSALASSLIDNIPFTATMIPVLLNLSHDPEVGLPAPPLMYALAFGACLGGNGTLIGASANVVCAGIAEQHGYGFSFMEFFRLGFPMMVVSCTVGMCYLLVAHVVVGWN

SEQ ID NO: 113199 - protein, 537 aa, Artificial Sequence
  derived and/or modified sequence
MDGIVTEVAVGVKRGSDELLSGSVLSSPNSNMSSMVVTANGNDSKKFKGEDKMDGAPSRVLHIRKLPGEVTETEVIALGLPFGKVTNILMLKGKNQAFLELATEEAAITMVNYYSAVTPHLRNQPIYIQYSNHKELKTDNTLNQRAQAVLQAVTAVQTANTPLSGTTVSESAVTPAQSPVLRIIIDNMYYPVTLDVLHQIFSKFGAVLKIITFTKNNQFQALLQYGDPVNAQQAKLALDGQNIYNACCTLRIDFSKLVNLNVKYNNDKSRDYTRPDLPSGDGQPALDPAIAAAFAKETSLLGLPVAAVPGALSPLAIPNAAAAAAAAAAGRVGMPGVSAGGNTVLLVSNLNEEMVTPQSLFTLFGVYGDVQRVKILYNKKDSALIQMADGNQSQLAMNHLNGQKMYGKIIRVTLSKHQTVQLPREGLDDQGLTKDFGNSPLHRFKKPGSKNFQNIFPPSATLHLSNIPPSVAEEDLRTLFANTGGTVKAFKFFQRDHKMALLQMATVEEAIQALIDLHNYNLGENHHLRVSFSKSTI

SEQ ID NO: 113200 - protein, 351 aa, Artificial Sequence
  derived and/or modified sequence
GMKRGSDELLSGSVLSSPNSNMSSMVVTANGNDSKKFKGEDKMDGAPSRVLHIRKLPGEVTETEVIALGLPFGKVTNILMLKGKNQAFLELATEEAAITMVNYYSAVTPHLRNQPIYIQYSNHKELKTDNTLNQRAQAVLQAVTAVQTANTPLSGTTVSESAVTPAQSPVLRIIIDNMYYPVTLDVLHQIFSKFGAVLKIITFTKNNQFQALLQYGDPVNAQQAKLALDGQNIYNACCTLRIDFSKLVNLNVKYNNDKSRDYTRPDLPSGDGQPALDPAIAAAFAKETSLLGLPVAAVPGALSPLAIPNAAAAAAAAAAGRVGMPGVSAGGNTVLLVSNLNEEVFMEMCSV

SEQ ID NO: 113201 - protein, 204 aa, Artificial Sequence
  derived and/or modified sequence
MPGVSAGGNTVLLVSNLNEEMVTPQSLFTLFGVYGDVQRVKILYNKKDSALIQMADGNQSQLAMNHLNGQKMYGKIIRVTLSKHQTVQLPREGLDDQGLTKDFGNSPLHRFKKPGSKNFQNIFPPSATLHLSNIPPSVAEEDLRTLFANTGGTVKAFKFFQRDHKMALLQMATVEEAIQALIDLHNYNLGENHHLRVSFSKSTI

SEQ ID NO: 113202 - DNA, 1614 bp, Artificial Sequence
  derived and/or modified sequence
atggatggtatcgtgacggaggttgctgtcggtgtgaagcggggaagcgatgaactgttaagcgggagtgtcttgtccagtccgaactcaaacatgtcatctatggtggtaacagcaaatgggaacgacagcaaaaagtttaaaggagaagataagatggatggagccccatccagagtcctgcacatcagaaaactgccaggggaagttactgagaccgaagtcattgcactcggactgcctttcggcaaggtgacaaatatacttatgctcaaaggcaagaatcaggcattcctcgaattagcgacggaagaagctgccatcacaatggttaactattacagcgccgtgactcctcatcttcggaatcagccaatctatattcagtactccaatcacaaagagctgaaaaccgacaacacgctcaaccagcgtgcacaggctgtgctgcaggcagtgaccgcggtacagaccgcaaatacccccttgtccggcacgaccgttagtgagtctgccgtcacaccagcacagtccccggtcctgcgaattataattgacaacatgtattatcccgttactttggacgtcctccatcagatattctctaaattcggtgccgtcttgaagatcatcaccttcacgaagaacaaccagtttcaggcactgctgcagtacggagatcctgtcaacgcgcaacaggcaaagctggccctggacggccagaatatatacaatgcctgctgcacattgagaatcgacttctccaagctggtgaacctcaatgtcaagtataataatgataagtctcgcgattacacacgcccagacttgccctctggcgacggccagcccgcactcgaccccgctatcgcagctgcgtttgccaaagagacaagcctgctggggctacccgttgcagccgtgccaggtgcactgagtccattggcaattccaaatgcagcagccgcggcggccgcagctgccgccggaagggtgggcatgccaggcgtcagcgctggtggcaacacggtattactggtgtccaatctgaatgaggaaatggtcacacctcagagtctgtttacactgttcggagtttacggcgacgtccagagagttaagatactttataacaaaaaagactcggccttaatccaaatggctgatgggaaccaatcccaactggcaatgaaccatctgaacggccagaagatgtatgggaagatcattagagtcaccctgtccaaacatcagaccgtccagctccctagggaagggcttgacgaccagggactcaccaaagattttgggaattctcccttacatcgtttcaaaaagcctggctctaaaaacttccaaaatatcttcccaccttccgccactctgcacctgtccaatatccccccttctgtggctgaggaggacctgagaaccttgttcgccaacacaggtggaaccgtcaaggccttcaagttcttccagagggaccataagatggccctcctccagatggctactgttgaagaggcaatacaggctttgattgacttacataattataacctgggtgaaaatcaccatctccgggtgtcattttccaaaagcaccatatag

SEQ ID NO: 113203 - DNA, 1614 bp, Artificial Sequence
  derived and/or modified sequence
atggatggcatcgtgacagaggtggccgtgggcgtgaagaggggcagtgatgagctgctgagcggctctgtgctgagcagccccaacagcaacatgagctccatggtggtgacagccaatggaaatgacagcaagaagttcaagggggaggacaagatggatggagcccccagccgggtgctgcacatcaggaagctgcctggagaggtgacagaaacagaggtgattgccctgggcctgccctttgggaaggtgaccaacatcctgatgctgaagggcaagaaccaggccttcctggagctggccacagaggaggccgccatcaccatggtgaactactacagcgctgtgaccccccacctgaggaaccagcccatctacatccagtacagcaaccacaaggagctgaagacagacaacaccctgaaccagagggcccaggccgtgctgcaggccgtgacagctgtgcagacagccaacacccccctgagcggcaccaccgtgtctgagagcgctgtgaccccagcccagagccctgtgctgcgcatcatcatcgacaacatgtactaccctgtgaccctggatgtgctgcaccagatcttcagcaagtttggagctgtgctgaagatcatcaccttcaccaagaacaaccagttccaggccctgctgcagtatggagaccctgtgaatgcccagcaggccaagctggccctggatggccagaacatctacaatgcctgctgcaccctgagaattgacttcagcaagctggtgaacctgaatgtgaagtacaacaatgacaagagccgggactacaccaggccagacctgcccagcggagatggccagcctgccctggaccctgccatcgccgccgcctttgccaaggagaccagcctgctgggcctgcctgtggccgctgtgcctggggccctgagccccctggccatccccaatgctgctgctgctgctgctgctgctgctgctggccgggtgggcatgcctggggtgtctgctgggggcaacacagtgctgctggtgagcaacctgaatgaggagatggtgaccccccagagcctcttcaccctgtttggagtgtatggagatgtgcagagggtgaagatcctgtacaacaagaaggacagcgccctgatccagatggctgatggcaaccagagccagctggccatgaaccacctgaatggccagaagatgtatggcaagatcatccgggtgaccctgagcaagcaccagacagtgcagctgccccgggagggcctggatgaccagggcctgaccaaggactttggaaacagccccctgcaccgcttcaagaagccaggcagcaagaacttccagaacatcttccccccatctgccaccctgcacctgagcaacatcccccccagcgtggccgaggaggacctgcggaccctgtttgccaacacaggaggcaccgtgaaggccttcaagttcttccagagggaccacaagatggccctgctgcagatggccaccgtggaggaggccatccaggccctgattgacctgcacaactacaacctgggggagaaccaccacctgcgggtgtccttcagcaagagcaccatctag

SEQ ID NO: 113204 - DNA, 1614 bp, Artificial Sequence
  derived and/or modified sequence
atggacggcatcgtgaccgaggtggccgtgggcgtgaagcggggctccgacgaactcctgagcggttccgtcctaagtagtcccaatagtaacatgtccagcatggtggtgactgccaacggtaatgactccaaaaaattcaaaggtgaggataaaatggatggagctccatctagagtactccacatacgaaagctgcccggcgaagtgactgagactgaagtcatagctctgggcttacctttcggaaaagtgacgaatattctgatgttgaaaggtaagaatcaggccttcctggaacttgctaccgaagaggccgccatcactatggtgaattattatagtgcagtcaccccacacctcaggaatcagccaatctatatccagtactctaaccataaggaacttaagaccgacaacacactgaatcaaagggcccaggcagtccttcaagccgtgaccgccgtgcagacagccaacacccctcttagcggcaccaccgtgtcagaatctgccgtcactccagcacagtcccccgtgctgcgcattattattgataacatgtattatcccgtgaccttggacgttctgcatcaaattttctcaaaatttggagctgttttgaaaattataacctttactaagaacaaccagttccaggcccttctgcagtacggggatccagtgaacgcccagcaagctaagctcgcgctcgacggtcaaaacatatacaatgcgtgctgcaccctacgcatcgattttagcaagctggtgaaccttaacgttaaatataacaacgacaagtctagagactatactagaccggatctgccatccggagacggtcaacccgcactcgatccggctatagcggccgcctttgctaaggagacttccttgctcggattacccgtggctgccgtgccaggcgctctgtctcccctggcaattcccaacgctgccgctgctgccgctgcggccgccgccggccgcgtcggcatgcctggggtctccgcaggcggaaacaccgtgctgcttgtgtctaatttaaatgaggagatggtgacaccccagtcactcttcaccttatttggggtttatggcgacgtgcaacgtgtgaaaattctgtacaacaagaaggacagtgcactcattcagatggccgatggcaaccagtctcagctggccatgaatcatctcaatggacagaaaatgtatggcaagattatacgcgttaccctaagtaaacaccagacagtccagttgcctagggaagggcttgatgatcagggattaacaaaggactttggaaactcaccactccatcggtttaaaaaaccaggctccaagaacttccagaacatatttcctccatccgctaccctgcatctgagtaatatacctcctagtgtggccgaagaggacctgcgcacgttatttgcaaacaccggcggtactgttaaggcctttaaattttttcagcgagaccacaagatggctctgctgcagatggctaccgttgaggaggccatccaagcgctgattgatctgcataattataacctcggtgagaaccaccatttgcgagtgagcttttcaaagtccacgatttag

SEQ ID NO: 113205 - DNA, 3057 bp, Artificial Sequence
  derived and/or modified sequence
ggctcgctggctgcgtggctcggttcttgtgagcgaagctttgtccggttcggcaatggacggaatcgtcactgaggttgcagttggcgtgaagagaggatctgacgaactactctcaggcagtgttctcagtagtccgaactctaatatgagcagcatggtagttacagccaatggtaatgatagtaaaaaatttaaaggagaagataaaatggatggtgctccttctcgtgtacttcatattcgaaaattacctggggaagtaacagaaactgaagttattgctttaggcttaccttttggtaaggtgaccaacatccttatgctgaaaggaaaaaatcaggcatttttggaactagcaaccgaggaagcagctattactatggttaattactattctgctgtgacacctcatcttcgtaaccaaccaatatatatccagtactcgaatcacaaagaactaaagacagataatacattaaaccaacgtgctcaggcagttcttcaagctgtgacagctgtccagacagcaaatactcctcttagtggcaccacagttagcgagagtgcagtgactccagcccagagtccagtacttagaataattattgacaacatgtactaccctgtaacacttgatgttcttcaccaaatattttctaagtttggtgctgtattgaagataatcacatttacaaaaaataaccagtttcaagctttgctccagtatggtgatccagtaaatgctcaacaagcaaaactagccctagatggtcagaatatttataatgcctgctgtaccctaaggattgatttttccaaacttgtgaatttgaatgtaaaatacaacaatgataaaagtagggattatactcgacctgatcttccatctggggatggacaacctgcattggacccagctattgctgcagcatttgccaaggagacatccctcttagggcttcctgttgcagctgttccaggagctctgagtcctttggccattccaaatgctgctgcagcagctgctgcagctgctgctggccgagtgggtatgcctggagtctcagctggtggcaatacagtcctgttggttagcaatttaaatgaagagatggttacgccccaaagtctgtttaccctcttcggtgtttatggagatgtgcagcgtgtgaagattttatacaataagaaagacagcgctctaatacagatggctgatggaaaccaatcacaacttgccatgaatcatcttaatggacagaaaatgtatggaaaaattattcgtgttactctgtctaaacatcagactgtacagctacctcgagagggacttgatgatcaagggctaacaaaagattttggtaattccccattgcatcgttttaagaaacctggatccaaaaattttcaaaacatttttcctccttctgccacccttcacctatctaatatccctccatcagtagcagaagaggatctacgaacactgttcgctaacactgggggcactgtgaaagcatttaagttttttcaaagagatcacaaaatggctcttcttcagatggcaacagtggaagaagctattcaggccttgattgatcttcataattataaccttggagaaaaccatcatctgagagtgtctttctccaagtcaacaatttaaaaatgggaagatgaagattgggggtgaatcacattgttcaatgtcatcacctatttgactgttcagaaaagtggggaccagagtttgattttttttgtttttgtttttttggggtttcttttttttttccatgctgttatcattccttggttataaaatgaaatggcatatgtaaaggcagagttgttaactgctatatttcatctgttctatagggaagccattttgtctgtttaaaatttcagtttaattttgctttttttttttttttttttttcctttcaacttagttgacatacgtgccttaaaaaggaaaactagtgttgctattgtgcatttactagaaaaaaggaattggttgtttagggcacactgttatatgggaattaaaatatgtttaggcaggggtgtgtaaaaaggttaagtttttgtttctcctgcttggaacttattttgaattactggcttgtcacctttttttctatttaatcaaataagatacatgatattgaaagaataaagcagcatttttagtttttactaccttaggctttattgctttgaaaacaacattggccttttgtatctcacaattctggtctagattcagttatgaatgtaggcattagttaaaattaacaagatgcagagtattaatttcttaagacaacaaagtgatttctgtaagtttgagccctatgtggaaagcattgtggaatcttaaccttttcgtacacactcttgtgggacgtatcatataaatgtcagcactaagtaatgtcttgtttgtggctgaatatttttcgtagatgtttttgaagttgacatgacttacgtgcatttaaatatatattgccatccttagtttgtaattaagatttggaatatggttgtggatttctgagcatgtgcagactggtctagctagttcaggaactggtgcatgtatttttcaaagataaagaaagtgtactgcgaaaatatgcaggaagattaattttgtggcagttttctaaaactgacaaccaggtgggaccaaagtttatgtgcctttagtcttaatttaccttgcattgtaatattcagttttaataaatcttcaaaatattttgtatttaggaatagatctgactttaataaaaacatggctcagaatctacaggtcaaattaatttgaacagttcttgtcaatccgaattgttgattctgtttaaatgaccaatactttttgaaattgatgtacttagtttcaagattcatagattctgttatctatgtagacagaatggtcatgtatattttctattagttgagtttttacatctttagaaatgtaaaattcagtatagtttgaaagcggcacaattaaaaattaattttctaacaaa

SEQ ID NO: 113206 - DNA, 1614 bp, Artificial Sequence
  derived and/or modified sequence
atggacggcatcgtaactgaagtcgctgtcggggtgaaacgaggatccgatgagctgttgtctgggagtgtgctgtcgtcaccaaactcaaatatgagtagcatggttgtgaccgccaacgggaatgattccaaaaaattcaaaggggaagataagatggacggagctcccagtagagtactgcacatccgcaaattaccaggagaggtgacagaaacagaagtgattgcattgggcctgccgttcggcaaagtgaccaacatcctgatgctgaaaggtaagaaccaggccttcttagaactagctaccgaggaggctgccataacgatggttaactactattccgcagtgactccccacctgagaaaccagcccatttatattcaatatagcaaccacaaagaactcaagaccgataatactttgaaccaaagggcgcaggccgtgcttcaggcggtgacagctgtgcagaccgcaaatacaccgctgagcggcaccacagtgagtgaatctgccgttacgccagcccaatctccggtgttgagaattattatcgacaacatgtattatcccgtcacactcgatgtcctgcatcaaatatttagtaaattcggtgctgtactaaaaattataacctttacaaaaaacaatcagttccaggccctgctgcaatatggggacccggtaaacgcccagcaggctaagttagcgctggacggccagaacatctataacgcctgctgtactctcaggattgatttttcaaagctggtcaacttgaacgtcaaatacaacaatgataagagccgtgattataccaggcctgatctgccatcaggtgacggtcaacccgcactcgatccggcaatagccgctgcgttcgcaaaagagacatcactacttggcttgcccgtagcagccgtacctggcgcactcagcccactggctattcccaatgccgcagccgcagccgcagccgctgcagctggtagagtgggaatgcccggagtgagcgcgggaggaaacaccgttttgctggtgtccaatctcaatgaggaaatggtcaccccccagagtctattcactctgtttggagtatatggagacgtgcagagggttaagatcctctacaataagaaggattctgccctgatccagatggcagatggaaatcagagccagcttgccatgaatcacctaaatggacagaagatgtatggtaaaatcattcgggtgaccttgtctaaacatcaaacagtacaactgccccgtgagggtttagacgaccagggcctgaccaaggacttcggaaatagccccttgcacagattcaagaagcctggatccaagaacttccaaaacatcttccccccttctgccactctacatttaagcaatatcccacctagtgtggcggaagaggatctcagaaccctgtttgccaatacaggtgggacagtgaaggcatttaaatttttccagcgcgaccacaaaatggcattgctgcagatggccactgttgaagaggccatccaggccctgatagatctgcacaattataatttgggagagaaccaccacctgagagtcagcttttccaaaagcactatctag

SEQ ID NO: 113207 - DNA, 1614 bp, Artificial Sequence
  derived and/or modified sequence
atggacggcatcgtgaccgaggtggccgtgggcgtgaagagaggcagcgacgagctgctgagcggcagcgtgctgagcagccccaacagcaacatgagcagcatggtggtgaccgccaacggcaacgacagcaagaagttcaagggcgaggacaagatggacggcgcccccagcagagtgctgcacatcagaaagctgcccggcgaggtgaccgagaccgaggtgatcgccctgggcctgcccttcggcaaggtgaccaacatcctgatgctgaagggcaagaaccaggccttcctggagctggccaccgaggaggccgccatcaccatggtgaactactacagcgccgtgaccccccacctgagaaaccagcccatctacatccagtacagcaaccacaaggagctgaagaccgacaacaccctgaaccagagagcccaggccgtgctgcaggccgtgaccgccgtgcagaccgccaacacccccctgagcggcaccaccgtgagcgagagcgccgtgacccccgcccagagccccgtgctgagaatcatcatcgacaacatgtactaccccgtgaccctggacgtgctgcaccagatcttcagcaagttcggcgccgtgctgaagatcatcaccttcaccaagaacaaccagttccaggccctgctgcagtacggcgaccccgtgaacgcccagcaggccaagctggccctggacggccagaacatctacaacgcctgctgcaccctgagaatcgacttcagcaagctggtgaacctgaacgtgaagtacaacaacgacaagagcagagactacaccagacccgacctgcccagcggcgacggccagcccgccctggaccccgccatcgccgccgccttcgccaaggagaccagcctgctgggcctgcccgtggccgccgtgcccggcgccctgagccccctggccatccccaacgccgccgccgccgccgccgccgccgccgccggcagagtgggcatgcccggcgtgagcgccggcggcaacaccgtgctgctggtgagcaacctgaacgaggagatggtgaccccccagagcctgttcaccctgttcggcgtgtacggcgacgtgcagagagtgaagatcctgtacaacaagaaggacagcgccctgatccagatggccgacggcaaccagagccagctggccatgaaccacctgaacggccagaagatgtacggcaagatcatcagagtgaccctgagcaagcaccagaccgtgcagctgcccagagagggcctggacgaccagggcctgaccaaggacttcggcaacagccccctgcacagattcaagaagcccggcagcaagaacttccagaacatcttcccccccagcgccaccctgcacctgagcaacatcccccccagcgtggccgaggaggacctgagaaccctgttcgccaacaccggcggcaccgtgaaggccttcaagttcttccagagagaccacaagatggccctgctgcagatggccaccgtggaggaggccatccaggccctgatcgacctgcacaactacaacctgggcgagaaccaccacctgagagtgagcttcagcaagagcaccatctag

SEQ ID NO: 113208 - protein, 548 aa, Artificial Sequence
  derived and/or modified sequence
MWSNLTFSFFGLRTKAKKYVTVNNRGSDELLSGSVLSSPNSNMSSMVVTANGNDSKKFKGEDKMDGAPSRVLHIRKLPGEVTETEVIALGLPFGKVTNILMLKGKNQAFLELATEEAAITMVNYYSAVTPHLRNQPIYIQYSNHKELKTDNTLNQRAQAVLQAVTAVQTANTPLSGTTVSESAVTPAQSPVLRIIIDNMYYPVTLDVLHQIFSKFGAVLKIITFTKNNQFQALLQYGDPVNAQQAKLALDGQNIYNACCTLRIDFSKLVNLNVKYNNDKSRDYTRPDLPSGDGQPALDPAIAAAFAKETSLLGLPVAAVPGALSPLAIPNAAAAAAAAAAGRVGMPGVSAGGNTVLLVSNLNEEMVTPQSLFTLFGVYGDVQRVKILYNKKDSALIQMADGNQSQLAMNHLNGQKMYGKIIRVTLSKHQTVQLPREGLDDQGLTKDFGNSPLHRFKKPGSKNFQNIFPPSATLHLSNIPPSVAEEDLRTLFANTGGTVKAFKFFQRDHKMALLQMATVEEAIQALIDLHNYNLGENHHLRVSFSKSTI

SEQ ID NO: 113209 - DNA, 1647 bp, Artificial Sequence
  derived and/or modified sequence
atgtggtccaatctcacatttagcttctttggcctgcggacgaaagctaaaaagtatgtcactgtgaataacagggggagcgatgaactgttgagcggctcagttttgagttcccctaatagcaatatgtcctctatggtcgttaccgcgaatgggaacgatagcaagaagtttaagggggaggacaaaatggatggcgcaccttcacgcgtgctccacattcgcaagctacccggcgaggtcacagaaacagaagtgattgcattaggtttgcccttcggcaaggtgaccaacatcctgatgctaaaaggaaagaaccaagcctttctcgaactggctaccgaggaagcagccataacaatggtgaattactattccgccgtgacgcctcacctccggaatcagccgatttatattcagtactccaaccacaaagagctgaagaccgacaataccttgaatcaacgtgctcaggctgtcctccaggccgtgaccgcggtgcagaccgccaatacaccactgagcgggactacagtgtcggaatcggccgtgaccccagcccagagcccagtcctgcgcatcattattgacaatatgtactatcccgtcactctggacgtccttcatcagatctttagcaagtttggtgctgtgcttaagatcattacgttcaccaagaataatcagttccaagccttgttacagtacggggatcccgtgaatgcacagcaagccaagctggctcttgatgggcagaatatctataatgcctgctgcactttgaggatagatttttctaagctcgtgaatctgaatgtgaaatacaataacgataaaagcagggactacaccaggcctgacctccctagcggtgacggacagcctgccctggatcccgcgatagccgcagcttttgctaaagagacaagcctgctcggtctcccggtcgctgccgtgcccggagcactgtctcccctggcaatacccaatgcagccgctgcggcggccgcagccgcggcaggtcgtgtcggcatgccgggagtgagcgcggggggaaatacagtgctgctcgtgtccaacctcaacgaggagatggttacgccacagtctcttttcacacttttcggcgtctatggtgacgtccaaagggtgaagattttgtacaataagaaagactccgccctgatccagatggctgatgggaaccagtcccagctcgccatgaaccacctaaacggacaaaaaatgtacggaaaaataatccgggtcaccctgtccaaacatcagacagtccagctccctcgcgaggggctcgacgaccagggtctgaccaaggattttgggaattcccccctgcatcggttcaaaaaaccggggtccaaaaacttccaaaatatctttccgccgagcgcaacacttcacctgtccaatatccccccctctgtcgcagaggaagacctcagaacactttttgctaataccggtggaaccgtgaaagcgttcaaatttttccaacgggatcacaagatggccctcctgcagatggcaaccgtggaggaagctatacaggcgctgatcgacctccacaactataatttgggggagaatcaccacctgcgcgtgagtttctccaaaagtactatctag

SEQ ID NO: 113210 - DNA, 1647 bp, Artificial Sequence
  derived and/or modified sequence
atgtggagcaacctgaccttctccttcttcggcctgcggaccaaggccaagaagtatgtgacagtgaacaacagaggaagtgatgagctgctgagcggctctgtgctgagcagccccaacagcaacatgagctccatggtggtgacagccaatggaaatgacagcaagaagttcaagggggaggacaagatggatggagcccccagccgggtgctgcacatcaggaagctgcccggggaggtgacagaaacagaggtgattgccctgggcctgccctttgggaaggtgaccaacatcctgatgctgaagggcaagaaccaggccttcctggagctggccacagaggaggccgccatcaccatggtgaactactacagcgctgtgaccccccacctgaggaaccagcccatctacatccagtacagcaaccacaaggagctgaagacagacaacaccctgaaccagagggcccaggccgtgctgcaggccgtgacagctgtgcagacagccaacacccccctgagcggcaccaccgtgtctgagagcgctgtgaccccagcccagagccctgtgctgcgcatcatcatcgacaacatgtactaccctgtgaccctggatgtgctgcaccagatcttcagcaagtttggagctgtgctgaagatcatcaccttcaccaagaacaaccagttccaggccctgctgcagtacggggaccctgtgaatgcccagcaggccaagctggccctggatggccagaacatctacaatgcctgctgcaccctgagaattgacttcagcaagctggtgaacctgaatgtgaagtacaacaatgacaagagccgggactacaccaggccagacctgcccagcggagatggccagcctgccctggaccctgccatcgctgctgcctttgccaaggagaccagcctgctgggcctgcctgtggccgctgtgcctggggccctgagccccctggccatccccaatgctgctgctgctgctgctgctgctgctgctggccgggtgggcatgcctggggtgtctgctgggggcaacacagtgctgctggtgagcaacctgaatgaggagatggtgaccccccagagcctcttcaccctgtttggagtgtatggagatgtgcagagggtgaagatcctgtacaacaagaaggacagcgccctgatccagatggctgatggcaaccagagccagctggccatgaaccacctgaatggccagaagatgtatggcaagatcatccgggtgaccctgagcaagcaccagacagtgcagctgccccgggagggcctggatgaccagggcctgaccaaggactttggaaacagccccctgcaccgcttcaagaagccaggcagcaagaacttccagaacatcttcccccccagcgccaccctgcacctgagcaacatccccccatctgtggccgaggaggacctgcggaccctgtttgccaacacaggaggcaccgtgaaggccttcaagttcttccagagggaccacaagatggccctgctgcagatggccaccgtggaggaggccatccaggccctgattgacctgcacaactacaacctgggggagaaccaccacctgcgggtgtccttcagcaagagcaccatctag

SEQ ID NO: 113211 - DNA, 1647 bp, Artificial Sequence
  derived and/or modified sequence
atgtggagcaacctgaccttcagcttcttcggcctgcggaccaaggccaaaaaatatgtcacagtcaataataggggttccgacgaactgctcagcgggtccgtgctcagttccccaaacagcaacatgtcttcgatggttgtgacagctaacggaaacgatagtaaaaagttcaaaggtgaggataagatggacggcgccccaagccgggtcttacacattaggaagctaccgggagaggttacggagacagaggtcattgctctagggcttccgtttgggaaagtgacaaatatcctcatgctcaaaggaaagaaccaggcctttctcgaattggctactgaagaagctgcaatcacgatggtgaactactattccgctgtgaccccacacctgcggaaccagcctatctatatacagtatagcaatcataaagagctgaaaactgacaatactcttaaccagagagcccaggccgtgctccaggccgtaactgctgtgcagacagcaaacactccacttagcgggacgaccgttagcgagtcagcggtgacacccgcacagagtcccgtccttaggataatcatcgacaatatgtattaccctgttactctggacgtgcttcaccagattttctcgaaattcggcgcagtgctaaagataatcacattcactaaaaataatcaattccaggccctgctccagtacggagacccagttaatgcccaacaggctaagctcgctctggacgggcagaatatctacaatgcatgctgtactctgagaatcgatttctccaagctcgtgaacctgaatgtcaagtacaacaacgacaagtccagggattatacgagaccagacctgccttctggcgacggacagccggcccttgaccccgctatagctgctgcttttgcgaaagagacctctcttctgggattgcccgtggcggctgttccaggcgcactgagcccccttgccatccctaacgccgccgccgcagcggccgctgcggctgctggacgagtggggatgcctggggtttctgcaggggggaatacagtgctgctcgtgtcaaatttgaatgaagagatggtcaccccgcagtccctgtttactcttttcggagtgtatggtgatgttcagagagtgaaaattttatacaataaaaaggatagcgcgttgatccagatggcagacggaaaccagagccagctcgccatgaaccatctcaatggccagaagatgtacggcaaaatcatccgcgtcaccctgtccaagcatcagaccgtgcagctcccaagagaaggtctggacgatcagggattaactaaggatttcgggaattcccccctgcaccggttcaaaaaacccggaagcaagaactttcagaatatattccctccttccgccacactgcacctgagcaacatcccaccttccgtggcagaagaggacttacgcacactgttcgccaatactggcggtaccgtgaaggcgttcaaatttttccaacgcgaccacaagatggcgttgctccaaatggctaccgtggaagaagccatacaggcgctcatagatctgcataactacaaccttggtgagaatcaccacctgcgggtcagcttctccaagtcgaccatttag

SEQ ID NO: 113212 - DNA, 1965 bp, Artificial Sequence
  derived and/or modified sequence
gtggctcggttcttgtgagcgaagctttgtccggttcggcaatggacggaatcgtcactgaggttgcagttggcgtgaagaatatctgatctggacttctgtggatttatggaagagctggctttatttctctatcctgtgggaggggcaaactttgattttgtatgtggagtaacttgaccttcagtttttttggtctgagaacaaaggccaaaaaatatgtaacagttaataacagaggatctgacgaactactctcaggcagtgttctcagtagtccgaactctaatatgagcagcatggtagttacagccaatggtaatgatagtaaaaaatttaaaggagaagataaaatggatggtgctccttctcgtgtacttcatattcgaaaattacctggggaagtaacagaaactgaagttattgctttaggcttaccttttggtaaggtgaccaacatccttatgctgaaaggaaaaaatcaggcatttttggaactagcaaccgaggaagcagctattactatggttaattactattctgctgtgacacctcatcttcgtaaccaaccaatatatatccagtactcgaatcacaaagaactaaagacagataatacattaaaccaacgtgctcaggcagttcttcaagctgtgacagctgtccagacagcaaatactcctcttagtggcaccacagttagcgagagtgcagtgactccagcccagagtccagtacttagaataattattgacaacatgtactaccctgtaacacttgatgttcttcaccaaatattttctaagtttggtgctgtattgaagataatcacatttacaaaaaataaccagtttcaagctttgctccagtatggtgatccagtaaatgctcaacaagcaaaactagccctagatggtcagaatatttataatgcctgctgtaccctaaggattgatttttccaaacttgtgaatttgaatgtaaaatacaacaatgataaaagtagggattatactcgacctgatcttccatctggggatggacaacctgcattggacccagctattgctgcagcatttgccaaggagacatccctcttagggcttcctgttgcagctgttccaggagctctgagtcctttggccattccaaatgctgctgcagcagctgctgcagctgctgctggccgagtgggtatgcctggagtctcagctggtggcaatacagtcctgttggttagcaatttaaatgaagagatggttacgccccaaagtctgtttaccctcttcggtgtttatggagatgtgcagcgtgtgaagattttatacaataagaaagacagcgctctaatacagatggctgatggaaaccaatcacaacttgccatgaatcatcttaatggacagaaaatgtatggaaaaattattcgtgttactctgtctaaacatcagactgtacagctacctcgagagggacttgatgatcaagggctaacaaaagattttggtaattccccattgcatcgttttaagaaacctggatccaaaaattttcaaaacatttttcctccttctgccacccttcacctatctaatatccctccatcagtagcagaagaggatctacgaacactgttcgctaacactgggggcactgtgaaagcatttaagttttttcaaagagatcacaaaatggctcttcttcagatggcaacagtggaagaagctattcaggccttgattgatcttcataattataaccttggagaaaaccatcatctgagagtgtctttctccaagtcaacaatttaaaaatgggaagatgaagattgggggtgaatcacattgttcaatgtcatcacctatttgactgttcagaaaagtggggaccagagtttgattttttttgtttttgtttttttggggtttcttttttttttccatgctgttatcattccttggttat

SEQ ID NO: 113213 - DNA, 1647 bp, Artificial Sequence
  derived and/or modified sequence
atgtggtctaatctcactttcagcttcttcggcttacgcaccaaagcgaaaaagtacgtcacagtgaataaccgcggatctgacgagctgctgagtggatccgttctgagctcccccaattcaaatatgtcttcgatggtcgttaccgcaaacggtaatgattcaaaaaaattcaagggggaggacaaaatggatggagccccttctagagtgctacacataaggaagcttcccggtgaagttaccgaaaccgaggtaattgccctcggcctgccattcgggaaggtaactaacattctcatgctgaagggcaagaaccaggcattcttggaactggcgaccgaggaggccgcaatcacaatggtcaattactatagcgccgtcactccgcacctgcggaatcagccaatctacatccagtattcaaaccataaggaacttaaaacagacaatacattgaatcagcgcgctcaggcggtgctgcaggcagtaaccgccgtgcagaccgcaaataccccactttccggcaccactgttagtgagtcagcggttaccccggctcagagtcccgtcctgcgaattattatagacaacatgtactaccccgtgaccttggatgtgctacatcagattttctctaagttcggcgctgttcttaaaatcataacgttcaccaagaataaccagttccaggcactgttgcagtacggcgaccccgtaaacgcccagcaggcaaaactggctttagatgggcaaaacatctacaatgcctgttgcactcttagaatcgacttttctaagcttgtgaacctgaatgtgaaatataataatgataagagccgggactatactagacctgacttgccttcaggcgacggtcaacccgctctggatccggcaatcgccgctgcttttgccaaggagacctcccttctgggcttacctgtggctgccgtgccgggtgcattaagccccctggccatccccaacgcagcagctgctgcagctgcagcagccgcaggccgagtcgggatgcccggtgtcagtgctgggggaaacacagttctgctcgtgtcgaacctaaatgaagagatggtgacgcctcagtctcttttcaccctattcggagtttatggggatgtacagcgcgtgaagattctgtataataaaaaagactcggcgttgatccagatggcagacggtaatcagagccaactggctatgaatcacctcaatggtcaaaaaatgtatggcaagatcatcagagtcaccctttctaagcaccagactgtccagctcccccgagaagggttagatgaccaggggctgacaaaagacttcggtaatagccctcttcatagatttaagaagcccggttcaaagaactttcagaatatctttccaccttcagccacactccatctgagtaacatcccaccctctgttgccgaggaggacctgcgcaccctctttgcaaacaccggcggaactgtgaaggctttcaagtttttccagcgggatcacaaaatggccctgctgcagatggcgacagtggaagaggccatccaggctctgatagatctccacaattataatttgggggagaatcatcacctccgagtgtcttttagtaaatcgacaatctag

SEQ ID NO: 113214 - DNA, 1647 bp, Artificial Sequence
  derived and/or modified sequence
atgtggagcaacctgaccttcagcttcttcggcctgagaaccaaggccaagaagtacgtgaccgtgaacaacagaggcagcgacgagctgctgagcggcagcgtgctgagcagccccaacagcaacatgagcagcatggtggtgaccgccaacggcaacgacagcaagaagttcaagggcgaggacaagatggacggcgcccccagcagagtgctgcacatcagaaagctgcccggcgaggtgaccgagaccgaggtgatcgccctgggcctgcccttcggcaaggtgaccaacatcctgatgctgaagggcaagaaccaggccttcctggagctggccaccgaggaggccgccatcaccatggtgaactactacagcgccgtgaccccccacctgagaaaccagcccatctacatccagtacagcaaccacaaggagctgaagaccgacaacaccctgaaccagagagcccaggccgtgctgcaggccgtgaccgccgtgcagaccgccaacacccccctgagcggcaccaccgtgagcgagagcgccgtgacccccgcccagagccccgtgctgagaatcatcatcgacaacatgtactaccccgtgaccctggacgtgctgcaccagatcttcagcaagttcggcgccgtgctgaagatcatcaccttcaccaagaacaaccagttccaggccctgctgcagtacggcgaccccgtgaacgcccagcaggccaagctggccctggacggccagaacatctacaacgcctgctgcaccctgagaatcgacttcagcaagctggtgaacctgaacgtgaagtacaacaacgacaagagcagagactacaccagacccgacctgcccagcggcgacggccagcccgccctggaccccgccatcgccgccgccttcgccaaggagaccagcctgctgggcctgcccgtggccgccgtgcccggcgccctgagccccctggccatccccaacgccgccgccgccgccgccgccgccgccgccggcagagtgggcatgcccggcgtgagcgccggcggcaacaccgtgctgctggtgagcaacctgaacgaggagatggtgaccccccagagcctgttcaccctgttcggcgtgtacggcgacgtgcagagagtgaagatcctgtacaacaagaaggacagcgccctgatccagatggccgacggcaaccagagccagctggccatgaaccacctgaacggccagaagatgtacggcaagatcatcagagtgaccctgagcaagcaccagaccgtgcagctgcccagagagggcctggacgaccagggcctgaccaaggacttcggcaacagccccctgcacagattcaagaagcccggcagcaagaacttccagaacatcttcccccccagcgccaccctgcacctgagcaacatcccccccagcgtggccgaggaggacctgagaaccctgttcgccaacaccggcggcaccgtgaaggccttcaagttcttccagagagaccacaagatggccctgctgcagatggccaccgtggaggaggccatccaggccctgatcgacctgcacaactacaacctgggcgagaaccaccacctgagagtgagcttcagcaagagcaccatctag

SEQ ID NO: 113215 - protein, 536 aa, Artificial Sequence
  derived and/or modified sequence
MDGIVTEVAVGVKRGSDELLSGSVLSSPNSNMSSMVVTANGNDSKKFKGEDKMDGAPSRVLHIRKLPGEVTETEVIALGLPFGKVTNILMLKGKNQAFLELATEEAAITMVNYYSAVTPHLRNQPIYIQYSNHKELKTDNTLNQRAQAVLQAVTAVQTANTPLSGTTVSESAVTPAQSPVLRIIIDNMYYPVTLDVLHQIFSKFGAVLKIITFTKNNQFQALLQYGDPVNAQQAKLALDGQNIYNACCTLRIDFSKLVNLNVKYNNDKSRDYTRPDLPSGDGQPALDPAIAAAFAKETSLLGLPVAAVPGALSPLAIPNAAAAAAAAAAGRVGMPGVSAGGNTVLLVSNLNEEMVTPQSLFTLFGVYGDVQRVKILYNKKDSALIQMADGNQSQLAMNHLNGQKMYGKIIRVTLSKHQTVQLPREGLDDQGLTKDFGNSPLHRFKKPGSKNFQNIFPPSATLHLSNIPPSVAEEDLRTLFANTGGTVKAFKFFQDHKMALLQMATVEEAIQALIDLHNYNLGENHHLRVSFSKSTI

SEQ ID NO: 113216 - DNA, 1611 bp, Artificial Sequence
  derived and/or modified sequence
atggatggaattgtgactgaagtggcggtgggtgtgaaacgggggtctgacgaattgctaagtggcagtgtgctatcctcacctaactccaacatgtcctctatggtcgttacagctaatggtaatgactcaaagaagtttaagggggaagacaagatggacggagccccttcccgagtcctccatatacggaagctgccaggcgaggtgaccgaaacggaggtcattgcccttggccttccctttggcaaggtgacaaacattcttatgctgaaaggcaaaaaccaggcgttcctggaactggccaccgaggaggccgctattaccatggtgaattactattctgctgtgactccacacctgagaaaccagccaatctatattcagtactccaaccacaaggagctgaagaccgacaataccctcaatcagcgggcccaggccgtgcttcaggcagtgactgcggtccaaactgctaatacgcctttgtcaggaacaaccgtcagcgaaagtgctgtgacacccgcacaaagccctgtccttcgtattatcattgacaacatgtactaccctgtgaccctagatgtgctccatcagatattctctaaatttggcgcagtattaaagatcatcacttttactaagaataaccagtttcaagccttgctgcagtatggtgatcctgttaatgcccagcaggccaagcttgccctcgatggccaaaacatttacaacgcgtgttgtacgttgaggatcgacttctccaagctggtcaatctgaacgttaaatacaacaacgacaaatcccgcgattatactaggccagacctgcccagtggtgatggacagcctgctctggacccggctatcgccgcggcgtttgctaaggaaacgagcctcctaggcctgccagtggccgcagttccaggggcactctcccctctggcgatacccaacgccgccgccgcagccgctgctgcagcggctggcagagttggaatgcccggcgtgagtgcaggaggcaacactgtgttactggtcagcaacctaaacgaagagatggtgacaccacagtcactgtttacactattcggcgtgtatggagatgttcagcgggtaaagatcttgtacaacaaaaaggactcagccctcattcagatggccgacggcaatcaatcacagttagccatgaaccacctcaatggacaaaaaatgtatggaaaaataatccgcgtcacattgagtaaacaccaaaccgttcagttgccgcgtgaaggtctggacgatcagggcctcaccaaggattttgggaattctccactgcaccggtttaaaaaacccggcagtaagaattttcagaacatctttcctccatcagccaccttgcatttgagcaatatcccgccatctgtggccgaggaggacttgaggacgctgtttgcaaatacgggcggaaccgtgaaagcattcaaattctttcaggatcacaagatggcactattgcagatggccaccgtggaggaagctatccaggcccttattgacctgcacaattacaatctgggggagaatcaccaccttagagtgtcctttagcaagagtacaatttag

SEQ ID NO: 113217 - DNA, 1056 bp, Artificial Sequence
  derived and/or modified sequence
gggatgaagcgcggctcggatgaattactttctggttcggtgttgagctcgcccaatagcaatatgtcttctatggtagtgaccgccaacgggaatgactccaagaaattcaagggcgaggacaagatggacggcgcccccagtagggtactccatatcagaaagcttccaggtgaggtgactgaaaccgaagtgattgcactgggactacctttcggcaaggtgacaaacatcctgatgttaaaggggaaaaaccaagcgttcctggaactggctacagaagaggcagccatcaccatggtaaattactactccgccgtgacacctcacctgcgaaatcagccaatctacattcagtacagcaaccacaaggaactcaagaccgataacacgttaaaccagagggcccaagccgtgctccaggccgttacagcagtacagacagccaacacccctctctctggaacaacagtgtcggagagcgcagtaacgcccgcccagtcacccgtgctgcgcattatcatagataatatgtattaccccgtgaccctggacgtcctgcaccagatttttagtaaatttggagctgtcttgaaaataatcacattcacaaaaaacaaccaatttcaggcactcctccaatacggagatccagtgaatgctcagcaagcaaagctcgccctggacggacagaacatctataacgcctgctgtacccttcggattgactttagcaaactggtcaatctcaacgtaaagtacaacaatgacaaatccagggattatacacgacctgacctaccatctggagatggacagccagctcttgatcctgccatcgctgccgcttttgcaaaggaaactagccttttaggcctgccagtcgcagcagtgccaggggccctttcccccctcgccatcccaaacgccgcagctgccgccgctgcagcagccgctggacgcgtggggatgccaggggtgagtgcagggggaaatacggtgctattggtgagcaacctcaacgaagaggttttcatggagatgtgttctgtctag

SEQ ID NO: 113218 - DNA, 1611 bp, Artificial Sequence
  derived and/or modified sequence
atggatggcatcgtgacagaggtggccgtgggcgtgaagaggggcagtgatgagctgctgagcggctctgtgctgagcagccccaacagcaacatgagctccatggtggtgacagccaatggaaatgacagcaagaagttcaagggggaggacaagatggatggagcccccagccgggtgctgcacatcaggaagctgcctggagaggtgacagaaacagaggtgattgccctgggcctgccctttgggaaggtgaccaacatcctgatgctgaagggcaagaaccaggccttcctggagctggccacagaggaggccgccatcaccatggtgaactactacagcgctgtgaccccccacctgaggaaccagcccatctacatccagtacagcaaccacaaggagctgaagacagacaacaccctgaaccagagggcccaggccgtgctgcaggccgtgacagctgtgcagacagccaacacccccctgagcggcaccaccgtgtctgagagcgctgtgaccccagcccagagccctgtgctgcgcatcatcatcgacaacatgtactaccctgtgaccctggatgtgctgcaccagatcttcagcaagtttggagctgtgctgaagatcatcaccttcaccaagaacaaccagttccaggccctgctgcagtatggagaccctgtgaatgcccagcaggccaagctggccctggatggccagaacatctacaatgcctgctgcaccctgagaattgacttcagcaagctggtgaacctgaatgtgaagtacaacaatgacaagagccgggactacaccaggccagacctgcccagcggagatggccagcctgccctggaccctgccatcgccgccgcctttgccaaggagaccagcctgctgggcctgcctgtggccgctgtgcctggggccctgagccccctggccatccccaatgctgctgctgctgctgctgctgctgctgctggccgggtgggcatgcctggggtgtctgctgggggcaacacagtgctgctggtgagcaacctgaatgaggagatggtgaccccccagagcctcttcaccctgtttggagtgtatggagatgtgcagagggtgaagatcctgtacaacaagaaggacagcgccctgatccagatggctgatggcaaccagagccagctggccatgaaccacctgaatggccagaagatgtatggcaagatcatccgggtgaccctgagcaagcaccagacagtgcagctgccccgggagggcctggatgaccagggcctgaccaaggactttggaaacagccccctgcaccgcttcaagaagccaggcagcaagaacttccagaacatcttccccccatctgccaccctgcacctgagcaacatcccccccagcgtggccgaggaggacctgcggaccctgtttgccaacacaggaggcaccgtgaaggccttcaagttcttccaggaccacaagatggccctgctgcagatggccaccgtggaggaggccatccaggccctgattgacctgcacaactacaacctgggggagaaccaccacctgcgggtgtccttcagcaagagcaccatctag

SEQ ID NO: 113219 - DNA, 1056 bp, Artificial Sequence
  derived and/or modified sequence
ggcatgaagaggggcagtgatgagctgctgagcggctctgtgctgagcagccccaacagcaacatgagctccatggtggtgacagccaatggaaatgacagcaagaagttcaagggggaggacaagatggatggagcccccagccgggtgctgcacatcaggaagctgcctggagaggtgacagaaacagaggtgattgccctgggcctgccctttgggaaggtgaccaacatcctgatgctgaagggcaagaaccaggccttcctggagctggccacagaggaggccgccatcaccatggtgaactactacagcgctgtgaccccccacctgaggaaccagcccatctacatccagtacagcaaccacaaggagctgaagacagacaacaccctgaaccagagggcccaggccgtgctgcaggccgtgacagctgtgcagacagccaacacccccctgagcggcaccaccgtgtctgagagcgctgtgaccccagcccagagccctgtgctgcgcatcatcatcgacaacatgtactaccctgtgaccctggatgtgctgcaccagatcttcagcaagtttggagctgtgctgaagatcatcaccttcaccaagaacaaccagttccaggccctgctgcagtatggagaccctgtgaatgcccagcaggccaagctggccctggatggccagaacatctacaatgcctgctgcaccctgagaattgacttcagcaagctggtgaacctgaatgtgaagtacaacaatgacaagagccgggactacaccaggccagacctgcccagcggagatggccagcctgccctggaccctgccatcgccgccgcctttgccaaggagaccagcctgctgggcctgcctgtggccgctgtgcctggggccctgagccccctggccatccccaatgctgctgctgctgctgctgctgctgctgctggccgggtgggcatgcctggggtgtctgctgggggcaacacagtgctgctggtgagcaacctgaatgaggaggtgttcatggagatgtgcagcgtgtag

SEQ ID NO: 113220 - DNA, 1611 bp, Artificial Sequence
  derived and/or modified sequence
atggacggcatcgtgaccgaggtggccgtgggcgtgaagcggggctcagacgagctgctttccggctcagttctgagcagccctaactcgaacatgtcatccatggttgttacggctaacggtaatgatagtaaaaaatttaaaggcgaggacaaaatggatggtgccccaagtcgggtcctgcatatccgcaaactaccaggcgaggtcaccgagaccgaggttatagcccttggccttccttttggaaaggtcaccaatatcttaatgcttaaaggcaagaatcaagcatttctggaacttgctacagaagaggccgctatcaccatggtgaattattactcggcggttaccccccacctacggaatcagcctatctacatccaatattctaaccataaggaactgaaaacagacaatacactgaatcaacgcgcgcaggcagtgctgcaagccgtcacggccgtccagaccgccaatacacccctgtctgggacaaccgtctcagagagtgccgtgactcccgcccagtcacctgtgctgcggatcatcatagacaacatgtactatccggtgacccttgacgtgcttcaccagatcttctcaaagttcggggcagttttgaagatcatcacgtttacaaagaataatcaattccaagccctgctccaatatggggatcccgtgaatgcccagcaggccaagctcgcactcgatggccagaatatctataatgcctgttgtacactcagaattgactttagcaagcttgttaacctcaacgtgaaatacaataatgacaagtccagagattacacacgcccagatctcccatcaggcgatgggcagcccgctctggaccctgctatcgcagcagcttttgccaaggagacaagcttactgggtctgcccgttgctgcggtgcccggcgctttgtcccccctggccataccgaatgctgcagccgcggctgcagctgcagccgctggaagggtggggatgcctggggtaagcgccggtggaaacacagttttgctggtgagcaatctgaacgaagagatggtgacccctcagtccctatttacgctgtttggcgtctatggcgacgtccaaagggttaagatactctacaataagaaagattctgcgttgatccagatggccgatgggaaccagtcacagctggccatgaaccatctcaatggccagaagatgtacggaaaaatcatccgcgttactctgagcaaacaccagaccgtgcagctgcccagagagggcctagatgaccaggggctgacaaaagacttcggcaactcgccccttcatcgctttaagaaaccggggagtaagaacttccagaacatctttcctccttcggccactctgcatctttctaatattcccccatccgtcgccgaggaggacttgaggaccctcttcgctaacacagggggaacggtgaaagcctttaagttcttccaagaccacaaaatggccctgctgcaaatggctaccgttgaagaggccattcaggctctgatagacctccataactacaatctgggagaaaaccaccatcttcgggtgtctttcagcaaatctaccatctag

SEQ ID NO: 113221 - DNA, 1056 bp, Artificial Sequence
  derived and/or modified sequence
ggcatgaagcggggcagcgacgagctgctgagcggcagcgtgctgagctccccaaattctaacatgtcctctatggttgtgacggctaatgggaatgatagcaagaagtttaagggggaggacaagatggacggcgctcccagtcgagttttgcacatccgcaaactgcccggagaggtgactgagaccgaagtgatagctctcgggctgccgtttggaaaagtaacaaatatcctgatgctgaaaggcaagaaccaagcctttctggaattggccacggaagaagctgctatcacaatggttaattattactccgcagtgacccctcatctgcggaaccagcctatatacattcagtatagtaatcacaaagagttgaagacagacaatacgctgaaccagagagcccaagctgtgctccaggccgttactgctgtgcagactgcaaacacgccactatcggggaccacagtgtcggaatccgctgtcactcctgcgcagtcccctgtgcttcggattatcattgataatatgtactatccggtaactctagatgtgttacatcagatattttccaagtttggagcggtgctcaaaatcatcaccttcacgaagaacaaccagtttcaggccctacttcagtatggtgatcctgtgaatgctcagcaggccaaactcgcactcgatggacaaaacatttataacgcatgctgcaccctgcgaatcgatttcagcaagctggtaaatcttaacgtgaagtacaacaatgacaagagccgggactatactcggccagacctgcccagtggggatgggcagccagccctggaccccgccatcgccgcagcgtttgcgaaggagaccagccttctgggcctaccagttgcagctgttcccggtgcccttagcccactcgccatccccaacgcagccgccgccgccgccgccgcagcagctggcagagtgggaatgccaggtgtctctgcgggcggaaacactgtactgctagtatctaatttaaatgaagaggtgtttatggagatgtgttccgtgtag

SEQ ID NO: 113222 - DNA, 3054 bp, Artificial Sequence
  derived and/or modified sequence
ggctcgctggctgcgtggctcggttcttgtgagcgaagctttgtccggttcggcaatggacggaatcgtcactgaggttgcagttggcgtgaagagaggatctgacgaactactctcaggcagtgttctcagtagtccgaactctaatatgagcagcatggtagttacagccaatggtaatgatagtaaaaaatttaaaggagaagataaaatggatggtgctccttctcgtgtacttcatattcgaaaattacctggggaagtaacagaaactgaagttattgctttaggcttaccttttggtaaggtgaccaacatccttatgctgaaaggaaaaaatcaggcatttttggaactagcaaccgaggaagcagctattactatggttaattactattctgctgtgacacctcatcttcgtaaccaaccaatatatatccagtactcgaatcacaaagaactaaagacagataatacattaaaccaacgtgctcaggcagttcttcaagctgtgacagctgtccagacagcaaatactcctcttagtggcaccacagttagcgagagtgcagtgactccagcccagagtccagtacttagaataattattgacaacatgtactaccctgtaacacttgatgttcttcaccaaatattttctaagtttggtgctgtattgaagataatcacatttacaaaaaataaccagtttcaagctttgctccagtatggtgatccagtaaatgctcaacaagcaaaactagccctagatggtcagaatatttataatgcctgctgtaccctaaggattgatttttccaaacttgtgaatttgaatgtaaaatacaacaatgataaaagtagggattatactcgacctgatcttccatctggggatggacaacctgcattggacccagctattgctgcagcatttgccaaggagacatccctcttagggcttcctgttgcagctgttccaggagctctgagtcctttggccattccaaatgctgctgcagcagctgctgcagctgctgctggccgagtgggtatgcctggagtctcagctggtggcaatacagtcctgttggttagcaatttaaatgaagagatggttacgccccaaagtctgtttaccctcttcggtgtttatggagatgtgcagcgtgtgaagattttatacaataagaaagacagcgctctaatacagatggctgatggaaaccaatcacaacttgccatgaatcatcttaatggacagaaaatgtatggaaaaattattcgtgttactctgtctaaacatcagactgtacagctacctcgagagggacttgatgatcaagggctaacaaaagattttggtaattccccattgcatcgttttaagaaacctggatccaaaaattttcaaaacatttttcctccttctgccacccttcacctatctaatatccctccatcagtagcagaagaggatctacgaacactgttcgctaacactgggggcactgtgaaagcatttaagttttttcaagatcacaaaatggctcttcttcagatggcaacagtggaagaagctattcaggccttgattgatcttcataattataaccttggagaaaaccatcatctgagagtgtctttctccaagtcaacaatttaaaaatgggaagatgaagattgggggtgaatcacattgttcaatgtcatcacctatttgactgttcagaaaagtggggaccagagtttgattttttttgtttttgtttttttggggtttcttttttttttccatgctgttatcattccttggttataaaatgaaatggcatatgtaaaggcagagttgttaactgctatatttcatctgttctatagggaagccattttgtctgtttaaaatttcagtttaattttgctttttttttttttttttttttcctttcaacttagttgacatacgtgccttaaaaaggaaaactagtgttgctattgtgcatttactagaaaaaaggaattggttgtttagggcacactgttatatgggaattaaaatatgtttaggcaggggtgtgtaaaaaggttaagtttttgtttctcctgcttggaacttattttgaattactggcttgtcacctttttttctatttaatcaaataagatacatgatattgaaagaataaagcagcatttttagtttttactaccttaggctttattgctttgaaaacaacattggccttttgtatctcacaattctggtctagattcagttatgaatgtaggcattagttaaaattaacaagatgcagagtattaatttcttaagacaacaaagtgatttctgtaagtttgagccctatgtggaaagcattgtggaatcttaaccttttcgtacacactcttgtgggacgtatcatataaatgtcagcactaagtaatgtcttgtttgtggctgaatatttttcgtagatgtttttgaagttgacatgacttacgtgcatttaaatatatattgccatccttagtttgtaattaagatttggaatatggttgtggatttctgagcatgtgcagactggtctagctagttcaggaactggtgcatgtatttttcaaagataaagaaagtgtactgcgaaaatatgcaggaagattaattttgtggcagttttctaaaactgacaaccaggtgggaccaaagtttatgtgcctttagtcttaatttaccttgcattgtaatattcagttttaataaatcttcaaaatattttgtatttaggaatagatctgactttaataaaaacatggctcagaatctacaggtcaaattaatttgaacagttcttgtcaatccgaattgttgattctgtttaaatgaccaatactttttgaaattgatgtacttagtttcaagattcatagattctgttatctatgtagacagaatggtcatgtatattttctattagttgagtttttacatctttagaaatgtaaaattcagtatagtttgaaagcggcacaattaaaaattaattttctaacaaa

SEQ ID NO: 113223 - DNA, 1611 bp, Artificial Sequence
  derived and/or modified sequence
atggatggaattgtgactgaagttgccgtgggtgtaaagaggggttctgacgagctcctgtcggggtccgtgctgagctcacctaattctaatatgtcttcgatggttgtcaccgcaaacgggaacgactcgaaaaaattcaagggcgaagacaaaatggacggagcaccatccagagttcttcatatcaggaagttacctggcgaagtgactgagactgaagtgatcgctctggggctgccattcggcaaagtcaccaacatcttaatgctgaaaggaaaaaaccaggcgttcttggagctcgctaccgaagaagcggctatcaccatggtaaattactacagcgctgtcacaccgcatttaagaaatcagccgatctacattcaatatagtaaccataaagagcttaaaaccgacaatactctgaatcagagagctcaggccgtgctacaagcagtgaccgctgttcagactgcaaatacacccttaagtggcacgactgtcagtgagtctgctgtcacccctgcccagtcacccgttctgcggattatcatagacaacatgtactatcctgtcacgctcgatgttttgcaccagatatttagcaaatttggagccgtcctgaaaattataacttttacaaaaaacaatcagttccaggccctactgcagtacggagacccagtaaacgcgcagcaggccaaattggctctggacggccagaatatttataacgcatgctgtacattaaggattgacttctctaaactcgtcaatctgaatgtgaaatacaataatgataaatctcgagattacacccggcctgatttgccgtctggcgacgggcaacctgcgctggaccccgctatagctgccgcattcgccaaagaaacatccctcctaggtctgccagtcgcagctgttcccggtgcccttagccccctcgcgattccgaacgcagccgctgccgcagccgctgctgctgccggtcgggtgggaatgcccggtgtgagcgctggtgggaataccgtactgttggtctccaacctcaatgaggagatggtgactccccaaagtctctttactctattcggagtgtacggcgacgtgcaaagggtcaaaattttatataataagaaagattctgccctgatccagatggcggatgggaaccagtcccagctagctatgaaccacctgaacggtcagaaaatgtatggcaagatcatccgggttacactgagtaaacaccagacagtccaattgccccgtgaggggctagacgaccagggcctgactaaggactttggcaactccccattgcatcgattcaaaaagcctggcagtaagaatttccaaaatattttccctccgagtgccactttgcatctgtccaacatccccccttccgtggctgaagaagatttacgcaccctgtttgccaacaccggcggtaccgtgaaggcttttaaatttttccaggaccacaagatggccctcctgcagatggctactgtggaggaggccatccaggctctcatagacctccataactataacctgggtgagaaccatcatctccgagtgtccttcagcaagtcaactatttag

SEQ ID NO: 113224 - DNA, 1056 bp, Artificial Sequence
  derived and/or modified sequence
gggatgaagaggggttctgatgaactcttaagtgggtctgttcttagcagtcccaattcgaatatgtcctccatggtggtcactgctaacggaaacgatagcaaaaagtttaaaggggaagacaaaatggatggggctccttcgcgggtgctgcatattcgcaaactgcctggagaggtaactgaaactgaagtgatcgcactggggctcccgtttgggaaggtaacaaacatcctgatgctaaagggaaagaatcaggctttcctcgagttggcgaccgaagaagcagccatcacaatggttaactactactccgccgtcaccccacatctacgtaaccagcctatctacatccagtattcaaatcacaaggaactgaagacagacaacacactgaaccagcgcgcacaggccgtgctccaagccgtgactgccgtgcagacagccaatacgcctctttctgggactacagtgtcagagtccgcagtgacgcccgctcagagcccagtgctccgcatcatcatagataacatgtattatcccgtgaccctcgacgttctgcaccagatattttctaaattcggcgcagtgcttaagattataactttcaccaaaaataatcagttccaggcccttctgcagtacggggacccagtgaatgctcagcaggccaaattggctctagacgggcagaatatttacaacgcatgctgcacattgcggatagacttttcgaagctcgtgaacctgaatgtgaaatacaacaacgacaagtcgcgcgattacactagaccagacctcccctccggtgatggacaacctgccctggatcccgctatagcagcagcttttgcaaaagaaactagtctgctcggtctcccagtggcagctgtgcccggagcacttagtccactggccattcccaatgctgccgcagcagccgcagccgctgccgctggacgcgtcggaatgcccggtgtctcagccggaggcaatacagtgctgcttgtgtcaaatctgaatgaggaggtgtttatggagatgtgcagcgtgtag

SEQ ID NO: 113225 - DNA, 1611 bp, Artificial Sequence
  derived and/or modified sequence
atggacggcatcgtgaccgaggtggccgtgggcgtgaagagaggcagcgacgagctgctgagcggcagcgtgctgagcagccccaacagcaacatgagcagcatggtggtgaccgccaacggcaacgacagcaagaagttcaagggcgaggacaagatggacggcgcccccagcagagtgctgcacatcagaaagctgcccggcgaggtgaccgagaccgaggtgatcgccctgggcctgcccttcggcaaggtgaccaacatcctgatgctgaagggcaagaaccaggccttcctggagctggccaccgaggaggccgccatcaccatggtgaactactacagcgccgtgaccccccacctgagaaaccagcccatctacatccagtacagcaaccacaaggagctgaagaccgacaacaccctgaaccagagagcccaggccgtgctgcaggccgtgaccgccgtgcagaccgccaacacccccctgagcggcaccaccgtgagcgagagcgccgtgacccccgcccagagccccgtgctgagaatcatcatcgacaacatgtactaccccgtgaccctggacgtgctgcaccagatcttcagcaagttcggcgccgtgctgaagatcatcaccttcaccaagaacaaccagttccaggccctgctgcagtacggcgaccccgtgaacgcccagcaggccaagctggccctggacggccagaacatctacaacgcctgctgcaccctgagaatcgacttcagcaagctggtgaacctgaacgtgaagtacaacaacgacaagagcagagactacaccagacccgacctgcccagcggcgacggccagcccgccctggaccccgccatcgccgccgccttcgccaaggagaccagcctgctgggcctgcccgtggccgccgtgcccggcgccctgagccccctggccatccccaacgccgccgccgccgccgccgccgccgccgccggcagagtgggcatgcccggcgtgagcgccggcggcaacaccgtgctgctggtgagcaacctgaacgaggagatggtgaccccccagagcctgttcaccctgttcggcgtgtacggcgacgtgcagagagtgaagatcctgtacaacaagaaggacagcgccctgatccagatggccgacggcaaccagagccagctggccatgaaccacctgaacggccagaagatgtacggcaagatcatcagagtgaccctgagcaagcaccagaccgtgcagctgcccagagagggcctggacgaccagggcctgaccaaggacttcggcaacagccccctgcacagattcaagaagcccggcagcaagaacttccagaacatcttcccccccagcgccaccctgcacctgagcaacatcccccccagcgtggccgaggaggacctgagaaccctgttcgccaacaccggcggcaccgtgaaggccttcaagttcttccaggaccacaagatggccctgctgcagatggccaccgtggaggaggccatccaggccctgatcgacctgcacaactacaacctgggcgagaaccaccacctgagagtgagcttcagcaagagcaccatctag

SEQ ID NO: 113226 - DNA, 1056 bp, Artificial Sequence
  derived and/or modified sequence
ggcatgaagagaggcagcgacgagctgctgagcggcagcgtgctgagcagccccaacagcaacatgagcagcatggtggtgaccgccaacggcaacgacagcaagaagttcaagggcgaggacaagatggacggcgcccccagcagagtgctgcacatcagaaagctgcccggcgaggtgaccgagaccgaggtgatcgccctgggcctgcccttcggcaaggtgaccaacatcctgatgctgaagggcaagaaccaggccttcctggagctggccaccgaggaggccgccatcaccatggtgaactactacagcgccgtgaccccccacctgagaaaccagcccatctacatccagtacagcaaccacaaggagctgaagaccgacaacaccctgaaccagagagcccaggccgtgctgcaggccgtgaccgccgtgcagaccgccaacacccccctgagcggcaccaccgtgagcgagagcgccgtgacccccgcccagagccccgtgctgagaatcatcatcgacaacatgtactaccccgtgaccctggacgtgctgcaccagatcttcagcaagttcggcgccgtgctgaagatcatcaccttcaccaagaacaaccagttccaggccctgctgcagtacggcgaccccgtgaacgcccagcaggccaagctggccctggacggccagaacatctacaacgcctgctgcaccctgagaatcgacttcagcaagctggtgaacctgaacgtgaagtacaacaacgacaagagcagagactacaccagacccgacctgcccagcggcgacggccagcccgccctggaccccgccatcgccgccgccttcgccaaggagaccagcctgctgggcctgcccgtggccgccgtgcccggcgccctgagccccctggccatccccaacgccgccgccgccgccgccgccgccgccgccggcagagtgggcatgcccggcgtgagcgccggcggcaacaccgtgctgctggtgagcaacctgaacgaggaggtgttcatggagatgtgcagcgtgtag

SEQ ID NO: 113227 - protein, 532 aa, Artificial Sequence
  derived and/or modified sequence
MDGIVTEVAVGVKRGSDELLSGSVLSSPNSNMSSMVVTANGNDSKKFKGEDKMDGAPSRVLHIRKLPGEVTETEVIALGLPFGKVTNILMLKGKNQAFLELATEEAAITMVNYYSAVTPHLRNQPIYIQYSNHKELKTDNTLNQRAQAVLQAVTAVQTANTPLSGTTVSESAVTPAQSPVLRIIIDNMYYPVTLDVLHQIFSKFGAVLKIITFTKNNQFQALLQYGDPVNAQQAKLALDGQNIYNACCTLRIDFSKLVNLNVKYNNDKSRDYTRPDLPSGDGQPALDPAIAAAFAKETSLLAVPGALSPLAIPNAAAAAAAAAAGRVGMPGVSAGGNTVLLVSNLNEEMVTPQSLFTLFGVYGDVQRVKILYNKKDSALIQMADGNQSQLAMNHLNGQKMYGKIIRVTLSKHQTVQLPREGLDDQGLTKDFGNSPLHRFKKPGSKNFQNIFPPSATLHLSNIPPSVAEEDLRTLFANTGGTVKAFKFFQRDHKMALLQMATVEEAIQALIDLHNYNLGENHHLRVSFSKSTI

SEQ ID NO: 113228 - DNA, 1599 bp, Artificial Sequence
  derived and/or modified sequence
atggatggaatcgtgacagaggtggctgtcggagtgaaaagagggtccgacgagcttctcagtgggagcgtgctgagtagccctaattccaatatgtcttccatggtggtgacggccaatggcaatgacagcaagaagtttaagggggaggacaagatggacggcgccccatcaagggtgctgcacatccggaaactgcccggtgaagtgactgagactgaagtcatagccctggggctccccttcggaaaggtgacaaacatattgatgttaaagggcaagaaccaggccttcctcgagctggctaccgaagaagctgccatcactatggtgaactactactctgccgtgactccccatctgcgaaatcagcccatatatattcaatactctaatcacaaggagcttaagacagacaataccctcaaccagagggctcaggctgtgttgcaggccgttaccgctgtgcagactgcaaacacacccttgtcaggtacaaccgtgtcggaatcagccgttactcccgcacagagtcctgtgctgagaatcattattgacaacatgtattatccggtcacactggatgtgctacatcagattttctctaagtttggggctgtgctgaaaattatcacttttacaaagaataaccaattccaggcactgctccaatacggtgatccggtaaatgcacaacaggccaaacttgctctggacggtcagaacatttacaacgcttgttgcacgctcagaatagacttttcaaagctggtgaatcttaatgtgaaatacaacaacgacaaaagccgggactacacacgtcctgacctgccctctggggacggccagccagctctagacccagccatcgcagccgcttttgcaaaggagacgagcctgctggctgttccaggtgcactgtcccctttagccatcccaaacgccgccgcagcggctgctgcggcagccgcgggcagggtaggtatgcccggggtctccgcaggtggaaataccgtcttgttagtctccaacttgaacgaggaaatggtgaccccacaatctctgttcactctgttcggcgtgtacggcgatgtgcaacgggtaaagattctctataataagaaggatagcgctctcatccagatggcagacggcaaccagagccagctcgccatgaatcacctcaatgggcagaagatgtatggcaagattattcgagtcactctgagcaagcaccagactgtgcagttacctagagaggggctggatgaccagggactgacgaaggacttcggtaattctcctttacatcggttcaagaagcccggaagtaagaatttccagaatatcttcccacccagtgccaccctgcacctgagtaacattcctccatccgttgctgaggaagacctgcgcacactattcgccaacaccggggggactgttaaagcctttaagttttttcagagagaccataaaatggccttgctgcagatggcaaccgttgaggaagctattcaagccctgatagacctgcacaactacaacctaggcgaaaaccaccacctgagagtcagctttagcaagagtaccatctag

SEQ ID NO: 113229 - DNA, 1599 bp, Artificial Sequence
  derived and/or modified sequence
atggatggcatcgtgacagaggtggccgtgggcgtgaagaggggcagtgatgagctgctgagcggctctgtgctgagcagccccaacagcaacatgagctccatggtggtgacagccaatggaaatgacagcaagaagttcaagggggaggacaagatggatggagcccccagccgggtgctgcacatcaggaagctgcctggagaggtgacagaaacagaggtgattgccctgggcctgccctttgggaaggtgaccaacatcctgatgctgaagggcaagaaccaggccttcctggagctggccacagaggaggccgccatcaccatggtgaactactacagcgctgtgaccccccacctgaggaaccagcccatctacatccagtacagcaaccacaaggagctgaagacagacaacaccctgaaccagagggcccaggccgtgctgcaggccgtgacagctgtgcagacagccaacacccccctgagcggcaccaccgtgtctgagagcgctgtgaccccagcccagagccctgtgctgcgcatcatcatcgacaacatgtactaccctgtgaccctggatgtgctgcaccagatcttcagcaagtttggagctgtgctgaagatcatcaccttcaccaagaacaaccagttccaggccctgctgcagtatggagaccctgtgaatgcccagcaggccaagctggccctggatggccagaacatctacaatgcctgctgcaccctgagaattgacttcagcaagctggtgaacctgaatgtgaagtacaacaatgacaagagccgggactacaccaggccagacctgcccagcggagatggccagcctgccctggaccctgccatcgccgccgcctttgccaaggagaccagcctgctggccgtgcctggggccctgagccccctggccatccccaatgctgctgctgctgctgctgctgctgctgctggccgggtgggcatgcctggggtgtctgctgggggcaacacagtgctgctggtgagcaacctgaatgaggagatggtgaccccccagagcctcttcaccctgtttggagtgtatggagatgtgcagagggtgaagatcctgtacaacaagaaggacagcgccctgatccagatggctgatggcaaccagagccagctggccatgaaccacctgaatggccagaagatgtatggcaagatcatccgggtgaccctgagcaagcaccagacagtgcagctgccccgggagggcctggatgaccagggcctgaccaaggactttggaaacagccccctgcaccgcttcaagaagccaggcagcaagaacttccagaacatcttcccccccagcgccaccctgcacctgagcaacatccccccatctgtggccgaggaggacctgcggaccctgtttgccaacacaggaggcaccgtgaaggccttcaagttcttccagagggaccacaagatggccctgctgcagatggccaccgtggaggaggccatccaggccctgattgacctgcacaactacaacctgggggagaaccaccacctgcgggtgtccttcagcaagagcaccatctag

SEQ ID NO: 113230 - DNA, 1599 bp, Artificial Sequence
  derived and/or modified sequence
atggacggcatcgtgaccgaggtggccgtgggcgtgaagcggggctcagacgagctgctatcagggagcgttctctccagtccaaattccaacatgtcatcaatggtggtgacagccaacggcaatgattcaaaaaagttcaaaggggaggacaagatggatggagctccatctcgagtgctgcacataagaaagcttccaggtgaggtaaccgagactgaagtgatcgctctgggcctgccatttggcaaggtgaccaacattcttatgctgaagggtaagaaccaggcgttccttgaattggcaactgaggaagcggccatcaccatggtgaactattactctgctgtaaccccccatcttagaaatcagcctatctacatccagtactccaatcacaaggagctcaagacagataacaccttaaaccaacgagcccaggctgtcctccaagcagtcacagctgtccagacagccaacacgcccctgagcgggacaaccgtgagcgaaagtgccgtcaccccagcccagtcaccagtattacggatcatcatcgacaacatgtactacccggtgacactagatgtgcttcatcagatatttagcaaattcggtgcagtgctgaaaattattacattcacaaaaaacaatcagtttcaagccctgctccagtacggtgatcccgtcaatgctcaacaggccaaactggccctggatggacagaacatctacaacgcatgctgtacgcttcgcatcgatttttcaaagcttgttaatctcaacgtgaaatataataacgacaagagtcgcgattatacgcgaccagacttgcctagtggggacgggcagccggcattggaccctgctatcgcggcggcattcgccaaagagacaagcctgctcgctgtgccaggggctctgtcacctttagctattcctaacgccgcggcagctgctgctgcggccgcggctggacgtgtgggtatgcccggggtgagcgccgggggtaacacggtgttgcttgtgtctaaccttaatgaggaaatggtgacaccacagtcgctcttcacgttgtttggcgtgtacggagacgtgcagagggtcaaaatactctataacaagaaggactcggccctgattcagatggcggatgggaaccaatcacagctggcaatgaatcacttgaacggccaaaagatgtacggcaagattattcgggtaactctaagtaagcaccagaccgtgcaactccccagagagggtctggacgaccagggtctaacaaaggacttcgggaatagtcctctgcacaggttcaaaaaaccggggtccaagaatttccagaacattttcccaccttcagctactcttcatctgtcaaatataccacccagcgtagcagaagaggatctaagaacactgttcgcaaacaccggaggaacagtgaaggcctttaaattttttcagcgggaccataaaatggcccttctccagatggccaccgttgaggaggcgatccaggcccttatcgatctgcacaattacaacctcggcgagaaccaccacttgcgtgtcagtttttctaagtccaccatctag

SEQ ID NO: 113231 - DNA, 3069 bp, Artificial Sequence
  derived and/or modified sequence
cagccgccattttctcgccgcttgtgtggctcgctggctgcgtggctcggttcttgtgagcgaagctttgtccggttcggcaatggacggaatcgtcactgaggttgcagttggcgtgaagagaggatctgacgaactactctcaggcagtgttctcagtagtccgaactctaatatgagcagcatggtagttacagccaatggtaatgatagtaaaaaatttaaaggagaagataaaatggatggtgctccttctcgtgtacttcatattcgaaaattacctggggaagtaacagaaactgaagttattgctttaggcttaccttttggtaaggtgaccaacatccttatgctgaaaggaaaaaatcaggcatttttggaactagcaaccgaggaagcagctattactatggttaattactattctgctgtgacacctcatcttcgtaaccaaccaatatatatccagtactcgaatcacaaagaactaaagacagataatacattaaaccaacgtgctcaggcagttcttcaagctgtgacagctgtccagacagcaaatactcctcttagtggcaccacagttagcgagagtgcagtgactccagcccagagtccagtacttagaataattattgacaacatgtactaccctgtaacacttgatgttcttcaccaaatattttctaagtttggtgctgtattgaagataatcacatttacaaaaaataaccagtttcaagctttgctccagtatggtgatccagtaaatgctcaacaagcaaaactagccctagatggtcagaatatttataatgcctgctgtaccctaaggattgatttttccaaacttgtgaatttgaatgtaaaatacaacaatgataaaagtagggattatactcgacctgatcttccatctggggatggacaacctgcattggacccagctattgctgcagcatttgccaaggagacatccctcttagctgttccaggagctctgagtcctttggccattccaaatgctgctgcagcagctgctgcagctgctgctggccgagtgggtatgcctggagtctcagctggtggcaatacagtcctgttggttagcaatttaaatgaagagatggttacgccccaaagtctgtttaccctcttcggtgtttatggagatgtgcagcgtgtgaagattttatacaataagaaagacagcgctctaatacagatggctgatggaaaccaatcacaacttgccatgaatcatcttaatggacagaaaatgtatggaaaaattattcgtgttactctgtctaaacatcagactgtacagctacctcgagagggacttgatgatcaagggctaacaaaagattttggtaattccccattgcatcgttttaagaaacctggatccaaaaattttcaaaacatttttcctccttctgccacccttcacctatctaatatccctccatcagtagcagaagaggatctacgaacactgttcgctaacactgggggcactgtgaaagcatttaagttttttcaaagagatcacaaaatggctcttcttcagatggcaacagtggaagaagctattcaggccttgattgatcttcataattataaccttggagaaaaccatcatctgagagtgtctttctccaagtcaacaatttaaaaatgggaagatgaagattgggggtgaatcacattgttcaatgtcatcacctatttgactgttcagaaaagtggggaccagagtttgattttttttgtttttgtttttttggggtttcttttttttttccatgctgttatcattccttggttataaaatgaaatggcatatgtaaaggcagagttgttaactgctatatttcatctgttctatagggaagccattttgtctgtttaaaatttcagtttaattttgctttttttttttttttttttttcctttcaacttagttgacatacgtgccttaaaaaggaaaactagtgttgctattgtgcatttactagaaaaaaggaattggttgtttagggcacactgttatatgggaattaaaatatgtttaggcaggggtgtgtaaaaaggttaagtttttgtttctcctgcttggaacttattttgaattactggcttgtcacctttttttctatttaatcaaataagatacatgatattgaaagaataaagcagcatttttagtttttactaccttaggctttattgctttgaaaacaacattggccttttgtatctcacaattctggtctagattcagttatgaatgtaggcattagttaaaattaacaagatgcagagtattaatttcttaagacaacaaagtgatttctgtaagtttgagccctatgtggaaagcattgtggaatcttaaccttttcgtacacactcttgtgggacgtatcatataaatgtcagcactaagtaatgtcttgtttgtggctgaatatttttcgtagatgtttttgaagttgacatgacttacgtgcatttaaatatatattgccatccttagtttgtaattaagatttggaatatggttgtggatttctgagcatgtgcagactggtctagctagttcaggaactggtgcatgtatttttcaaagataaagaaagtgtactgcgaaaatatgcaggaagattaattttgtggcagttttctaaaactgacaaccaggtgggaccaaagtttatgtgcctttagtcttaatttaccttgcattgtaatattcagttttaataaatcttcaaaatattttgtatttaggaatagatctgactttaataaaaacatggctcagaatctacaggtcaaattaatttgaacagttcttgtcaatccgaattgttgattctgtttaaatgaccaatactttttgaaattgatgtacttagtttcaagattcatagattctgttatctatgtagacagaatggtcatgtatattttctattagttgagtttttacatctttagaaatgtaaaattcagtatagtttgaaagcggcacaattaaaaattaattttctaacaaa

SEQ ID NO: 113232 - DNA, 1599 bp, Artificial Sequence
  derived and/or modified sequence
atggacgggattgttacagaagttgcggtaggcgtgaagagagggagcgacgaactcctgtcagggagcgtgctttccagccctaacagcaatatgtcttccatggtggttaccgccaatgggaatgatagtaaaaagttcaaaggcgaggacaagatggatggtgccccaagccgggtactccacatcagaaagctgccgggtgaggtgactgaaacagaggtgatcgcactgggtctgcccttcgggaaagtcaccaacatcctgatgttaaaaggcaagaaccaggcgtttcttgaactggccaccgaggaggcagccattactatggtgaactattattccgcagtcaccccacacctgcggaatcagcccatctatatccaatactcgaatcacaaagagctcaaaaccgataatacactgaaccagcgggcacaggcggttctgcaagctgttaccgcagtccagactgctaacacgccgctctcaggcacaaccgtctccgaatcagctgtgaccccagcccagtctcccgtgcttcgaattataatcgacaatatgtactatcccgtgacactggacgtgctacatcagattttttcgaaatttggggcagtactgaagattatcaccttcactaagaacaatcagttccaggccctcctgcagtatggagacccagtcaacgctcagcaggctaagctggctctcgatgggcaaaacatctacaacgcttgctgcacgttgagaatagacttttccaaactggttaatctgaacgtaaagtacaacaatgacaaaagccgagactatacgcgcccagatcttccgagcggcgacgggcaacccgctctggatccagccatcgctgcagccttcgctaaggagacctccctgctggccgtgccgggagctttaagtcctttggccatcccaaacgccgcagccgctgctgccgcagcggcagcagggcgtgtgggcatgcctggggtttcagccggaggtaataccgtcctgctggtgtctaacttgaacgaagaaatggtcacgccacagagtctgttcacactttttggggtctatggtgatgttcagcgcgtcaagatcctctacaacaagaaggacagcgcgctgattcagatggccgacggaaaccagagccagctggcaatgaatcacctcaatggacagaaaatgtatggtaaaataatccgcgtgaccttaagcaagcatcagaccgtgcagctgcctcgggaaggactcgatgaccaggggctaacaaaggacttcggtaacagccctctccatcggttcaagaaacccggatccaagaattttcaaaatatctttccaccaagcgctaccctgcatcttagcaacatacctccaagcgtagccgaagaggacctgcgcacattgtttgccaatacaggcggtaccgttaaagcgttcaaatttttccagagggaccataaaatggcactcctgcagatggccacagtggaggaggccatacaagctctgatcgatttgcacaactataacctgggagagaatcaccacctgagggtttctttctctaagtcaacgatttag

SEQ ID NO: 113233 - DNA, 1599 bp, Artificial Sequence
  derived and/or modified sequence
atggacggcatcgtgaccgaggtggccgtgggcgtgaagagaggcagcgacgagctgctgagcggcagcgtgctgagcagccccaacagcaacatgagcagcatggtggtgaccgccaacggcaacgacagcaagaagttcaagggcgaggacaagatggacggcgcccccagcagagtgctgcacatcagaaagctgcccggcgaggtgaccgagaccgaggtgatcgccctgggcctgcccttcggcaaggtgaccaacatcctgatgctgaagggcaagaaccaggccttcctggagctggccaccgaggaggccgccatcaccatggtgaactactacagcgccgtgaccccccacctgagaaaccagcccatctacatccagtacagcaaccacaaggagctgaagaccgacaacaccctgaaccagagagcccaggccgtgctgcaggccgtgaccgccgtgcagaccgccaacacccccctgagcggcaccaccgtgagcgagagcgccgtgacccccgcccagagccccgtgctgagaatcatcatcgacaacatgtactaccccgtgaccctggacgtgctgcaccagatcttcagcaagttcggcgccgtgctgaagatcatcaccttcaccaagaacaaccagttccaggccctgctgcagtacggcgaccccgtgaacgcccagcaggccaagctggccctggacggccagaacatctacaacgcctgctgcaccctgagaatcgacttcagcaagctggtgaacctgaacgtgaagtacaacaacgacaagagcagagactacaccagacccgacctgcccagcggcgacggccagcccgccctggaccccgccatcgccgccgccttcgccaaggagaccagcctgctggccgtgcccggcgccctgagccccctggccatccccaacgccgccgccgccgccgccgccgccgccgccggcagagtgggcatgcccggcgtgagcgccggcggcaacaccgtgctgctggtgagcaacctgaacgaggagatggtgaccccccagagcctgttcaccctgttcggcgtgtacggcgacgtgcagagagtgaagatcctgtacaacaagaaggacagcgccctgatccagatggccgacggcaaccagagccagctggccatgaaccacctgaacggccagaagatgtacggcaagatcatcagagtgaccctgagcaagcaccagaccgtgcagctgcccagagagggcctggacgaccagggcctgaccaaggacttcggcaacagccccctgcacagattcaagaagcccggcagcaagaacttccagaacatcttcccccccagcgccaccctgcacctgagcaacatcccccccagcgtggccgaggaggacctgagaaccctgttcgccaacaccggcggcaccgtgaaggccttcaagttcttccagagagaccacaagatggccctgctgcagatggccaccgtggaggaggccatccaggccctgatcgacctgcacaactacaacctgggcgagaaccaccacctgagagtgagcttcagcaagagcaccatctag

SEQ ID NO: 113234 - DNA, 615 bp, Artificial Sequence
  derived and/or modified sequence
atgcctggggtttccgccggcggaaacaccgtcctccttgtatcaaatctcaatgaagaaatggtgactccccagtctttattcacgctttttggcgtctatggggacgtgcagcgcgtgaaaatcttgtacaataagaaggactcagctttgattcagatggctgacggcaatcagtcccagcttgcaatgaatcacctcaacggtcaaaagatgtacggcaaaattatcagggttactctgagcaagcaccaaaccgttcagctgccgcgtgaggggttggatgatcagggtctaaccaaggactttggcaattccccgctccatcgtttcaagaaacccggttctaaaaacttccagaacatttttccccccagcgcaactctgcatctgagtaatattcccccttccgtggcagaagaagacctccggacactgtttgcgaacacaggcgggactgttaaggcatttaaattcttccagcgcgatcacaagatggcgctattacaaatggcgaccgtcgaagaggccatccaggcgttgatcgacctgcacaactacaatctgggtgagaatcaccaccttagggtcagcttcagcaagagtaccatctag

SEQ ID NO: 113235 - DNA, 615 bp, Artificial Sequence
  derived and/or modified sequence
atgcctggggtgtctgctgggggcaacacagtgctgctggtgagcaacctgaatgaggagatggtgaccccccagagcctcttcaccctgtttggagtgtatggagatgtgcagagggtgaagatcctgtacaacaagaaggacagcgccctgatccagatggctgatggcaaccagagccagctggccatgaaccacctgaatggccagaagatgtatggcaagatcatccgggtgaccctgagcaagcaccagacagtgcagctgccccgggagggcctggatgaccagggcctgaccaaggactttggaaacagccccctgcaccgcttcaagaagccaggcagcaagaacttccagaacatcttcccccccagcgccaccctgcacctgagcaacatccccccatctgtggccgaggaggacctgcggaccctgtttgccaacacaggaggcaccgtgaaggccttcaagttcttccagagggaccacaagatggccctgctgcagatggccaccgtggaggaggccatccaggccctgattgacctgcacaactacaacctgggggagaaccaccacctgcgggtgtccttcagcaagagcaccatctag

SEQ ID NO: 113236 - DNA, 615 bp, Artificial Sequence
  derived and/or modified sequence
atgcccggcgtgagcgccggcggcaacaccgtgctgctggtgagcaacctaaatgaggaaatggtgacgccacagtctctgtttactttgtttggggtgtacggagatgtgcagcgggtgaagatcttgtacaataaaaaggactcggctcttatccagatggccgatggcaatcaatcccaattggctatgaatcatctgaacggccagaaaatgtatggaaagataattagggtgactctgagcaagcatcagacggtgcagctgccccgcgagggtctggacgatcaaggactcactaaagactttggcaatagtcccctgcacagattcaagaagcctggatccaaaaactttcagaacatcttcccaccatctgctacgctacatttatccaatatcccacctagtgtggcagaggaggatctgcgcactctttttgccaacacaggcggaacagtcaaggcgttcaaattttttcagagagaccataaaatggcattgcttcaaatggcgacagtggaggaagccatccaggcactgatagatctacacaattataatctaggagagaaccatcacctgagggtctctttcagcaagagcacaatatag

SEQ ID NO: 113237 - DNA, 1488 bp, Artificial Sequence
  derived and/or modified sequence
agccgccattttctcgccgcttgtgtggctcgctggctgcgtggctcggttcttgtgagcgaagctttgtccggttcggcaatggacggaatcgtcactgaggttgcagttggcgtgaagagaggatctgacgaactactctcaggcagtgttctcagtagtccgaactctaatatgagcagcatggtagttacagccaatggtaatgatagtaaaaaatttaaaggagaagataaaatggatggtgctccttctcgtgtacttcatattcgaaaattacctggggaagtaacagaaactgaagttattgctttaggcttaccttttggtaaggtgaccaacatccttatgctgaaaggaaaaaatcaggcatttttggaactagcaaccgaggaagcagctattactatggttaattactattctgctgtgacacctcatcttcgtaaccaaccaatatatatccagtactcgaatcacaaagaactaaagacagataatcacatttacaaaaaataaccagtttcaagctttgctccagtatggtgatccagtaaatgctcaacaagcaaaactagccctagatggtcagaatatttataatgcctgctgtaccctaaggattgatttttccaaacttgtgaatttgaatgtaaaatacaacaatgataaaagtagggattatactcgacctgatcttccatctggggatggacaacctgcattggacccagctattgctgcagcatttgccaaggagacatccctcttagctgttccaggagctctgagtcctttggccattccaaatgctgctgcagcagctgctgcagctgctgctggccgagtgggtatgcctggagtctcagctggtggcaatacagtcctgttggttagcaatttaaatgaagagatggttacgccccaaagtctgtttaccctcttcggtgtttatggagatgtgcagcgtgtgaagattttatacaataagaaagacagcgctctaatacagatggctgatggaaaccaatcacaacttgccatgaatcatcttaatggacagaaaatgtatggaaaaattattcgtgttactctgtctaaacatcagactgtacagctacctcgagagggacttgatgatcaagggctaacaaaagattttggtaattccccattgcatcgttttaagaaacctggatccaaaaattttcaaaacatttttcctccttctgccacccttcacctatctaatatccctccatcagtagcagaagaggatctacgaacactgttcgctaacactgggggcactgtgaaagcatttaagttttttcaaagagatcacaaaatggctcttcttcagatggcaacagtggaagaagctattcaggccttgattgatcttcataattataaccttggagaaaaccatcatctgagagtgtctttctccaagtcaacaatttaaaaatgggaagatgaagattg

SEQ ID NO: 113238 - DNA, 615 bp, Artificial Sequence
  derived and/or modified sequence
atgccaggcgtgagcgctgggggaaatactgtgctgttggtgtcaaacctgaatgaggagatggttacacctcagtccctgttcacgctcttcggggtttacggtgacgtacagagagtgaaaattctgtacaacaagaaagattctgcgctgatacagatggccgacgggaatcagtcccagctggccatgaaccacctgaatggacagaaaatgtatggtaagattatcagggtaactctgtcgaaacaccagaccgtgcagctaccccgagaggggctggacgaccagggcctcactaaggactttgggaattcaccactccacaggttcaaaaagccaggaagcaagaattttcagaacatttttcccccaagtgccaccttgcacctcagtaatatcccacctagtgtcgccgaggaggacttgcgtactttgtttgcgaatactggcggtacggtcaaagcgttcaagtttttccagcgcgaccacaaaatggccctgctgcagatggcaaccgtcgaggaagccatacaagcgctaatagatctgcataattataatctgggcgaaaatcaccatttgagggtctctttcagcaagagcacaatctag

SEQ ID NO: 113239 - DNA, 615 bp, Artificial Sequence
  derived and/or modified sequence
atgcccggcgtgagcgccggcggcaacaccgtgctgctggtgagcaacctgaacgaggagatggtgaccccccagagcctgttcaccctgttcggcgtgtacggcgacgtgcagagagtgaagatcctgtacaacaagaaggacagcgccctgatccagatggccgacggcaaccagagccagctggccatgaaccacctgaacggccagaagatgtacggcaagatcatcagagtgaccctgagcaagcaccagaccgtgcagctgcccagagagggcctggacgaccagggcctgaccaaggacttcggcaacagccccctgcacagattcaagaagcccggcagcaagaacttccagaacatcttcccccccagcgccaccctgcacctgagcaacatcccccccagcgtggccgaggaggacctgagaaccctgttcgccaacaccggcggcaccgtgaaggccttcaagttcttccagagagaccacaagatggccctgctgcagatggccaccgtggaggaggccatccaggccctgatcgacctgcacaactacaacctgggcgagaaccaccacctgagagtgagcttcagcaagagcaccatctag

SEQ ID NO: 113240 - protein, 906 aa, Artificial Sequence
  derived and/or modified sequence
MWRAKLRRGTCEPAVKVEDPLCNFHSPNFLRISEVEMRGSEDAAAGTVLQRLIQEQLRYGTPTENMNLLAIQHQATGSAGPAHPTNNFSSTENLTQEDPQMVYQSARQEPQGQEHQVDNTVMEKQVRSTQPQQNNEELPTYEEAKAQSQFFRGQQQQQQQQGAVGHGYYMAGGTSQKSRTEGRPTVNRANSGQAHKDEALKELKQGHVRSLSERIMQLSLERNGAKQHLPGSGNGKGFKVGGGPSPAQPAGKVLDPRGPPPEYPFKTKQMMSPVSKTQEHGLFYGDQHPGMLHEMVKPYPAPQPVRTDVAVLRYQPPPEYGVTSRPCQLPFPSTMQQHSPMSSQTSSASGPLHSVSLPLPLPMALGAPQPPPAASPSQQLGPDAFAIVERAQQMVEILTEENRVLHQELQGYYDNADKLHKFEKELQRISEAYESLVKSTTKRESLDKAMRNKLEGEIRRLHDFNRDLRDRLETANRQLSSREYEGHEDKAAEGHYASQNKEFLKEKEKLEMELAAVRTASEDHRRHIEILDQALSNAQARVIKLEEELREKQAYVEKVEKLQQALTQLQSACEKREQMERRLRTWLERELDALRTQQKHGNGQPANMPEYNAPALLELVREKEERILALEADMTKWEQKYLEESTIRHFAMNAAATAAAERDTTIINHSRNGSYGESSLEAHIWQEEEEVVQANRRCQDMEYTIKNLHAKIIEKDAMIKVLQQRSRKDAGKTDSSSLRPARSVPSIAAATGTHSRQTSLTSSQLAEEKKEEKTWKGSIGLLLGKEHHEHASAPLLPPPPTSALSSIASTTAASSAHAKTGSKDSSTQTDKSAELFWPSMASLPSRGRLSTTPAHSPVLKHPAAKGTAEKLENSPGHGKSPDHRGRVSSLLHKPEFPDGEMMEVLI

SEQ ID NO: 113241 - DNA, 2721 bp, Artificial Sequence
  derived and/or modified sequence
atgtggagagccaagctgagaagaggcacctgcgagcccgccgtgaaggtggaggaccccctgtgcaacttccacagccccaacttcctgagaatcagcgaggtggagatgagaggcagcgaggacgccgccgccggcaccgtgctgcagagactgatccaggagcagctgagatacggcacccccaccgagaacatgaacctgctggccatccagcaccaggccaccggcagcgccggccccgcccaccccaccaacaacttcagcagcaccgagaacctgacccaggaggacccccagatggtgtaccagagcgccagacaggagccccagggccaggagcaccaggtggacaacaccgtgatggagaagcaggtgagaagcacccagccccagcagaacaacgaggagctgcccacctacgaggaggccaaggcccagagccagttcttcagaggccagcagcagcagcagcagcagcagggcgccgtgggccacggctactacatggccggcggcaccagccagaagagcagaaccgagggcagacccaccgtgaacagagccaacagcggccaggcccacaaggacgaggccctgaaggagctgaagcagggccacgtgagaagcctgagcgagagaatcatgcagctgagcctggagagaaacggcgccaagcagcacctgcccggcagcggcaacggcaagggcttcaaggtgggcggcggccccagccccgcccagcccgccggcaaggtgctggaccccagaggccccccccccgagtaccccttcaagaccaagcagatgatgagccccgtgagcaagacccaggagcacggcctgttctacggcgaccagcaccccggcatgctgcacgagatggtgaagccctaccccgccccccagcccgtgagaaccgacgtggccgtgctgagataccagcccccccccgagtacggcgtgaccagcagaccctgccagctgcccttccccagcaccatgcagcagcacagccccatgagcagccagaccagcagcgccagcggccccctgcacagcgtgagcctgcccctgcccctgcccatggccctgggcgccccccagcccccccccgccgccagccccagccagcagctgggccccgacgccttcgccatcgtggagagagcccagcagatggtggagatcctgaccgaggagaacagagtgctgcaccaggagctgcagggctactacgacaacgccgacaagctgcacaagttcgagaaggagctgcagagaatcagcgaggcctacgagagcctggtgaagagcaccaccaagagagagagcctggacaaggccatgagaaacaagctggagggcgagatcagaagactgcacgacttcaacagagacctgagagacagactggagaccgccaacagacagctgagcagcagagagtacgagggccacgaggacaaggccgccgagggccactacgccagccagaacaaggagttcctgaaggagaaggagaagctggagatggagctggccgccgtgagaaccgccagcgaggaccacagaagacacatcgagatcctggaccaggccctgagcaacgcccaggccagagtgatcaagctggaggaggagctgagagagaagcaggcctacgtggagaaggtggagaagctgcagcaggccctgacccagctgcagagcgcctgcgagaagagagagcagatggagagaagactgagaacctggctggagagagagctggacgccctgagaacccagcagaagcacggcaacggccagcccgccaacatgcccgagtacaacgcccccgccctgctggagctggtgagagagaaggaggagagaatcctggccctggaggccgacatgaccaagtgggagcagaagtacctggaggagagcaccatcagacacttcgccatgaacgccgccgccaccgccgccgccgagagagacaccaccatcatcaaccacagcagaaacggcagctacggcgagagcagcctggaggcccacatctggcaggaggaggaggaggtggtgcaggccaacagaagatgccaggacatggagtacaccatcaagaacctgcacgccaagatcatcgagaaggacgccatgatcaaggtgctgcagcagagaagcagaaaggacgccggcaagaccgacagcagcagcctgagacccgccagaagcgtgcccagcatcgccgccgccaccggcacccacagcagacagaccagcctgaccagcagccagctggccgaggagaagaaggaggagaagacctggaagggcagcatcggcctgctgctgggcaaggagcaccacgagcacgccagcgcccccctgctgccccccccccccaccagcgccctgagcagcatcgccagcaccaccgccgccagcagcgcccacgccaagaccggcagcaaggacagcagcacccagaccgacaagagcgccgagctgttctggcccagcatggccagcctgcccagcagaggcagactgagcaccacccccgcccacagccccgtgctgaagcaccccgccgccaagggcaccgccgagaagctggagaacagccccggccacggcaagagccccgaccacagaggcagagtgagcagcctgctgcacaagcccgagttccccgacggcgagatgatggaggtgctgatctag

SEQ ID NO: 113242 - DNA, 2721 bp, Artificial Sequence
  derived and/or modified sequence
atgtggcgtgccaagctccgacgtgggacctgcgaacccgctgtcaaggttgaagacccactgtgcaattttcactcaccgaacttcctccggatatctgaggtcgaaatgcgcggatctgaggatgccgcagcaggcaccgtcctccaacgtttgatacaggagcaactgaggtacggtacccccaccgaaaacatgaatctcttggccatccagcaccaggccaccggctctgcagggccagcccatcccactaacaacttctcttcgactgagaacttgacccaagaggatccccaaatggtgtaccagagcgcccggcaggagccgcaggggcaggagcatcaggttgacaacactgtgatggagaaacaggtgcggtccacccaacctcagcaaaacaatgaggagttgccaacctatgaggaggcaaaagctcagtctcagttctttcgggggcagcaacaacagcagcagcagcaaggggccgtgggtcacgggtactacatggcagggggaacctctcaaaaatcacgaaccgagggtcgacccacggttaacagagctaactccggacaggcacataaggatgaggcactgaaagaactgaagcagggacacgtccgcagcttgagtgagcgcattatgcagctgagcttggaaagaaatggggccaaacagcacctgccagggagcggcaatgggaaggggttcaaagtaggtgggggcccgagccctgcacagcctgctggtaaggtacttgacccaagaggacctcccccagaatatccattcaagacaaagcaaatgatgtcaccagtatccaagacgcaggagcacggcctcttttatggggaccaacaccccggaatgctccatgagatggttaaaccgtatcccgcccctcaacccgttaggaccgacgtcgcggtgctccgctatcagccaccacctgagtacggggttaccagtagaccatgccagttgcctttcccctctacgatgcagcaacatagccccatgtcgtctcagactagctccgcatctggacccttgcactcagtttccctccctctgccattacccatggctcttggcgccccccagccaccccctgccgcatcaccgtcccaacagctcggccctgacgctttcgccatcgtggaaagagctcagcagatggttgagattctgacggaggaaaatagggtgctccatcaggaacttcagggctattacgacaacgccgacaagctgcacaagttcgagaaagagctccaacgtatatctgaggcatacgaatcccttgtgaaaagtaccacaaagcgggaatccctggataaggcaatgagaaataaactggaaggcgagattcgtagactgcatgactttaatcgcgacctcagagatcgattagaaactgccaataggcagctctcctctcgcgaatatgagggtcacgaggataaggctgccgaaggccactacgcatctcaaaataaggaatttttaaaagagaaggagaagctcgaaatggagctcgctgctgtgaggaccgctagcgaggatcatcgcaggcacatagagatactggaccaggctctcagcaacgctcaagcacgtgtgatcaagctggaggaagagcttcgggagaagcaggcctatgtggaaaaagtcgagaagctgcagcaggctctgacccaattgcagagcgcttgtgagaaacgcgaacagatggagcgacgcctgcgaacatggttggaacgggaacttgacgcactgcgaacacagcagaagcacgggaacggtcagcccgccaacatgccggagtacaatgcacctgccctgctcgagcttgtgcgggaaaaggaagagcgcattctagctttggaggccgacatgaccaagtgggaacagaagtatcttgaggagagcactatccgacacttcgctatgaatgccgcagcaactgccgcggctgaaagggatacaaccataatcaatcactcccgtaacggaagttacggtgagtcaagccttgaagcccacatctggcaagaagaagaagaggttgtccaggctaatcggcggtgtcaggacatggagtacaccatcaaaaatctacatgccaagataatagagaaggatgctatgatcaaggtgctgcagcagcggtcccggaaagacgcagggaagactgattctagtagcctgaggcccgcacgctcagttccctcaattgccgcagcaactggtacacacagccgccagacctccctgacgtcctcccagctggccgaggagaagaaagaggaaaaaacttggaaggggtccatcggtctgctactgggaaaggaacatcatgagcatgctagcgcccccctgctgcctcctcctcctacaagcgctttgagttcaatcgccagtaccacggcggcttcatctgctcatgccaaaacaggcagcaaagattctagcacacagacggataaatccgccgaactgttttggccaagtatggcttccctcccatccagaggccggctcagcactacgcctgcccactcccctgttcttaagcaccctgcagcgaagggcactgccgagaaactggaaaattctccaggacacggcaaatcacctgatcacaggggcagagtgagcagtctgctacacaagcctgagttccccgatggtgaaatgatggaggtgctgatatag

SEQ ID NO: 113243 - DNA, 2721 bp, Artificial Sequence
  derived and/or modified sequence
atgtggagggccaagctgcggcggggcacctgtgagcctgctgtgaaggtggaggaccccctgtgcaacttccacagccccaacttcctgcgcatcagcgaggtggagatgaggggctctgaagatgctgctgctggcaccgtgctgcagaggctcatccaggagcagctgcgctatggcacccccacagagaacatgaacctgctggccatccagcaccaggccaccggcagcgctggccctgcccaccccaccaacaacttcagcagcacagagaacctgacccaggaggacccccagatggtgtaccagagcgcccggcaggagccccagggccaggagcaccaggtggacaacacagtgatggagaagcaggtgcgcagcacccagccccagcagaacaatgaggagctgcccacctatgaggaggccaaggcccagagccagttcttccggggccagcagcagcagcagcagcagcagggcgctgtgggccacggctactacatggccggcggcaccagccagaagagcaggacagagggccggcccaccgtgaacagagccaacagcggccaggcccacaaggatgaggccctgaaggagctgaagcagggccacgtgcgcagcctgtctgagcgcatcatgcagctgagcctggagagaaatggagccaagcagcacctgcccggcagcggaaatggcaagggcttcaaggtgggcggcggccccagccctgcccagcctgctgggaaggtgctggacccccggggccccccacctgagtaccccttcaagaccaagcagatgatgagccctgtgtccaagacccaggagcacggcctcttctacggggaccagcaccctggcatgctgcacgagatggtgaagccctacccagccccccagcctgtgaggacagatgtggccgtgctgcgctaccagcccccaccagaatatggagtgaccagccggccctgccagctgcccttccccagcaccatgcagcagcacagccccatgagcagccagaccagcagcgccagcggccccctgcacagcgtgtccctgcccctgcccctgcccatggccctgggcgccccccagcccccacctgctgccagccccagccagcagctgggcccagatgcctttgccatcgtggagcgggcccagcagatggtggagatcctgacagaagaaaatagagtgctgcaccaggagctgcagggctactatgacaatgctgacaagctgcacaagtttgagaaggagctgcagaggatcagcgaggcctatgagagcctggtgaagagcaccaccaagcgggagagcctggacaaggccatgaggaacaagctggagggggagatccggcggctgcatgacttcaacagagacctgcgggaccggctggagacagccaaccggcagctgagcagccgggagtatgagggccacgaggacaaggctgctgagggccactacgccagccagaacaaggagttcctgaaggagaaggagaagctggagatggagctggccgctgtgaggacagccagcgaggaccacagaagacacatcgagatcctggaccaggccctgagcaatgcccaggcccgggtcatcaagctggaggaggagctgcgggagaagcaggcctacgtggagaaggtggagaagctgcagcaggccctgacccagctgcagagcgcctgtgagaagcgggagcagatggagcggcggctgcggacctggctggagcgggagctggatgccctgcggacccagcagaagcacggcaatggccagcctgccaacatgcctgagtacaatgccccagccctgctggagctggtgcgggagaaggaggagcgcatcctggccctggaggccgacatgaccaagtgggagcagaagtacctggaggagagcaccatccgccactttgccatgaatgctgctgccacagctgctgctgagcgggacaccaccatcatcaaccacagcagaaatggcagctatggagagagcagcctggaggcccacatctggcaggaggaggaggaggtggtgcaggccaacagacgctgccaggacatggagtacaccatcaagaacctgcacgccaagatcatcgagaaggatgccatgatcaaggtgctgcagcagaggagcaggaaggatgctgggaagacagacagcagcagcctgcggcctgcccggtctgtgcccagcattgctgctgccaccggcacccacagccggcagaccagcctgaccagcagccagctggccgaggagaagaaggaggagaagacctggaagggcagcatcggcctgctgctgggcaaggagcaccacgagcacgccagcgcccccctgctgcccccaccacccaccagcgccctgagcagcatcgccagcaccacagctgccagcagcgcccacgccaagacaggcagcaaggacagcagcacccagacagacaagtctgctgagctgttctggcccagcatggccagcctgcccagccggggccgcctgagcaccaccccagcccacagccctgtgctgaagcaccctgctgccaagggcacagctgagaagctggagaacagccctggccacggcaagagcccagaccaccggggccgggtgagcagcctgctgcacaagccagagttcccagatggagagatgatggaggtgctgatctag

SEQ ID NO: 113244 - DNA, 8844 bp, Artificial Sequence
  derived and/or modified sequence
cggacggcggcgggagcgcgcgagaagctctaggacccagcagcggttgtcgggtttggggctggaggtgaagccctgtgtgaatggggttgattgtccggcgccacttccccgcgctgcccggcagccgtcttccccagccgagggactgaactagccatgatcgcctcatgtggagggcaaagttgcgccggggaacttgtgagcctgcggtgaaagttgaagatcctctttgtaacttccactccccaaacttcctgaggatctcagaggtggaaatgagaggttccgaggatgcggcagctggaacagtattgcagcggctgatccaggaacaactgcggtatggcaccccaaccgagaacatgaacttgctggccattcagcaccaggccacagggagtgcaggaccagcccatcctacaaacaacttttcttccacggaaaacctcactcaagaagacccacaaatggtctaccagtcagcacgccaagaaccgcagggtcaagaacaccaggtggacaatacggtgatggagaaacaggtccggtccacgcagcctcagcagaacaacgaggaactgcccacttacgaggaggccaaagcacagtcgcagttcttcagggggcagcagcagcagcaacagcagcagggggcggtgggccatggttactacatggcagggggcaccagtcagaagtcccgaactgaggggaggcccactgtgaaccgtgccaacagtggacaggcgcataaggacgaggcgctgaaggaactgaagcagggccacgtccgctcgctcagcgagagaatcatgcagctgtccctggagaggaatggggccaagcaacaccttcccggctcggggaatggaaagggcttcaaagtaggaggggggccctcccctgcccagcctgcaggtaaagtgctggaccctcggggtcctccacctgagtaccccttcaagaccaagcaaatgatgtccccagtcagcaagacccaggagcacggacttttttatggtgaccagcaccccgggatgctccacgagatggtcaagccctaccctgctcctcagcctgtgagaacagatgtggccgtcctgcggtaccagccaccccctgagtatggggtaacgagccgcccatgccaacttccgttcccatcaaccatgcagcagcacagccccatgtcctcccagacctcttccgccagcgggccactgcactctgtctccctgccgcttccactcccgatggccctgggtgctccacagcccccgcctgccgcctcccccagccagcagcttggtccagatgcctttgcgattgtggagcgagcccagcaaatggtggagatattaacagaggagaaccgggtgcttcaccaggaacttcagggttactacgacaatgccgacaagctccacaagtttgaaaaagaacttcagagaatttcggaagcctatgaaagtctggtcaagtctaccaccaagcgagaatcgctggacaaggccatgagaaacaaattggaaggcgagattagaagacttcatgatttcaacagagacctccgagatcgactagagactgctaacaggcaactatccagcagggaatacgaagggcatgaagacaaagctgcagaggggcattatgcttcccagaacaaagaattcttgaaggaaaaggagaaattagaaatggagttagcagcagtgcggactgcaagtgaggaccatcggagacacatcgagatcctggaccaggctttgagcaacgcccaggccagggtcatcaagctggaagaggagttacgagagaagcaagcatatgttgagaaagttgagaagctgcagcaggccctgacccagctgcagtctgcatgtgagaagcgagaacagatggagcggagactgcggacttggctggagagagagctggatgcactgagaacccagcagaaacatggaaatggccagccagccaacatgccggaatacaatgccccagccctcctggaacttgtgcgggagaaggaggagcggatcctggccctggaggccgacatgacaaagtgggagcagaagtacctggaggagagcaccatccgacactttgccatgaatgccgcagccactgcagcagctgagagggacaccacgatcatcaaccactcacggaatggcagctacggagagagctcgctggaggcccacatctggcaagaggaggaggaggtggtgcaggccaacagaaggtgtcaggacatggaatacactattaaaaatctccatgccaaaatcatagagaaagatgctatgattaaggtcctgcagcagcgatctcgtaaagatgccgggaagacagactcctccagcctacgtcctgcccgctccgttccatccatagcagcagctactgggacacactctcgccagacctctcttaccagcagccagctggctgaggaaaagaaggaagagaagacctggaaggggagcataggattgctgctggggaaggagcaccatgagcatgcctctgccccactgctgccacccccacccacctcagcactgtcctccatagcctccactacggcagccagcagtgcccacgccaagacaggcagcaaggacagcagcacacagactgacaagagtgccgagctcttctggcccagcatggcctcccttcccagccgcggccggctgagcacgacccctgctcacagccccgtcctgaaacacccagcggccaaagggaccgcagagaaactggagaactctcctggccatgggaagtcgcctgaccacagaggccgggtcagcagcttgctgcacaagcccgagttccctgatggagagatgatggaagtcctcatctaactgccatccctgtggaatttcagtacagaacactgacaaacaaggaaagcggcagagaaagaagaaagacctagaaggttgtagatgggaaatcaggaatgatttgaactgataaagatttcagactcataagaacacattttataaatgttaaacacaaaaactacatgactgaagatagaagagaatgcgatggattttattacacatggtggaagagagaagaggcgtgtaggtttgcaaacaaagttaagaaataggaaactgaatttttcattgtacagaaaatgtatctcttggggagggcctgtgtacccccattctctgattataaacagataaacccaaatgtggatcatccttggaatacccccattctccttgcctcttagcatgtttgatttaagaaaagcctccaggaaatcttgagagcctgtcttggcataatgcagtgtcacctgtgccaaccatggggtgtcccgtgagtgtgagtgtggcagtgagaagaagcatcgagggcgaggggaatatgaaagttggtcttcacctaattacctgtttggtttggattttcaagagatgattgggcttcttagcttttctgaattctgcagtattttctaaacaggatagattatgatctcggtccccatccatcctaacttctgagttcatctctgtctctgctttacagtctttaattttttgttgttccttcatttttttctttttaataagacatagcagaattccttaggtatgggatttatgagaccagtacctgaactgtcatcattcctactgtgtttgatagtgaccagtaggacaaagccacgtgccgacttcctggctgcttcacctttgcatagctgggttgcagctgcgaacctcattctgactgtgaactaagcaagctttgaggaggcaggagattccgtgggtccctgtgacatattgcattaagatcgtggcacttgcttttttgtctttcacatcggctgtcttgcaaggagcttgacatttccaaattccattgctctgtttggggaagacttaggacagcactccaggaaacagatgacaatttacagacagttgtctcagtggtttccagaatctcaccagcctcccgtatagcttcttgtattgaggctcatgagcgtattcacactctttcctcccccgcgcacgcctctgcttgctctcgatcagcatccagacctccgtggcaccaggttgcctctgttgtgaacttcttttgtaacctaccaggccagttgtatatacagtgttgtcaggtttttccgggtttcagttttgaggcagtttattcaaagtgagacagaagtgccacggaaaagaggcaggagtgtgttaggtggtgggtccattagacctctgctgtgacattgcatattcagctctgcagacactggcttcctttacaaatctaagagatgctggattagaaaagaggagaagctcatcgggccatcagagagatgctcctacagggtcctgatgtttttgtacctccaggtcagctggatcgctgttttcccagttccctttgctcatgcttacttagaggaagaaagaaaggggggtacctcttccaagtaccttctaaatgaaacactcaagagagtgctactcaggaaactttgcttggatcctaaaatggactggtcttgggtgtgtaaccccggtgaagttatagcctccccaaattgaggtgacagaaggaagacaagaggtgtaagctggagagggaagggaagaaatcagtggctttggccagcctctgtgccacccagtacgacagaggagtgggaactggccctctggggctctgcttggccataggcactgcacattgtgccacctgctcatcacctcctctagtctcacactgagcatcggagtacctgttgtgcagacaggaaaactgaggagctctgagaggctgagcatggagctcaccccatgccatagggtgtgggaagagggcacaggaggcctcatccatgggggaaagggttgaggatggacatgggtggggagagggcatagacatcccttcctaatctctgttcccaccacatttcataggagatgagttaggagatgacagctaactctcttaaggacattttgaccccagtttatgttggggatggaccagaaaggaaaatgtctagagataggaaggtaaatcaactctgccagcccctaccatcaggtctgggccaccccaaacttgggctgcctcccttagacataggttagagtgagagacccagctgtttctcccgaagcctcgtcttcatgccccagacacctgattgccccaatcaggtgtcagacttgcttgctcttcgaggtccccctgagctgccaagtgttttcattgtaaacagacacatcgccatgtttcagggcttcaacggcattgtattttggactttgaccgtattttttttctcttaacctactgagactcttccttaagaacaggatctatagctttaaaatgtcttcttctatgggaaatttcctgccaagccagggcactaaattctttcatcattagagctttcctgaagtccggccatatactgagtacctgctctgagttctgggcagcttacaatatcttaaacagattttcagaaaaataatgcaactatattttctagtgtcaactgtatgcaaacagtgtggtaaataccttttaattagtcctccacccacctggagtacagggggtgcgtttattattctgatttcactgatgaggaaatgggctcagaaaggttaagtcccttcctgaaatctcacagccaggagaagctaggatgatttaaaacaaagtttggagaggcactgggcatagaccctggctgtacagcctctaacatgcggcactgcatcttggcagtctctatgcctgtctgtgatgtgtgtgtgcacgtgtaactacacacacacacacacacacacacacacacacacacagctatcacacatctcagagcctaagaaataggactaagcccagaactcctagaatcacctataaatgctaggcatagatggaaattattgtgttccaccagaagcacagctccaaactatacctaaaaaatatttctgcacttcccagagacctggacttcaaactttcccagtggagcctgattatagaacttgagggtcctatctcaggatgaaggggagaggccctggcttcacgggaaggtattccagcattgttctgcttcacccttgactgcgttgtctggcagtttctgtgtgctgccaggatattatatggaactggagaagttggagtcaggtctctgaagctagagtttcactaattagatgcctctgtacatgagaactattactgtctgcaggtccatatagctaagctgccaggaaaaacacattatcttccaaaactttcagagcatgtgcagaaccctttcttagcgttttcttctcagcattttctctgcctcccagaggctggcagccagtgacactgcagagttcagcatgttctaaccatgcacgcagggcaggggctgccttggccctcctcaggctttcgttgggagagcaggcagtggtggagcccttctgggtgcagtcctctggggttgctctttggaactcatgtatgagtttgactccacaaggcttggcatggataccaaaacagttgcaacaaattagttctgaacctggaacagagaattcagtgcttctgttactcaggaaggaggtgttcagaatgccccgtgcagagcagccagtcattactcttgtttgttctcacctgggtgcgcaccctcatgatgcagtggctgtagcaccttcatgccaggtgctgagagaatgggaaattcttcctccccattgacctgagtcccagagacttagggacacagacttcaggtgaggctgcggacctcagaagcagtggataatagattggggcattaaaagcttttgaggcagggggctcatgttttgactgcagggagttatgctgagcaaagagatgtgtttttcaaaaccagggttcaaaaccagtgtccacgctggagtaagtggagcatgcttctctgtgttctctgaatgatcttgcactcctcttaagcaaaggagtaccatgaccatagtcagtgggatcccacaaatgttcttaaatgggtaaggctttaagtagccagagagtatccagcctaccattggcttctccacatcctaaaacctgagacagccttggtatatgctttataaatgtttcttttcttgttgtttaagtaattaaagtgtttaaaatgtcttcattagatgtgacgattgtttaatgagtttgcctctgacgtgtggctccatgggagataggcaaagtaattaagaagttaccagaaattggtcggctggggaaatgcaaaagttagcatttcagtagtgaatttctcctggaacaaatgagcaatttttcctctttctcttaagtagtatacccttttctcacttagtaatttaatggtatataaagacatgtgtataagtgagtgcatacatatgaggtatgactatagggttgtttgtgggaatttcttttcctaacatacagaagatcaaagtgttcatctcaccccgccctccttaaaaggtgtcttttgggagactatgtgctcattgactatagtgctgccaagtaaaaatatcttgggaactcttctactagaatggccttcagggcttggcatgttcctttggtttacccttagagatgagaaatcctcctcctttgaggatggatttaagttctggaaataatctcaagtgcttgatagcacagttggatgaaaaaagatggcaattaaggtaagttacaccatttttgtttctaaaaaaatccctaagaaatttcttggaatgagtctttggcctcagagcctctcaaagtgtccacttcaaggggggatcatcctcattagcacacagatttttaaaaatcaattctcttgccatgcctcctatgtgttcacatctctgcatacactacagatataagtgcataatcattcatataaacatctggtaggtattctgtaaaactgtgtttactttagtgcatgttattgtcatgttatgatgtgactggggtgtttctttgtcatgaaactttgcttcttcacagaattagaatactgctctctctatattgaactacatatacagcgttttcttgtatcagcccccaaagtctggatgcccggtgttgtgtttacatgtgattgtgcctaggagtctgttcacatagagacacctgtaagtatttattacaaaacggaatgtaagcaaatatatccacattggttttatttgaatcaaggtgtttttttgttttttgttttttttccttttgaggaggaacagggagcctcctcctccatgagcacttacagaattgtgtaaaattctgtgaaacagtggtaagcatgggcacccgatttcagctgtcctgctgccgctgccctccaacctgctctgtgtgtgtgtgtcgctgtgcttggtggcagtgtgccgtgctcgtgccggctcttcccagcagactggtatctggctgtaacgtttgacgtcttcatattgccagtctgtattgaggggtgatgtacatggccatacagccaaatgggtctgtgtaccagtgtggggattccaagaacactgcctgtcccccacagcaaatattgatgctgttggtcagccaaagattttcctctcctttgctgcttaaacttgtgccttaatattgtacataataaatggataaaatggcaaaatgactcttttctctcgcttgctcctttcttccttaaagaacttataaactgatgctcaataaatgtttcatttcattgta

SEQ ID NO: 113245 - DNA, 2721 bp, Artificial Sequence
  derived and/or modified sequence
atgtggcgggccaagctgcggcggggcacctgcgagcccgccgtgaaagtagaggatcccctttgcaattttcactcgcccaacttcctcagaatttccgaagtcgaaatgagggggtctgaagacgccgcggctggaaccgtattacagcgactgatccaggaacagctgcggtatggaacacctactgagaatatgaaccttctggctatccaacaccaagcaactggatctgccgggcctgctcatccaaccaataacttttccagcaccgagaacctaacccaagaggatccccagatggtgtatcaaagcgcacgccaagaaccccaggggcaagagcaccaggttgataatacagtgatggagaagcaggtgcgatccacccaaccccagcagaacaacgaggagctgcctacctatgaagaggcaaaggcccagtcccaattctttcgaggccagcagcagcagcaacagcagcagggtgccgtgggccatggctattatatggctgggggcaccagtcagaaaagccggacagagggacggcccacagtgaatagggcgaattcaggccaagcccacaaggacgaggccctgaaggagctcaaacaggggcacgtccgatcgctgtctgagcgtattatgcagctctctcttgagcgcaacggagctaaacagcacttacctggatcagggaatgggaaaggcttcaaggtgggagggggcccttccccagcacagcccgcagggaaggtgctggatcctcgaggaccacccccagagtatccattcaaaactaagcagatgatgtcacccgttagcaaaacccaggagcacggcttgttttacggcgatcaacaccctggaatgctccatgagatggtcaagccctaccctgctcctcaaccagtgcgcacggacgtggcagtgttgcgctaccaacccccgcccgagtacggcgtgacaagtaggccttgtcagcttccatttccatcaactatgcaacaacacagccctatgagttcccagacttcaagtgcctccggaccactccattcagttagcctgcccctaccacttcccatggccctcggcgcgccgcagccacccccagcggctagcccttctcagcaactcggtcctgatgcctttgccatagtggagcgcgcccagcagatggttgagatcttaactgaagaaaaccgggtgctgcatcaggaattacaaggatattatgacaacgctgataaactccacaaattcgagaaggagctgcaacgaattagtgaggcctatgagtccctcgtgaagtcaaccaccaaacgggaatcactggacaaggccatgaggaacaagttggaaggcgagatacgcagattgcatgacttcaaccgggaccttcgggatcggcttgagaccgccaataggcaactctcctctcgcgaatatgagggccatgaagacaaggccgcagagggtcactacgcgagccaaaataaagaatttttgaaagagaaggaaaaactggaaatggagctagccgcggtgagaaccgccagtgaggaccatcgtagacatattgaaattctcgatcaggccctttctaatgcccaggccagagtgattaagctcgaagaagaattacgcgaaaagcaggcctacgtggaaaaggtggagaaattacagcaggctctcacccagctgcagtctgcttgtgagaaacgagagcagatggagcgaagactacggacatggctcgaacgcgaactcgatgcactcagaacacaacagaaacacgggaatgggcagccggcgaatatgcccgagtacaacgctccagccctcctcgagctggtgagggaaaaggaggagcggattctagccctcgaggcagacatgaccaagtgggaacaaaagtacctggaggaaagcactatcagacactttgctatgaacgccgccgcaaccgctgccgctgagagagatacaacaatcatcaatcactcccggaatggctcctatggcgagtctagtttggaagcccatatatggcaagaggaagaggaggtcgtgcaggctaacaggcgctgtcaggatatggaatataccattaaaaaccttcacgccaaaattatcgagaaagatgccatgataaaagttctgcagcagcgctcccgcaaggacgccggcaaaaccgactcctccagtctacgccccgctaggtcagttcctagcatcgccgcggcaacaggcacccattccaggcaaacatcgttaactagttcccagctggccgaggaaaagaaggaggagaaaacgtggaagggctcaattggtctgcttctgggaaaagaacatcatgagcacgctagcgctccattactgccgcctccccctactagtgcgctgtccagcattgcctctactactgcagcgtcgtctgcccacgccaaaacaggatccaaagattcatctacccagacggataaaagtgccgagctgttttggccctctatggctagcctcccatcccgagggcgcctgagcaccacacccgcccactcccccgtgctgaagcacccagccgcgaagggcaccgcggagaagcttgagaactcccctggacacggtaaatcaccggatcatcggggccgggttagctctctgctccataagcccgagtttccagatggcgaaatgatggaagtgctaatatag

SEQ ID NO: 113246 - DNA, 2721 bp, Artificial Sequence
  derived and/or modified sequence
atgtggcgggctaagctgcgcagaggaacttgtgagccggcagtaaaagttgaagaccctctgtgtaacttccattccccaaatttcctcaggatttccgaagtggagatgcgcggaagtgaggatgccgctgcaggtacagtcctgcagcggctcatacaggagcagctcagatatggaactccaaccgagaacatgaaccttctggccatccagcaccaggccaccgggtctgctgggccagcacatccgaccaacaacttctcctccacagagaacctgacacaggaggacccacagatggtctatcagtctgctaggcaggaacctcagggccaggagcaccaggtggataacaccgtaatggagaagcaggtcaggtccacccaacctcagcaaaataacgaagaactgcctacgtacgaagaggctaaagcccaaagtcagttcttcagaggtcagcaacagcagcagcagcagcagggcgcagtgggccacggatactacatggccggagggacatcacaaaagagtagaactgagggacgcccaactgtaaaccgggcaaattccgggcaggcacacaaggacgaggcgctgaaggaacttaaacaagggcatgtgaggtccctgtccgagcgaatcatgcagctgtcactggaacgtaatggtgcaaaacaacacttgccagggtccggtaacgggaaggggtttaaggtggggggaggaccatctccagcgcagcccgctgggaaggtattggacccccgagggccacctccagaatatccatttaagacgaagcaaatgatgtccccagtgagtaaaactcaagaacacggccttttctatggtgaccagcacccgggaatgttacacgagatggttaaaccctatcccgctcctcagcctgttagaaccgatgtagcagtgctcagatatcaacctcctcccgagtacggtgttacctcccgcccttgtcagctgcctttccctagtaccatgcagcagcactcacctatgagcagtcaaacttcaagtgccagcggacccctccacagcgtctctctccctttgcctcttcccatggccttgggcgctcctcagccacccccagctgcctccccatctcagcagttgggacctgatgccttcgccatcgtggagcgggcacagcagatggtggagatccttaccgaagagaaccgagtccttcaccaagagttacagggctactacgataacgcagataagctgcacaagtttgaaaaggagctgcaacgcatctctgaggcatacgagagccttgtgaaatctacaacaaagcgcgagtccctggataaggccatgaggaataagttggagggcgaaattagacgtctgcatgacttcaatcgagacttacgcgatcggctggaaactgcaaaccggcagttgtccagccgcgagtacgaaggacatgaagataaggccgctgaaggccactacgcctcacagaataaggagtttctcaaagaaaaggagaaactggaaatggagttggcagctgtgagaactgcatccgaagaccataggagacacatcgaaattctggatcaggcactcagcaacgcacaggccagggtgattaagctcgaggaggagctcagggagaagcaggcttacgtagaaaaggtggagaagctgcagcaagctctgacacagctccaatctgcatgcgagaagagagaacaaatggagcgacgcctgcggacctggctcgagcgcgagctggatgctcttaggacccagcagaagcacggtaatgggcaacccgctaatatgcctgagtataacgcgccagcacttctggaactcgtacgtgaaaaggaagagaggatcctggctcttgaagcagacatgaccaagtgggaacaaaaatatctggaagaatctactattaggcacttcgctatgaatgctgcagctactgccgcagcggagagagacactactattattaaccacagtaggaacggaagttacggcgagtcgtctctagaagcccacatatggcaggaggaagaggaggtagttcaagccaatcgacgctgccaggacatggagtataccataaagaatctgcatgctaaaatcatcgagaaagatgccatgatcaaggtgctccaacaacggtctcgaaaggatgctgggaagacggacagctccagccttaggccggctcggtcggtgccctcgattgccgctgccaccggaacccactctagacagacctccctgaccagttctcaacttgctgaagagaagaaagaagagaaaacctggaagggcagcatcggtttgttgttaggcaaagagcaccatgaacacgcgtccgctccactgcttccaccccctccaacctctgcccttagcagcatcgcctcaaccaccgccgcaagctccgcgcacgcaaagaccggatctaaggactcctccactcagaccgataagtctgctgagttgttctggccctccatggcttccctgccatctcgtggtaggctgtctacgacacccgcacattcccctgtgttgaaacatccagctgccaaggggactgcagaaaagctggaaaattctccaggtcacggtaagtccccagatcaccggggaagggtttcatctctgctgcacaaaccagagttccccgacggggagatgatggaggtgcttatatag

SEQ ID NO: 113247 - protein, 667 aa, Artificial Sequence
  derived and/or modified sequence
MFAMDSNHQSNYKLSKTEKKFLRKQIKAKHTLLRHEGIETVSYATQSLVVANGGLGNGVSRNQLLPVLEKCGLVDALLMPPNKPYSFARYRTTEESKRAYVTLNGKEVVDDLGQKITLYLNFVEKVQWKELRPQALPPGLMVVEEIISSEEEKMLLESVDWTEDTDNQNSQKSLKHRRVKHFGYEFHYENNNVDKDKPLSGGLPDICESFLEKWLRKGYIKHKPDQMTINQYEPGQGIPAHIDTHSAFEDEIVSLSLGSEIVMDFKHPDGIAVPVMLPRRSLLVMTGESRYLWTHGITCRKFDTVQASESLKSGIITSDVGDLTLSKRGLRTSFTFRKVRQTPCNCSYPLVCDSQRKETPPSFPESDKEASRLEQEYVHQVYEEIAGHFSSTRHTPWPHIVEFLKALPSGSIVADIGCGNGKYLGINKELYMIGCDRSQNLVDICRERQFQAFVCDALAVPVRSGSCDACISIAVIHHFATAERRVAALQEIVRLLRPGGKALIYVWAMEQEYNKQKSKYLRGNRNSQGKKEEMNSDTSVQRSLVEQMRDMGSRDSASSVPRINDSQEGGCNSRQVSNSKLPVHVNRTSFYSQDVLVPWHLKGNPDKGKPVEPFGPIGSQDPSPVFHRYYHVFREGELEGACRTVSDVRILQSYYDQGNWCVILQKA

SEQ ID NO: 113248 - DNA, 1995 bp, Artificial Sequence
  derived and/or modified sequence
atggattctaatcaccagtcaaactataagctcagtaaaaccgaaaaaaaatttttacgcaaacagatcaaagccaagcacacgctcctgagacacgaaggaatcgagacggtctcttatgccacacagagcctggtcgtggccaacggcggcttgggcaatggggtatctcgcaatcagttgctccccgtgttagagaagtgtggcctagtggacgcgctgctaatgcccccaaacaagccttacagttttgcccgatatcgcactacggaagaatctaagcgagcatacgtgacccttaatggaaaagaagtggtggatgatctggggcagaaaattacactgtacttaaactttgtggaaaaggtccaatggaaagagctgaggccacaggctcttccgcctggtctgatggttgtggaagagataattagctcagaggaagagaaaatgttgcttgagtccgtggactggacggaagacaccgacaaccaaaacagtcagaaaagcctcaagcaccggagggtgaagcattttggatatgaatttcattacgagaataacaacgtagacaaggacaaacccctcagcggcggtctgccagatatatgcgaaagctttctggagaaatggctccgtaagggctatatcaagcacaagcccgatcagatgaccatcaatcagtacgagcccggacagggaatcccagcacacatcgatacccatagtgcgttcgaagatgagattgtcagtctgtccttaggtagcgagattgtgatggacttcaaacaccccgatggtatcgccgtgccagtcatgctgccaaggaggtctctattggttatgacaggagaaagtagatacctatggactcacggaattacgtgcaggaagttcgataccgtgcaggcatctgagagtctcaagtcagggatcattaccagcgatgtcggagacctcaccctgagtaagagaggactgcggacgagctttactttcagaaaggtgcggcagacaccctgtaattgtagctaccccctggtgtgcgactcacaaagaaaggagacaccaccgagcttccccgagagtgataaggaagcctccaggttagagcaggaatacgttcatcaagtgtacgaggagatcgcgggacacttctcctcaacgagacacacaccctggccccacatcgtggagttcctgaaggctctgccctcaggctccatcgtggcggacattggttgtggtaacggcaaatatttggggataaacaaagagctctatatgattggttgcgatcggagccagaacctggtggacatctgtcgcgagcgtcaattccaggccttcgtctgtgatgcactggcggttcctgtccggagtgggtcttgtgacgcttgcatttcaatagcggtcattcaccacttcgctactgccgagcggcgcgtcgccgcattgcaggaaatcgtccggctccttcgccctggcggcaaagcactgatctacgtatgggctatggagcaggagtataataaacaaaagtccaagtatctccggggtaacagaaatagccagggcaaaaaggaggaaatgaactccgacacttccgtgcagagatctctagtagaacagatgcgcgacatgggcagcagggatagtgcctcaagtgtaccgagaatcaacgatagccaggaaggtggatgcaacagccggcaggtttccaacagcaagctgcccgtccatgtcaatcgcacttccttctactcgcaagatgtgctagtgccatggcacttgaaggggaacccagacaaggggaaacctgttgagccctttgggcctatcggctcacaggatccttcaccagtgttccaccggtattatcacgtgttccgagagggcgagctggaaggagcatgtcgcacggttagcgatgtcagaatcctgcagagctattacgaccagggaaattggtgtgtgatcctccaaaaagcctag

SEQ ID NO: 113249 - DNA, 2004 bp, Artificial Sequence
  derived and/or modified sequence
atgtttgccatggacagcaaccaccagagcaattacaagttaagcaagaccgagaagaaatttctcaggaaacagattaaggctaaacatacgcttctaaggcacgagggtatcgaaacagtgagttatgcaactcagagtctcgtcgtggcaaacggggggctgggcaatggcgtgtctcggaatcagctgctccctgtgcttgagaagtgcgggcttgtggacgccctactgatgccccctaataagccttattccttcgcaagataccgcaccactgaagaaagtaaaagggcctatgtcactctgaatggaaaggaggtcgtcgacgatctgggccagaaaataacactgtacttgaatttcgttgagaaagtacagtggaaagagttgagaccgcaggccttgccacccggtctcatggttgtggaagagataattagttccgaagaagaaaagatgctgttggagagtgttgactggaccgaagataccgataaccagaactcgcaaaaaagtttgaagcaccgtagagtcaagcatttcggctacgaattccattatgagaataacaacgtcgacaaagataagcctctgtcagggggcctgcctgatatttgcgagtctttcctggagaagtggctgcgtaaaggttatatcaaacataagcctgatcagatgaccatcaaccagtatgagccaggccagggcattcccgcccacatcgatacccacagtgccttcgaagatgaaatagttagcctctcactcgggtccgaaatcgtcatggactttaagcatcctgatggaatcgccgttcccgtcatgctgccgcgccgaagtttgttggtgatgacaggcgagtcgcgttacttgtggactcatgggattacctgtaggaaattcgatacggtgcaagcctccgaatcactgaagtctggaattatcacgagcgatgtgggcgacctgacccttagcaaaaggggtctccgcacatccttcacattccgtaaagttaggcagacgccatgcaactgttcatatccgttggtatgtgacagccagaggaaggaaacaccacccagctttccagagtccgacaaagaagcttcgaggctcgaacaggaatatgtccatcaggtgtacgaggaaattgcaggacatttttcctcaactcggcatacgccctggccccacatcgtggaatttctgaaggctttgccgtccggctccattgtggctgatattgggtgcggcaatgggaaatacctcggtatcaacaaggagttatacatgattggttgcgatcgctctcaaaatttggtcgatatatgtcgcgagcggcaatttcaggccttcgtgtgcgatgccctcgcagtgcctgttcgatccggcagctgtgatgcttgcatctctatcgccgtgatccatcatttcgccacggcagaaagaagggtcgccgcactgcaggaaatcgttcggttgctacggccagggggcaaagcactgatttatgtgtgggccatggagcaggaatataataaacagaagtctaagtacctgagagggaatagaaattctcagggcaagaaagaagagatgaattctgacacatccgttcaacggtcgctggtagaacagatgcgcgatatggggagccgggactcggcttcgtctgtccccaggattaatgactcccaggaaggcggctgtaacagccgacaggtaagcaacagcaagttacctgtacacgtgaatagaacgtccttttattcccaggacgtgctcgtgccctggcatttaaaggggaaccctgacaaggggaagcccgtcgagcccttcggaccgattgggtcccaggatccctcccccgttttccataggtactatcacgtttttcgagaaggcgaattagaaggtgcatgtagaactgttagtgacgtgagaatcctccaatcatactacgaccagggcaactggtgtgtaattctccaaaaggcgtag

SEQ ID NO: 113250 - DNA, 1995 bp, Artificial Sequence
  derived and/or modified sequence
atggactctaatcaccagagcaattataagttgtctaaaactgaaaagaagtttttgagaaaacagatcaaagccaagcatacattgctgcgtcacgagggtatcgaaactgtgtcctatgccacccagtccctggtggtcgcaaatggggggcttgggaatggtgtcagccgcaatcagttgttgcctgtcctggaaaaatgcgggctggttgacgctctcctgatgcccccgaataagccctatagctttgctcggtaccgcacaactgaagagagtaaacgagcctacgtgaccttgaatggtaaggaggttgtcgacgatctcgggcaaaagatcaccctctatcttaactttgtcgaaaaggtgcagtggaaagagctccgcccgcaggccttgccccctgggctgatggtagtggaggagataatctcctccgaggaagagaaaatgttactggaatcggttgattggaccgaggacactgacaaccagaattcacaaaagtctttaaagcaccgtcgcgtgaaacactttggttacgagttccactatgagaacaataatgttgacaaggacaagcccctgtcaggcgggcttcctgacatctgcgagagcttccttgaaaagtggttgagaaagggatatattaagcataagccagatcagatgacaattaaccagtacgagcccggccaggggattccagcacatattgatacacactcagcctttgaagacgagatcgtctccctgtccttgggctccgagatcgtgatggattttaaacatccagacggcatcgccgtcccggtgatgctgccgcggaggtctctcttggtcatgacaggggaaagccgttatctatggacacacggaatcacctgccgtaagtttgacaccgttcaggcctccgagtctctcaaaagtgggatcatcacaagtgacgttggcgacctgacactcagcaaacggggtctcagaaccagcttcacattccggaaagtgagacagaccccttgcaactgctcctaccctctcgtctgtgactcccaacggaaggagacacctcctagcttccccgagtccgacaaggaagccagccggttggaacaagaatatgtgcatcaggtctatgaagaaatcgctggccacttcagctccacccgccataccccgtggccccacattgtggagttcctgaaggcgctcccgtccgggtctattgtggccgacatcgggtgcggcaatgggaagtacctgggaatcaacaaggaactgtacatgatcggttgtgatcgatcccagaacctggtcgatatctgccgggagagacagttccaggcgttcgtgtgcgatgctctagcagttcccgtgcggtctggctcctgcgacgcctgcatttctatagcggtgatacaccacttcgccactgcagagcgcagggtggccgctctgcaggagattgtgcggctcttgagaccaggaggcaaggccctgatttacgtgtgggccatggagcaggagtacaataagcagaagagcaagtacctgaggggcaatcggaactcacagggtaaaaaggaagaaatgaattcagacacctcggtgcagcgcagtctcgttgaacagatgcgggatatggggtcccgggacagcgccagcagcgtgcctcgcatcaatgattctcaggaagggggatgcaatagccgccaagttagtaattccaaactgcccgtgcatgtcaaccggaccagcttttacagccaggacgttttagtcccttggcatctgaagggcaaccccgataaaggcaaacccgtcgagccttttggaccaattggtagccaggacccaagcccggtgttccatagatactatcacgtttttcgagaaggggaattagaaggcgcctgtcgcactgtctccgatgtccggatcctgcagagctactatgaccaggggaactggtgcgtgattttacagaaggcctag

SEQ ID NO: 113251 - DNA, 1995 bp, Artificial Sequence
  derived and/or modified sequence
atggacagcaaccaccagagcaactacaagctgagcaagacagagaagaagttcctgaggaagcagatcaaggccaagcacaccctgctgcggcatgagggcattgaaacagtgtcctatgccacccagagcctggtggtggccaatggaggcctgggcaatggagtgtccaggaaccagctgctgcctgtgctggagaagtgtggcctggtggatgccctgctgatgccacccaacaagccctacagctttgcccgctaccgcaccacagaggagagcaagagggcctacgtgaccctgaatggcaaggaggtggtggatgacctgggccagaagatcaccctgtacctgaactttgtggagaaggtgcagtggaaggagctgcggccccaggccctgcccccaggcctgatggtggtggaggagatcatcagcagcgaggaggagaagatgctgctggagagcgtggactggacagaggacacagacaaccagaacagccagaagagcctgaagcaccggcgggtgaagcacttcggctatgagttccactatgagaacaacaacgtggacaaggacaagcccctgagcggcggcctgcctgacatctgtgagagcttcctggagaagtggctgaggaagggctacatcaagcacaagccagaccagatgaccatcaaccagtatgagcccggccagggcatcccagcccacatcgacacccacagcgcctttgaagatgaaattgtgtccctgagcctgggcagcgagatcgtgatggacttcaagcacccagatggcattgctgtgcctgtgatgctgccccggcgcagcctgctggtgatgactggagagagccgctacctgtggacccacggcatcacctgcaggaagtttgacacagtgcaggccagcgagagcctgaagagcggcatcatcaccagtgatgtgggggacctgaccctgagcaagaggggcctgcggaccagcttcaccttcaggaaggtgcggcagaccccctgcaactgcagctaccccctggtgtgtgacagccagaggaaggagaccccacccagcttccctgagagtgacaaggaggccagccggctggagcaggagtatgtgcaccaggtgtatgaggagattgctggccacttcagcagcaccaggcacaccccctggccccacatcgtggagttcctgaaggccctgcccagcggcagcatcgtggccgacatcggctgtggaaatggcaagtacctgggcatcaacaaggagctgtacatgattggctgtgacaggagccagaacctggtggacatctgccgggagcggcagttccaggcctttgtgtgtgatgccctggccgtgcctgtgcgcagcggcagctgtgatgcctgcatcagcattgctgtgatccaccactttgccacagctgagaggagagtggccgccctgcaggagatcgtgcggctgctgcggcctgggggcaaggccctgatctacgtgtgggccatggagcaggagtacaacaagcagaagagcaagtacctgcggggcaacagaaacagccagggcaagaaggaggagatgaacagcgacacctctgtgcagaggagcctggtggagcagatgagggacatgggcagccgggacagcgccagctctgtgccccgcatcaatgacagccaggagggcggctgcaacagccggcaggtgagcaacagcaagctgcctgtgcacgtgaacagaaccagcttctacagccaggatgtgctggtgccctggcacctgaagggcaacccagacaagggcaagcctgtggagcccttcggccccatcggcagccaggaccccagccctgtgttccaccgctactaccacgtgttccgggagggggagctggagggcgcctgcaggacagtgtctgatgtgcgcatcctgcagagctactatgaccagggcaactggtgtgtgatcctgcagaaggcctag

SEQ ID NO: 113252 - DNA, 2004 bp, Artificial Sequence
  derived and/or modified sequence
atgtttgccatggacagcaaccaccagagcaactacaagctgagcaagacagagaagaagttcctgaggaagcagatcaaggccaagcacaccctgctgcggcatgagggcatcgagaccgtgtcctatgccacccagagcctggtggtggccaacggcggcctgggcaatggagtgtccaggaaccagctgctgcctgtgctggagaagtgtggcctggtggatgccctgctgatgccacccaacaagccctacagctttgcccgctaccgcaccacagaggagagcaagagggcctacgtgaccctgaatggcaaggaggtggtggatgacctgggccagaagatcaccctgtacctgaactttgtggagaaggtgcagtggaaggagctgcggccccaggccctgcccccaggcctgatggtggtggaggagatcatcagcagcgaggaggagaagatgctgctggagagcgtggactggacagaggacacagacaaccagaacagccagaagagcctgaagcacagaagagtgaagcacttcggctatgagttccactatgagaacaacaacgtggacaaggacaagcccctgagcggcggcctgcctgacatctgtgagagcttcctggagaagtggctgaggaagggctacatcaagcacaagccagaccagatgaccatcaaccagtatgagcccggccagggcatcccagcccacatcgacacccacagcgcctttgaagatgagatcgtgtccctgagcctgggcagcgagatcgtgatggacttcaagcacccagatggcattgctgtgcctgtgatgctgcccaggaggagcctgctggtgatgaccggggagagccgctacctgtggacccacggcatcacctgcaggaagtttgacacagtgcaggccagcgagagcctgaagagcggcatcatcaccagtgatgtgggggacctgaccctgagcaagaggggcctgcggaccagcttcaccttcaggaaggtgcggcagaccccctgcaactgcagctaccccctggtgtgtgacagccagaggaaggagaccccacccagcttccctgagagtgacaaggaggccagccggctggagcaggagtatgtgcaccaggtgtatgaggagattgctggccacttcagcagcaccaggcacaccccctggccccacatcgtggagttcctgaaggccctgcccagcggcagcatcgtggccgacatcggctgtggaaatggcaagtacctgggcatcaacaaggagctgtacatgattggctgtgacaggagccagaacctggtggacatctgccgggagcggcagttccaggcctttgtgtgtgatgccctggccgtgcctgtgcgcagcggcagctgtgatgcctgcatcagcattgctgtgatccaccactttgccacagctgagcggcgggtggccgccctgcaggagatcgtgcggctgctgcggcctgggggcaaggccctgatctacgtgtgggccatggagcaggagtacaacaagcagaagagcaagtacctgcggggcaacagaaacagccagggcaagaaggaggagatgaacagcgacacctctgtgcagaggagcctggtggagcagatgagggacatgggcagccgggacagcgccagctctgtgccccgcatcaatgacagccaggagggcggctgcaacagccggcaggtgagcaacagcaagctgcctgtgcacgtgaacagaaccagcttctacagccaggatgtgctggtgccctggcacctgaagggcaacccagacaagggcaagcctgtggagcccttcggccccatcggcagccaggaccccagccctgtgttccaccgctactaccacgtgttccgggagggggagctggagggcgcctgcaggacagtgtctgatgtgcgcatcctgcagagctactatgaccagggcaactggtgtgtgatcctgcagaaggcctag

SEQ ID NO: 113253 - DNA, 2491 bp, Artificial Sequence
  derived and/or modified sequence
gccttgccagctagggctgagaacctagggaaaggggatggatcccagaggcgcccttggtgcagtctgagtcttcctgtgctcttatttgagcaatccctgcgactcctggacctctgtgtttgctcatgtgaaatattaaaaattctgtagtgcagtcatcccttgttctccatgacatactgcaaagttgctgttccacagatgaagatcttgaaatggaatggctctaaaatagctcctttgaagggcctcagatattctttgttttgttaagccattttgatctgctgcttctgaaaatcaacacctagatcaggccagcatttctaattaacaagctggattattattattattttttttacctctcatctctctgctatgctgccagccagcctgcctgcctcactggccttacatcctatttgctatggacagcaaccatcaaagtaattacaaactcagtaaaactgagaagaagttcttaaggaaacagattaaagccaagcatactttgctgagacatgaaggcattgagacagtatcctatgccactcagagcctggttgttgccaatggtggtttgggtaatggtgtgagtcggaaccagctgctcccggttttagagaaatgtggactggtggatgctctcttaatgccacctaacaagccgtactcatttgcaagatacagaactacagaagaatctaagagagcctatgttaccctcaatggaaaagaagtagtggatgatttaggacaaaagatcactctgtatttgaattttgtggaaaaagtgcagtggaaggagttgaggcctcaagccttaccaccaggactcatggtagtagaagaaataatttcttctgaggaggagaaaatgcttttggaaagtgttgattggacagaagatacagacaatcaaaactctcaaaaatccttaaaacacagaagagtaaagcattttggttatgagttccactatgagaacaacaatgtagataaagataagccattatctgggggtcttcctgacatttgtgaaagctttttggagaaatggttgaggaaaggttacattaaacataaacctgatcaaatgaccataaatcagtatgaacctgggcaaggaattcccgctcatattgatacacattccgcttttgaggatgagatcgtttctctcagtttggggtcagagattgtcatggattttaagcacccagatggcattgcagtgccagttatgttgcctcgtcggagtttgctggtgatgacaggagaatctagatacctttggacccatggaatcacgtgcagaaaatttgatactgttcaagcatctgagagtcttaaaagtggaattatcaccagtgatgttggagacttaactttaagcaagaggggactacgaacatcatttacatttaggaaagtgaggcaaacaccttgtaactgtagttacccgttggtctgtgatagccagaggaaagagactcccccctcatttccagagagtgataaagaagcctcacggctggagcaagagtacgtccatcaggtttatgaagagattgctgggcacttcagcagcacaagacataccccttggccgcacattgtggagtttttgaaggctttgccaagtggttcaatagtggctgatattggatgtggtaatggaaagtatcttggcatcaataaggagttatatatgattggttgtgatcgtagccaaaaccttgtggacatttgtagagagaggcaatttcaggcttttgtctgtgatgcattggcagtaccagtccgcagtgggtcttgtgatgcctgcatctccattgctgttattcatcattttgcaacagcagagcgtagagtggcagctctccaagaaattgttcgactcctgagaccaggtgggaaggcactcatttatgtctgggcaatggaacaagaatataataagcagaagtccaagtatcttagaggaaacagaaatagccaaggaaagaaagaggagatgaacagtgatacctcagtgcagaggtcacttgtggagcaaatgcgtgacatgggcagtcgagactcggcatcttctgtcccccgcattaatgactctcaggaaggaggatgtaattcaaggcaagtttctaattccaagctgcctgttcatgttaacaggacttctttttattctcaagatgtactggttccctggcaccttaagggaaatcctgataaaggcaaacctgttgagccatttggtcccataggatcccaggacccaagtcctgtgtttcatcgttactaccatgtgttccgtgagggagaactggaaggtgcctgcaggactgtgagtgatgtcagaattctgcaaagctactacgatcaaggaaactggtgtgtgattcttcaaaaggcctgattatttacctgaacacatcatatataaagaagaaatgctcacttaaaaaaaaagagagaataa

SEQ ID NO: 113254 - DNA, 2114 bp, Artificial Sequence
  derived and/or modified sequence
gtagtgcagttttctccaacatggccgcgcccaggggagatggcgtgcaagtatccgctgcggtgttctggtgctagagtggagaggctggcaaagaagaaggcacacgcatgtttgctatggacagcaaccatcaaagtaattacaaactcagtaaaactgagaagaagttcttaaggaaacagattaaagccaagcatactttgctgagacatgaaggcattgagacagtatcctatgccactcagagcctggttgttgccaatggtggtttgggtaatggtgtgagtcggaaccagctgctcccggttttagagaaatgtggactggtggatgctctcttaatgccacctaacaagccgtactcatttgcaagatacagaactacagaagaatctaagagagcctatgttaccctcaatggaaaagaagtagtggatgatttaggacaaaagatcactctgtatttgaattttgtggaaaaagtgcagtggaaggagttgaggcctcaagccttaccaccaggactcatggtagtagaagaaataatttcttctgaggaggagaaaatgcttttggaaagtgttgattggacagaagatacagacaatcaaaactctcaaaaatccttaaaacacagaagagtaaagcattttggttatgagttccactatgagaacaacaatgtagataaagataagccattatctgggggtcttcctgacatttgtgaaagctttttggagaaatggttgaggaaaggttacattaaacataaacctgatcaaatgaccataaatcagtatgaacctgggcaaggaattcccgctcatattgatacacattccgcttttgaggatgagatcgtttctctcagtttggggtcagagattgtcatggattttaagcacccagatggcattgcagtgccagttatgttgcctcgtcggagtttgctggtgatgacaggagaatctagatacctttggacccatggaatcacgtgcagaaaatttgatactgttcaagcatctgagagtcttaaaagtggaattatcaccagtgatgttggagacttaactttaagcaagaggggactacgaacatcatttacatttaggaaagtgaggcaaacaccttgtaactgtagttacccgttggtctgtgatagccagaggaaagagactcccccctcatttccagagagtgataaagaagcctcacggctggagcaagagtacgtccatcaggtttatgaagagattgctgggcacttcagcagcacaagacataccccttggccgcacattgtggagtttttgaaggctttgccaagtggttcaatagtggctgatattggatgtggtaatggaaagtatcttggcatcaataaggagttatatatgattggttgtgatcgtagccaaaaccttgtggacatttgtagagagaggcaatttcaggcttttgtctgtgatgcattggcagtaccagtccgcagtgggtcttgtgatgcctgcatctccattgctgttattcatcattttgcaacagcagagcgtagagtggcagctctccaagaaattgttcgactcctgagaccaggtgggaaggcactcatttatgtctgggcaatggaacaagaatataataagcagaagtccaagtatcttagaggaaacagaaatagccaaggaaagaaagaggagatgaacagtgatacctcagtgcagaggtcacttgtggagcaaatgcgtgacatgggcagtcgagactcggcatcttctgtcccccgcattaatgactctcaggaaggaggatgtaattcaaggcaagtttctaattccaagctgcctgttcatgttaacaggacttctttttattctcaagatgtactggttccctggcaccttaagggaaatcctgataaaggcaaacctgttgagccatttggtcccataggatcccaggacccaagtcctgtgtttcatcgttactaccatgtgttccgtgagggagaactggaaggtgcctgcaggactgtgagtgatgtcagaattctgcaaagctactacgatcaaggaaactggtgtgtgattcttcaaaaggcctga

SEQ ID NO: 113255 - DNA, 4079 bp, Artificial Sequence
  derived and/or modified sequence
aaatgtagtgcagttttctccaacatggccgcgcccaggggagatggcgtgcaagtatccgctgcggtgttctggtgctagagtggagaggctggcaaagaagaaggcacacgcatggtgagaatccggcctgagccgaagcggagtttgctatggacagcaaccatcaaagtaattacaaactcagtaaaactgagaagaagttcttaaggaaacagattaaagccaagcatactttgctgagacatgaaggcattgagacagtatcctatgccactcagagcctggttgttgccaatggtggtttgggtaatggtgtgagtcggaaccagctgctcccggttttagagaaatgtggactggtggatgctctcttaatgccacctaacaagccgtactcatttgcaagatacagaactacagaagaatctaagagagcctatgttaccctcaatggaaaagaagtagtggatgatttaggacaaaagatcactctgtatttgaattttgtggaaaaagtgcagtggaaggagttgaggcctcaagccttaccaccaggactcatggtagtagaagaaataatttcttctgaggaggagaaaatgcttttggaaagtgttgattggacagaagatacagacaatcaaaactctcaaaaatccttaaaacacagaagagtaaagcattttggttatgagttccactatgagaacaacaatgtagataaagataagccattatctgggggtcttcctgacatttgtgaaagctttttggagaaatggttgaggaaaggttacattaaacataaacctgatcaaatgaccataaatcagtatgaacctgggcaaggaattcccgctcatattgatacacattccgcttttgaggatgagatcgtttctctcagtttggggtcagagattgtcatggattttaagcacccagatggcattgcagtgccagttatgttgcctcgtcggagtttgctggtgatgacaggagaatctagatacctttggacccatggaatcacgtgcagaaaatttgatactgttcaagcatctgagagtcttaaaagtggaattatcaccagtgatgttggagacttaactttaagcaagaggggactacgaacatcatttacatttaggaaagtgaggcaaacaccttgtaactgtagttacccgttggtctgtgatagccagaggaaagagactcccccctcatttccagagagtgataaagaagcctcacggctggagcaagagtacgtccatcaggtttatgaagagattgctgggcacttcagcagcacaagacataccccttggccgcacattgtggagtttttgaaggctttgccaagtggttcaatagtggctgatattggatgtggtaatggaaagtatcttggcatcaataaggagttatatatgattggttgtgatcgtagccaaaaccttgtggacatttgtagagagaggcaatttcaggcttttgtctgtgatgcattggcagtaccagtccgcagtgggtcttgtgatgcctgcatctccattgctgttattcatcattttgcaacagcagagcgtagagtggcagctctccaagaaattgttcgactcctgagaccaggtgggaaggcactcatttatgtctgggcaatggaacaagaatataataagcagaagtccaagtatcttagaggaaacagaaatagccaaggaaagaaagaggagatgaacagtgatacctcagtgcagaggtcacttgtggagcaaatgcgtgacatgggcagtcgagactcggcatcttctgtcccccgcattaatgactctcaggaaggaggatgtaattcaaggcaagtttctaattccaagctgcctgttcatgttaacaggacttctttttattctcaagatgtactggttccctggcaccttaagggaaatcctgataaaggcaaacctgttgagccatttggtcccataggatcccaggacccaagtcctgtgtttcatcgttactaccatgtgttccgtgagggagaactggaaggtgcctgcaggactgtgagtgatgtcagaattctgcaaagctactacgatcaaggaaactggtgtgtgattcttcaaaaggcctgattatttacctgaacacatcatatataaagaagaaatgctcacttaaaaaaaaagagagaataaattaattacccttttaattaaagagaaaacttgtgggaaagtaccaaaggaaagctgagaaaaatttggaagtagggattcattaggagacattcaaatgtctcctgttggctgacatcacagatgtggtgttggctcctcctacttccctaggagaggtggtttctaaaagtgattgaagcagtttgtgcagtgtttgtaattcttgggtaagagcccaggattttgaagataatagttttttagtaaagtgctactaaatgtagtaaatcatgtaggattttagggatgtaattatatgttaatacagaaaatagtcctggtcaatagaaaattgtctgaagttttacctatgatttttagctctgtaaaatcatagacaataaccattctatttccatgcctgactagcccagggctggacgtatagcgggtgtccaataacgtttagtcaatcagataatacccagaacttagtaggagtttcattcaaaaactattttttgaacccaaccatgtaccagttactattttaagtactgataatgaagcagtgaataagaaagagcaaagctcttgcccttatggtgcttacattctagacggggagacagacagcaggcaaatcaataaatagatactatgtgccagatagtgataaatgccatgaaaaacataaaatgagagacgattcaccttggagcaaaagattacttttaagtgactgaaataactactaatcctgactaatttattatcaagagttaattggtattccaaattcattgagcagggtgctaaaaacaacccaaatgtgctcctttaactcctttgtttaaatgacaaaagttagaatgtggtcactcagacctaactgtgcccttagagccaaagctgtggtgtcattattggttatttctagttgattcatagtttgtcccaatccaggttcaatcgggttatttttaagatctgtacaatattgcataatagtaacccagttaacttaccacttaggttagatttcctggaggaacaaaggtagaaattcaaccataggtcaaattatcacatagaaggaaaaggctttttttcaaagaaaaaattttttgaacactttactcccagtatgcattacttttgtagtagtaatgcttaagactgttttaaagaaaaattgctttctgtttaattaatgtttactgttattaatgctagtgatacttaatcttgaagcatcaagttttcagaaacctatagtgatcaataatgggtctcagatgagaggatgattatttttttcatggaatttcagtccaacatcctggtgtactggtccctctgggatgaatttataaggctcatgatataggaaaaggaatatagggctaaaaatagttttatttctgatataaattctggtacttgacaccaaagtttgaagtcaagtcatgccaataaattttaacatccaaatgaaatagatgattttctatgaagatgaaaaataccaaaattgactcaagaagggagagaaaatggaagatgttgaaaaatagcataggaattcagaactgggctctagaatcagatttcctgagagttgaattctagatctgccatttattagctgtgggattttgggcaaatttcttgactttctgtgcttcagttttcttagctgtaaaattggaagagttgttatgaaaattcactgaaagtatatttgtatacatcataggatagtgtaagaatatagtatggctttgagaaatgttcattattattactcccagaggagttttaggtattaagtgatgccaaatataatttgttaattgtataataaaaatctatattcttactgac

SEQ ID NO: 113256 - DNA, 1995 bp, Artificial Sequence
  derived and/or modified sequence
atggacagcaaccaccagagcaactacaagctgagcaagaccgagaaaaaattccttaggaaacaaatcaaggccaaacacaccctgttgcgccacgagggcatcgagactgtatcctatgcgacgcagtccttggtggtagcaaatggcggtctgggcaacggagtctccagaaaccaactgttacccgtactggaaaaatgtggcctcgtggacgcgcttcttatgcctccaaacaagccatattcttttgctcgctaccgaacaaccgaagagagtaagcgcgcatatgtgacgctcaatggtaaagaagtagtcgacgatctggggcaaaagatcacactctacctgaactttgtcgagaaagtccaatggaaagagctcagacctcaggcactgccacccggcctgatggtggtggaagaaataatcagcagtgaagaagaaaaaatgttgctagagtctgtagattggaccgaggataccgacaatcagaactcccagaagagtctgaagcacaggcgcgtgaagcatttcggttacgagttccactacgaaaataacaacgtcgacaaggataaacctctgtctggcggcctgccagatatctgtgaatccttcctcgagaaatggctgcgtaaaggctacattaagcataaaccggaccagatgacgatcaaccaatacgagccgggtcaaggaattcctgcccacatcgacacgcattccgctttcgaagacgagattgttagcctgtccctgggaagcgagattgtgatggacttcaagcaccctgacggaatagctgttcccgtgatgctcccacgccggtccttgctggttatgacaggagaatctcggtatctctggacccatggcattacttgtcggaagttcgatactgtacaggcctcagaatccctgaaatccggaatcatcaccagtgacgtgggagacttgaccttgtctaaacgggggcttcgcacctcctttacattcagaaaagtgcgccagacgccatgtaattgctcgtatcctctcgtgtgcgatagtcagagaaaggagactccacccagttttccagaatcagacaaagaagccagtcggctggagcaagagtacgttcatcaggtgtatgaggaaatcgccggccatttctcgagcactaggcacactccctggccccacatcgtcgagtttctcaaggcattgccatccggatccatagtggccgatatcggctgtgggaatgggaagtacctgggtatcaataaagagctctatatgattggctgtgaccggagtcaaaacctagtggacatctgcagagagcgtcagtttcaggcattcgtttgtgacgccctggcagtgcccgtgaggtccgggagctgtgacgcttgcatttctattgcggtaatccaccacttcgcaacagctgagagacgcgttgcagccctccaagagattgtgagacttctcaggccaggcggtaaagctctcatctacgtctgggcgatggagcaggagtataataagcagaagtccaagtacttgagaggcaatcgaaattcccagggcaagaaagaagagatgaactccgacacaagtgtccagcggtcgctagtcgagcagatgcgagacatgggcagcagagacagcgccagttccgtgccacggatcaatgacagtcaggagggtgggtgtaattctagacaggtttccaactctaagcttcccgtgcacgtcaaccggacatctttttattcccaggacgttctggtcccatggcacctgaagggcaaccctgacaaaggtaaaccggtggaacccttcgggccgatcggcagccaggacccctccccagtgttccaccggtactaccatgtttttagagaaggagaacttgagggcgcgtgccggaccgtgtccgatgtgagaatcctgcagtcatactacgatcagggaaattggtgcgttatcctgcagaaagcctag

SEQ ID NO: 113257 - DNA, 2004 bp, Artificial Sequence
  derived and/or modified sequence
atgttcgccatggacagcaaccaccagagcaactacaagctgagcaagacagaaaaaaagtttctcaggaagcagataaaagcgaaacacaccttactcaggcatgagggtattgaaacagtaagttacgctacgcaaagtctggtcgttgctaacggaggcctcggcaatggcgtgagccgcaaccagctactccccgtgttggagaagtgcggactcgtggacgcgctgctgatgccccccaacaagccatacagtttcgcacgctacaggaccaccgaggagtccaagagagcctatgtgactctgaacgggaaagaggtcgtggatgatctaggacagaaaattacgttgtacttgaatttcgtggaaaaagtgcagtggaaagaacttcggcctcaggcactccctccagggctaatggtggtggaggagataatctctagcgaagaggagaaaatgttgctggaaagcgtcgactggaccgaagacacggataaccagaactctcagaaatccctaaaacaccggcgcgtgaagcacttcggctacgagtttcactatgaaaataacaatgttgataaagacaagcccctcagcgggggcctccccgacatctgtgaaagcttcttggaaaagtggctgcgaaagggctacattaagcacaaacctgaccagatgacaattaaccagtacgagcccggtcaaggcattcccgcacatatagacactcacagtgccttcgaggatgagatcgtgagccttagtctgggaagcgagatcgtaatggacttcaagcatcccgacgggatcgcagtgcctgtgatgttgcctagacgctccttacttgtgatgacaggggagtcaaggtatttatggacccacggaatcacttgtcggaaatttgacactgtacaggcctcggagagtctgaaaagtggaattattacaagtgacgttggtgatctgacactatccaagcggggattgaggacatcttttaccttccggaaggtgcggcagactccatgcaactgtagctatccacttgtctgtgattctcaaagaaaggagacacccccaagcttcccagaatccgacaaggaggcctccaggctcgagcaagaatacgtgcaccaggtgtacgaggagattgccggacattttagttccacacgccacacgccctggccccacatagtggagtttctcaaggccctcccctccgggagcattgtcgccgacatcggctgcggaaatggcaaatacctcggtatcaataaggagctctacatgatcggatgcgacaggagccagaatcttgtcgatatctgtagggaaaggcagtttcaggcttttgtctgtgatgccctggccgtcccagtccgatctgggtcttgcgacgcctgtatctctatcgctgtgattcatcactttgctactgccgagcggagagttgccgccctccaggagattgttcgtctgcttcggcctggcggaaaggcattgatatacgtttgggccatggagcaggagtacaataaacaaaaatccaagtatctccgcgggaaccggaacagccagggcaaaaaggaggagatgaatagtgacacctcagtgcaacgcagcctggtggagcagatgagagatatgggatcccgagatagtgcgtctagcgtcccaagaatcaacgacagccaggaaggtggttgcaattctagacaggtgtccaacagcaaactgccagtgcacgtcaacagaaccagcttttactctcaagacgttctggtcccctggcacctgaagggcaatccggataaaggtaagcctgtggaacctttcgggccaatcggttctcaggacccttctccagtattccatcggtactaccatgtgttccgggaaggggagttagaaggcgcctgtagaacagtctctgatgtgcggatcctgcagtcttactatgatcagggtaattggtgtgtcatcttacagaaggcatag

SEQ ID NO: 113258 - DNA, 1995 bp, Artificial Sequence
  derived and/or modified sequence
atggacagcaaccaccagagcaactacaagctgagcaagaccgagaagaagttcctgcgcaagcaaatcaaggcaaagcatactctgcttcgacacgaaggcatcgaaaccgtgtcctacgccacccagtctttggtcgtagctaatggaggcctcggaaatggagtgtccagaaatcagctcctgcctgtgctggaaaagtgcgggctagtcgacgcactcctcatgccccctaataaaccatattcttttgccagataccgtacgaccgaagaaagtaaaagagcctacgtcactcttaacgggaaggaggttgttgacgacctagggcagaaaataactctctatttgaatttcgtggaaaaagttcagtggaaagagctccgaccacaggctcttccacccggcctgatggttgtcgaggaaattatttcctcagaggaggagaagatgcttctcgagagcgtggactggacagaggacaccgataatcagaattcccagaagtccttgaagcataggcgggtgaagcactttgggtacgagttccattatgagaataataacgtggataaggataaacctttgtctggagggctcccagacatctgtgagagcttcctggagaaatggttgcgtaagggctacataaagcacaaaccagaccagatgacaataaatcagtacgagcctggacagggtatccctgctcacatcgacacacattctgcctttgaagatgaaatagtcagcctcagtctgggttctgagattgtcatggattttaaacacccagacggcattgccgttccggtgatgctccctcgtagatcactcctagtcatgacaggggagtctcggtacctttggacccacggaatcacttgtcgaaagttcgacacggtacaagcaagcgaatctctcaagtcaggaatcataacctctgatgtcggcgacctgacgctctcaaaacgggggctgcgaaccagcttcaccttcaggaaggtccggcagaccccctgcaattgctcctaccctctggtatgcgacagtcagagaaaagagactcctccttcctttcctgagtctgataaagaagcctcacggttggaacaggaatacgttcatcaggtgtacgaggagatcgcgggccatttttcgagtacacgccacactccctggccccatatagttgagttcttgaaagcactgccctcagggtcaattgttgcagacatcggatgcgggaacggtaagtatctgggcatcaataaagaactgtatatgattggatgtgacaggagtcagaacctcgttgatatttgtcgcgagcgacagttccaagcctttgtctgtgatgctctggccgtgccagtccgctcaggatcctgtgatgcatgcatctccattgccgtgattcaccatttcgctactgccgaacgcagagtggccgcgcttcaggagatcgtccgactgctgcgtcctggaggcaaggctctgatctacgtttgggctatggagcaggagtataacaaacagaaatctaaatacctgcgaggtaaccgcaacagccaggggaaaaaagaggagatgaactccgacactagtgtgcagagaagcctcgtcgaacaaatgagggacatggggagtcgtgacagtgccagctctgtgccgcgcattaatgattcacaggaggggggctgtaacagcaggcaggtgagtaactccaaattgcctgtccacgtgaatcgaacgagtttttacagccaggatgtcctcgtcccttggcatctgaaggggaacccagataaagggaaaccagtcgagcccttcgggcccattgggtcacaagaccccagccctgtctttcacagatactatcatgtgtttcgggaaggtgaactggagggtgcctgccgaacggtgtctgatgtcaggatcctgcagtcctattatgaccaaggcaactggtgcgtgatcctgcagaaggcatag

SEQ ID NO: 113259 - DNA, 1995 bp, Artificial Sequence
  derived and/or modified sequence
atggatagcaatcatcagagcaattataagctgtcgaaaacggaaaagaagttcctgagaaagcagatcaaggccaagcacaccctgctgagacacgaggggattgaaacagtgtcttatgcgactcagagcttagtggtggctaacggtggcttaggcaatggggtgagcaggaatcagctgctgcccgtgctcgagaaatgcggcctcgtggatgcactcttgatgccacccaataaaccttactctttcgcacggtaccgaacaactgaagaatcaaaacgcgcatacgtcacactgaatggcaaagaggtcgttgatgatttgggacagaagataactttgtacctgaattttgtggaaaaagtgcagtggaaagagttacgaccacaggcactgccgccaggtctgatggtggtggaggagatcatctcatccgaggaagagaaaatgctcctcgaatccgtggattggacagaagatactgataaccagaacagccagaagagcctgaagcaccgcagggtgaaacattttggctatgagtttcattatgagaataataacgtggataaagacaagccactttccggaggcctgcctgacatctgtgaatcatttctggagaagtggctgcgcaaaggttatattaaacacaagcctgatcagatgaccattaatcagtacgagcctggccagggcatccctgctcatatagatacacacagtgcattcgaggacgagattgtgagcctgtcactgggatccgaaattgtcatggatttcaaacatcccgatggcattgctgttcctgtcatgctccccagacggtctctactggttatgacaggcgagagtcggtatctgtggacgcacggaatcacttgtcgaaagttcgatacagtacaagccagcgagagcttgaagtcaggcataattacaagcgacgttggcgacctcacactgtccaaaaggggactgagaacctcatttaccttccggaaagtaagacagactccttgcaactgctcttatccactggtctgtgattcccagcggaaggaaacaccacctagtttccctgagtccgataaagaggctagccggctcgagcaggagtatgtccatcaggtgtatgaagagatcgcgggtcatttttcctctacacgtcatacaccatggcctcatattgtggagttcctcaaggcactcccgtccggatctatagtggcagatataggttgcggcaatggcaagtacctgggcatcaataaggaactgtacatgattggttgtgacagatcccagaacctggtggacatttgtagagagaggcagttccaagccttcgtctgtgatgcattggctgtcccagtgcgcagcggttcctgtgacgcatgcatctcgatcgcggtgatccatcacttcgccacggctgaacgccgagttgcggctttgcaagagattgtaagactactgcgtcccggaggcaaggctctgatctacgtgtgggcaatggaacaggaatataacaaacagaagtccaaatacctccgaggaaatcgaaacagccaaggtaagaaagaagaaatgaacagcgacacctctgtgcaaagatccctcgtagagcaaatgagagatatgggtagtcgggactccgctagctccgtccctcggatcaatgactctcaggaggggggatgcaacagtcgacaggtcagcaactcaaaactgcccgtgcatgtgaatcggacttccttttatagtcaggatgttctggtcccttggcacctcaaggggaacccagacaagggaaagcccgttgagccattcggtcccattggatcccaagatcctagcccggttttccaccggtattatcatgtcttccgggagggtgaactggagggagcttgtagaaccgtctccgatgtccgtatcctgcagagttattacgaccaggggaactggtgtgtgatcctgcaaaaggcttag

SEQ ID NO: 113260 - DNA, 2004 bp, Artificial Sequence
  derived and/or modified sequence
atgtttgccatggattccaaccatcagagcaactacaagctaagcaagacagaaaaaaagtttctgaggaagcagattaaagccaagcacacattgctaaggcacgaagggatcgagaccgtctcctatgcgacgcaatccctcgttgtcgctaacggcggactcggtaatggagtttcgcgcaaccaactgctacccgttctggagaagtgcggcttggtagacgcgctgctaatgccaccgaacaagccctactccttcgcacggtaccgaacaaccgaggaaagcaagcgagcatacgtcactctgaatggcaaagaggtggtggatgacttaggacagaaaatcacactgtatctgaactttgtcgagaaggttcagtggaaagaacttcgtccccaggcgctccctcctggactcatggtggttgaggagatcatttcctcagaagaagaaaagatgctgctggaatctgtggattggacggaagacaccgacaaccagaatagccagaagtcgttgaaacaccgcagagtcaaacatttcggttacgaattccactatgagaataataatgtcgataaggacaagccactctctgggggtcttccagacatatgcgagtcctttctggagaagtggctcaggaagggatacattaagcacaagcccgaccagatgactatcaatcaatacgaacctgggcaagggatccccgctcacattgatactcattcagcattcgaggacgagattgtatctctctctctcgggtccgaaattgtgatggattttaagcacccagacggaatcgccgttccagtgatgttgccacggagaagcttgctggttatgacaggagagtctcggtacctgtggacccacggtatcacctgccggaagttcgacaccgtgcaggcctcggagtctttaaagtcaggaatcatcacaagtgacgtaggggacctcaccctttccaaacgcggactccggacaagtttcacctttaggaaagtccgacagaccccttgtaattgcagctatcccctggtgtgtgactcacagagaaaagagactcctcccagttttcctgaatccgataaggaggcctctcggctggaacaggagtacgtgcaccaggtgtacgaagaaatcgcaggtcatttcagcagcacacggcacacaccttggcctcacattgtcgaatttctgaaggcgctcccttcaggctcaatcgtcgcagacattggatgcgggaacggcaagtacctgggcataaataaagaattgtacatgattggctgtgatcggagtcaaaatctggtggacatttgcagagagaggcagttccaagctttcgtgtgcgacgctctcgcggtccctgtgagatccggctcgtgtgacgcatgcatttccattgccgtgattcatcactttgcaacggccgaacggagggtggcggctctgcaggagatcgttcgcctcctgagaccaggcggaaaagccctgatttatgtgtgggccatggagcaggagtacaacaaacaaaagtcaaagtatctgagaggtaaccgaaattctcagggaaagaaggaggaaatgaattccgacactagcgtgcagcgctctctcgtggagcagatgcgggacatgggatcaagggattcagcctccagcgttccaaggatcaatgacagccaggaagggggttgcaattcccggcaggtgtctaattcaaaacttcccgttcatgttaaccgcaccagcttctatagccaggacgtgcttgtgccctggcacctgaaagggaatcccgataagggaaaaccggtcgaacccttcggcccaataggctctcaagacccctcgcccgtgtttcataggtattaccacgtgttccgagagggtgaattagagggggcttgccgcaccgtgtcagacgttagaatactgcaatcgtactacgatcagggcaactggtgcgtcatacttcagaaggcatag

SEQ ID NO: 113261 - DNA, 1995 bp, Artificial Sequence
  derived and/or modified sequence
atggactctaatcatcaaagtaactacaagctgagcaaaacagaaaagaagttcctaagaaaacagatcaaggccaagcataccctcttgcgtcatgagggtatcgagaccgtctcatacgctactcaaagcctggtggtcgccaacgggggactgggcaacggcgtttcacgtaatcaactgctaccagttctggaaaaatgcggcctcgttgacgctttgctgatgccacctaacaaaccctattccttcgctagatatcgtacaacagaggagtccaaacgggcttatgtcacgctgaatggtaaagaagtggttgatgatctgggtcagaaaattactctgtacctgaattttgtcgaaaaagtccagtggaaggaactcagacctcaggcccttccccctggactgatggttgtggaagaaattatcagctccgaagaggaaaaaatgctgctggaatcagtagactggaccgaggatacagataaccagaactcgcagaagtcactgaagcaccgcagagtaaaacacttcgggtacgaatttcactatgaaaacaataacgtagacaaagacaaaccgttgagcggtggactgccagatatttgcgagtcttttctggaaaagtggctgcggaaggggtatattaaacacaagccggaccagatgacaattaaccagtatgagccagggcagggcattcccgctcatatcgatacccatagcgctttcgaagacgaaatagtttccctgtctcttgggagcgagattgtcatggactttaaacatccagacggtattgcagtcccagtaatgctgccaagacgctcactgctcgttatgactggggagagtagatacctgtggactcatggtatcacatgcaggaaattcgacacagtgcaggcgtccgagtcactgaaatccgggatcattaccagcgatgtcggtgatcttaccctgagtaagcgaggactgcggacctctttcacttttcgaaaagtgagacagaccccgtgcaattgttcgtaccctctcgtctgcgattcccagcgaaaggaaacccctccctcatttcctgaaagcgacaaggaggcgagtaggttggagcaagaatacgtccaccaggtgtatgaggagatagcaggtcacttttctagcacccggcacacgccctggcctcacattgttgaattcctgaaagccctgccatctgggagtatcgtggccgatattggctgtggcaatggcaaatacctgggtatcaataaggaactgtacatgatcggctgcgatcgcagccaaaatctggtggatatttgtagggaaaggcagtttcaggcttttgtgtgcgatgctctggcagtgcctgtcaggtccggatcttgcgatgcttgtatttcgatcgctgtgattcaccattttgctacagctgagcggagggtagcagctctgcaagaaatcgttaggctactccggcctgggggaaaggcactgatttacgtatgggctatggagcaagagtataataaacaaaaaagcaaatacctccggggtaatcgcaactctcagggcaaaaaagaggagatgaattcagacaccagtgtgcaacggagcctggtggaacaaatgagggacatggggagccgggattcagcttcttccgtccctagaatcaacgactctcaggagggaggctgtaatagtagacaggtatcaaactccaaactacctgtacatgttaatagaacgtcattctattcccaggatgtgttggtcccttggcaccttaaaggcaatcccgacaaaggaaaaccagtcgaacctttcggccctatcggctcacaggatccaagtcctgtcttccataggtattaccacgtctttcgggaaggcgagctggagggcgcttgtaggaccgttagtgatgtgagaattctgcagagctactacgaccagggtaactggtgtgtgattctccaaaaggcctag

SEQ ID NO: 113262 - DNA, 1995 bp, Artificial Sequence
  derived and/or modified sequence
atggacagcaaccaccagagcaactacaagctgagcaagaccgagaagaagttcctgagaaagcagatcaaggccaagcacaccctgctgagacacgagggcatcgagaccgtgagctacgccacccagagcctggtggtggccaacggcggcctgggcaacggcgtgagcagaaaccagctgctgcccgtgctggagaagtgcggcctggtggacgccctgctgatgccccccaacaagccctacagcttcgccagatacagaaccaccgaggagagcaagagagcctacgtgaccctgaacggcaaggaggtggtggacgacctgggccagaagatcaccctgtacctgaacttcgtggagaaggtgcagtggaaggagctgagaccccaggccctgccccccggcctgatggtggtggaggagatcatcagcagcgaggaggagaagatgctgctggagagcgtggactggaccgaggacaccgacaaccagaacagccagaagagcctgaagcacagaagagtgaagcacttcggctacgagttccactacgagaacaacaacgtggacaaggacaagcccctgagcggcggcctgcccgacatctgcgagagcttcctggagaagtggctgagaaagggctacatcaagcacaagcccgaccagatgaccatcaaccagtacgagcccggccagggcatccccgcccacatcgacacccacagcgccttcgaggacgagatcgtgagcctgagcctgggcagcgagatcgtgatggacttcaagcaccccgacggcatcgccgtgcccgtgatgctgcccagaagaagcctgctggtgatgaccggcgagagcagatacctgtggacccacggcatcacctgcagaaagttcgacaccgtgcaggccagcgagagcctgaagagcggcatcatcaccagcgacgtgggcgacctgaccctgagcaagagaggcctgagaaccagcttcaccttcagaaaggtgagacagaccccctgcaactgcagctaccccctggtgtgcgacagccagagaaaggagaccccccccagcttccccgagagcgacaaggaggccagcagactggagcaggagtacgtgcaccaggtgtacgaggagatcgccggccacttcagcagcaccagacacaccccctggccccacatcgtggagttcctgaaggccctgcccagcggcagcatcgtggccgacatcggctgcggcaacggcaagtacctgggcatcaacaaggagctgtacatgatcggctgcgacagaagccagaacctggtggacatctgcagagagagacagttccaggccttcgtgtgcgacgccctggccgtgcccgtgagaagcggcagctgcgacgcctgcatcagcatcgccgtgatccaccacttcgccaccgccgagagaagagtggccgccctgcaggagatcgtgagactgctgagacccggcggcaaggccctgatctacgtgtgggccatggagcaggagtacaacaagcagaagagcaagtacctgagaggcaacagaaacagccagggcaagaaggaggagatgaacagcgacaccagcgtgcagagaagcctggtggagcagatgagagacatgggcagcagagacagcgccagcagcgtgcccagaatcaacgacagccaggagggcggctgcaacagcagacaggtgagcaacagcaagctgcccgtgcacgtgaacagaaccagcttctacagccaggacgtgctggtgccctggcacctgaagggcaaccccgacaagggcaagcccgtggagcccttcggccccatcggcagccaggaccccagccccgtgttccacagatactaccacgtgttcagagagggcgagctggagggcgcctgcagaaccgtgagcgacgtgagaatcctgcagagctactacgaccagggcaactggtgcgtgatcctgcagaaggcctag

SEQ ID NO: 113263 - DNA, 2004 bp, Artificial Sequence
  derived and/or modified sequence
atgttcgccatggacagcaaccaccagagcaactacaagctgagcaagaccgagaagaagttcctgagaaagcagatcaaggccaagcacaccctgctgagacacgagggcatcgagaccgtgagctacgccacccagagcctggtggtggccaacggcggcctgggcaacggcgtgagcagaaaccagctgctgcccgtgctggagaagtgcggcctggtggacgccctgctgatgccccccaacaagccctacagcttcgccagatacagaaccaccgaggagagcaagagagcctacgtgaccctgaacggcaaggaggtggtggacgacctgggccagaagatcaccctgtacctgaacttcgtggagaaggtgcagtggaaggagctgagaccccaggccctgccccccggcctgatggtggtggaggagatcatcagcagcgaggaggagaagatgctgctggagagcgtggactggaccgaggacaccgacaaccagaacagccagaagagcctgaagcacagaagagtgaagcacttcggctacgagttccactacgagaacaacaacgtggacaaggacaagcccctgagcggcggcctgcccgacatctgcgagagcttcctggagaagtggctgagaaagggctacatcaagcacaagcccgaccagatgaccatcaaccagtacgagcccggccagggcatccccgcccacatcgacacccacagcgccttcgaggacgagatcgtgagcctgagcctgggcagcgagatcgtgatggacttcaagcaccccgacggcatcgccgtgcccgtgatgctgcccagaagaagcctgctggtgatgaccggcgagagcagatacctgtggacccacggcatcacctgcagaaagttcgacaccgtgcaggccagcgagagcctgaagagcggcatcatcaccagcgacgtgggcgacctgaccctgagcaagagaggcctgagaaccagcttcaccttcagaaaggtgagacagaccccctgcaactgcagctaccccctggtgtgcgacagccagagaaaggagaccccccccagcttccccgagagcgacaaggaggccagcagactggagcaggagtacgtgcaccaggtgtacgaggagatcgccggccacttcagcagcaccagacacaccccctggccccacatcgtggagttcctgaaggccctgcccagcggcagcatcgtggccgacatcggctgcggcaacggcaagtacctgggcatcaacaaggagctgtacatgatcggctgcgacagaagccagaacctggtggacatctgcagagagagacagttccaggccttcgtgtgcgacgccctggccgtgcccgtgagaagcggcagctgcgacgcctgcatcagcatcgccgtgatccaccacttcgccaccgccgagagaagagtggccgccctgcaggagatcgtgagactgctgagacccggcggcaaggccctgatctacgtgtgggccatggagcaggagtacaacaagcagaagagcaagtacctgagaggcaacagaaacagccagggcaagaaggaggagatgaacagcgacaccagcgtgcagagaagcctggtggagcagatgagagacatgggcagcagagacagcgccagcagcgtgcccagaatcaacgacagccaggagggcggctgcaacagcagacaggtgagcaacagcaagctgcccgtgcacgtgaacagaaccagcttctacagccaggacgtgctggtgccctggcacctgaagggcaaccccgacaagggcaagcccgtggagcccttcggccccatcggcagccaggaccccagccccgtgttccacagatactaccacgtgttcagagagggcgagctggagggcgcctgcagaaccgtgagcgacgtgagaatcctgcagagctactacgaccagggcaactggtgcgtgatcctgcagaaggcctag

SEQ ID NO: 113264 - protein, 227 aa, Artificial Sequence
  derived and/or modified sequence
MVKSSLQRILNSHCFAREKEGDKPSATIHASRTMPLLSLHSRGGSSSESSRVSLHCCSNPGPGPRWCDAPHPPLKIPGGRGNSQRDHNLSANLFYSDDRLNVTEELTSNDKTRILNVQSRLTDAKRINWRTVLSGGSLYIEIPGGALPEGSKDSFAVLLEFAEEQLRADHVFICFHKNREDRAALLRTFSFLGFEIVRPGHPLVPKRPDACFMAYTFERESSGEEEE

SEQ ID NO: 113265 - DNA, 372 bp, Artificial Sequence
  derived and/or modified sequence
atgtgtggccaatgccaatcctcttcagggcatatggaagaagaggctcatcccgaattatgtcctcactggcccttacagttcagtccccagtcccattgcagacaggcctacggcagagatacccatgcgggggggcctggcgcacgcgtggattcaggacaccatctgggactgtttcccggattgttgagcacttgtcctgatgggttgtgcgtctttccagtcccttccccaacatttagcaccagtttgcacgtgctgatggagtgtaaagtgcatcagcctgggccactgccaggacgcggctcagctgacgccgggctgaggggccttccacaaggaaggacactctgtgtgctgactgcctag

SEQ ID NO: 113266 - protein, 981 aa, Artificial Sequence
  derived and/or modified sequence
MPAELLLLLIVAFASPSCQVLSSLRMAAILDDQTVCGRGERLALALAREQINGIIEVPAKARVEVDIFELQRDSQYETTDTMCQILPKGVVSVLGPSSSPASASTVSHICGEKEIPHIKVGPEETPRLQYLRFASVSLYPSNEDVSLAVSRILKSFNYPSASLICAKAECLLRLEELVRGFLISKETLSVRMLDDSRDPTPLLKEIRDDKVSTIIIDANASISHLILRKASELGMTSAFYKYILTTMDFPILHLDGIVEDSSNILGFSMFNTSHPFYPEFVRSLNMSWRENCEASTYLGPALSAALMFDAVHVVVSAVRELNRSQEIGVKPLACTSANIWPHGTSLMNYLRMVEYDGLTGRVEFNSKGQRTNYTLRILEKSRQGHREIGVWYSNRTLAMNATTLDINLSQTLANKTLVVTTILENPYVMRRPNFQALSGNERFEGFCVDMLRELAELLRFRYRLRLVEDGLYGAPEPNGSWTGMVGELINRKADLAVAAFTITAEREKVIDFSKPFMTLGISILYRVHMGRKPGYFSFLDPFSPAVWLFMLLAYLAVSCVLFLAARLSPYEWYNPHPCLRARPHILENQYTLGNSLWFPVGGFMQQGSEIMPRALSTRCVSGVWWAFTLIIISSYTANLAAFLTVQRMEVPVESADDLADQTNIEYGTIHAGSTMTFFQNSRYQTYQRMWNYMQSKQPSVFVKSTEEGIARVLNSRYAFLLESTMNEYHRRLNCNLTQIGGLLDTKGYGIGMPLGSPFRDEITLAILQLQENNRLEILKRKWWEGGRCPKEEDHRAKGLGMENIGGIFIVLICGLIIAVFVAVMEFIWSTRRSAESEETPALHPAACQCSALGPRTPLKEPSMLLVKVPSTRVQVAFSRTSLRQVCPFLLQHQLSSLYWIQATNVQICCHFSSLKPSPDLTFPPSHRPLSSLLFTALAAVGGLPDASSFFFPPISSCPPLQSGIGPCHSTEATLVTSNFHV

SEQ ID NO: 113267 - protein, 358 aa, Artificial Sequence
  derived and/or modified sequence
  misc_feature (1)..(1): Xaa can be any naturally occurring amino acid
XWAFTLIIISSYTANLAAFLTVQRMEVPVESADDLADQTNIEYGTIHAGSTMTFFQNSRYQTYQRMWNYMQSKQPSVFVKSTEEGIARVLNSRYAFLLESTMNEYHRRLNCNLTQIGGLLDTKGYGIGMPLGSPFRDEITLAILQLQENNRLEILKRKWWEGGRCPKEEDHRAKGLGMENIGGIFIVLICGLIIAVFVAVMEFIWSTRRSAESEETPALHPAACQCSALGPRTPLKEPSMLLVKVPSTRVQVAFSRTSLRQVCPFLLQHQLSSLYWIQATNVQICCHFSSLKPSPDLTFPPSHRPLSSLLFTALAAVGGLPDASSFFFPPISSCPPLQSGIGPCHSTEATLVTSNFHV

SEQ ID NO: 113268 - DNA, 2946 bp, Artificial Sequence
  derived and/or modified sequence
atgccagcggagctgctgctgcttttgatagtcgcgtttgcaagcccaagctgtcaagtactgagcagcctgcggatggccgccatactcgatgaccaaactgtctgtggcaggggagagagacttgctttagctctagctcgcgaacagataaatggcatcattgaggtgcctgccaaggcccgggtcgaggtcgacatttttgagctccagagagatagtcaatacgaaacaacagataccatgtgccagattctccctaagggagtcgtgagcgtgcttggtccgagcagttcccccgcctccgcctctaccgtgtctcacatctgcggggaaaaggagataccccacattaaggtgggacctgaggagactccaagattgcagtacctcagatttgcatccgtcagcctgtatccttcaaacgaggatgtgtcacttgccgtgtccagaattctgaagagcttcaattatccctccgcctctctgatttgcgccaaagcagaatgcctgcttaggctggaagaactggttagaggtttcctgattagtaaggaaaccctctccgtgaggatgttggacgattcccgggatcctactccccttcttaaggaaattagggatgataaggtgtctactatcatcatagacgccaatgcaagcatctctcacctcattcttagaaaggccagtgagcttgggatgactagcgcattttataagtatattctgacaacgatggactttccaatcctccatctcgatggcatcgtcgaagattcgagtaacatcctaggtttttccatgtttaacacctcccaccctttctaccctgagttcgttcgctccctgaacatgtcctggcgggagaactgtgaagcctccacgtatctcggccctgcactgtctgctgcgctgatgtttgatgcggtgcacgtggtggtatccgctgttcgggagctgaaccggtcacaggagataggcgtgaagcccctagcctgcacctccgccaatatctggcctcacggaaccagtctcatgaattatctgcggatggtggagtacgacggcctaaccggtagggtcgagtttaattcaaagggccagagaacgaattacactcttcgcatacttgaaaagtctcggcagggccatagagagattggggtctggtatagcaacagaacactggctatgaatgccaccacgcttgacatcaatctgagtcagacgctggcaaacaagaccctcgtggtgacaaccatccttgagaacccctacgtaatgcgccgccctaatttccaggcgctgtccggaaatgagcgctttgaaggcttttgtgtcgacatgttgcgagagctcgccgaactcctgaggttccgttaccgattacggcttgtggaggacggcctttacggcgccccagaacctaatgggtcttggaccggcatggtgggcgaattaattaaccggaaggccgatttggccgtggcggctttcacaataacagcagagagggaaaaagtgattgactttagcaagcctttcatgacacttgggataagcatcctgtaccgagttcacatgggaaggaagcccggatacttcagctttcttgacccattttctccagccgtttggctctttatgttgcttgcttacctcgccgtttcctgcgtcttgttccttgctgcgcgtctgtcaccctatgagtggtacaacccacacccctgtcttcgcgcccgcccacatatactggagaatcagtacactttaggaaacagcctctggtttcccgtgggcggcttcatgcagcaaggaagcgagattatgccacgtgccctgtctacacgctgcgtaagcggtgtgtggtgggcatttacgttgatcatcatttcaagctataccgccaacctggcagctttcctcacggttcagcggatggaagtgccggtcgagagcgccgatgatctggccgaccaaactaatattgaatacggcaccattcacgctgggagcactatgacatttttccagaacagccgttatcagacctaccagcgaatgtggaattatatgcagtcaaaacaacctagcgtgttcgtcaagtctaccgaggagggaatcgcccgcgtgcttaatagccggtacgcctttctactggagtcaacaatgaatgaataccatcggaggctcaattgcaaccttactcaaatcggcggcctgctcgatacgaaggggtacggtattggaatgcccctcggcagccctttccgagacgaaatcacgcttgccattctgcagcttcaggagaacaaccggctcgaaatattgaagagaaagtggtgggaaggtggaaggtgcccgaaggaagaagatcacagagctaagggtttggggatggagaacatcggcggcattttcatcgtgctaatatgcgggctgatcatcgctgtcttcgtggccgtcatggagtttatctggagcaccagaagatccgccgaatccgaggaaactccggccctccatcccgccgcctgccagtgctccgctctcggacctcggacccccttgaaggaacctagcatgcttctcgttaaggttccttctacacgggtgcaggtggcgtttagccgtacctcactgcgccaggtgtgccccttcctccttcagcaccaactgtccagtttgtattggatccaggcgacgaatgttcagatttgttgtcacttcagctccctgaaaccatctcctgaccttacatttcccccatcgcatcggcccctgtcctcactgctctttactgcactagcggccgtgggcgggctccctgacgcctcgtcgttcttcttcccacccatcagctcctgtccacctttgcaaagcggtatcggaccatgccatagcactgaagcaacccttgtcaccagcaatttccatgtgtag

SEQ ID NO: 113269 - DNA, 3305 bp, Artificial Sequence
  derived and/or modified sequence
cgcggcagctgcgtccccatgaggaggggaggaagatgccggctgagctgctgctgctgctgattgttgccttcgccagccccagctgccaggtgctctcatcactgcgcatggctgcaatcctggatgatcagacagtgtgtggccgcggtgagcgtctggccttggccttggcccgggagcagatcaacgggatcatcgaggtcccagccaaggcccgagtggaagtagacatctttgagctgcagcgggacagccagtacgagaccacggacaccatgtgtcagatcttacccaaaggggttgtgtctgtccttgggccctcctctagcccagcatctgcctccaccgtgagccatatctgtggagagaaggagatcccccacatcaaggtgggtcccgaggagacaccccgccttcagtaccttcgcttcgcgtctgtcagcctgtaccccagtaacgaggacgtcagcttggcggtctcccgaatcctcaagtccttcaactacccctcggccagcctcatctgcgccaaggctgagtgcctgctgcgattggaggaactggtgcgtggcttcctcatctccaaggagacgctgtcagtgaggatgttggacgacagccgggaccccacaccactgctcaaggagatccgtgatgacaaggtgtccaccatcatcatcgacgccaacgcctccatctcccacctcatcctccgtaaggcctcggaactgggaatgacctcagcgttttacaagtacatcctcaccaccatggacttccccatcctgcatctggacggtattgtggaggactcctccaacatcctgggcttctccatgttcaacacgtcccaccccttctaccctgagtttgtccgcagcctcaacatgtcctggagggagaactgtgaagccagcacctacctgggccctgcgctgtcagccgccctgatgtttgacgccgtgcacgtggtggtgagcgctgtccgagagctgaaccgcagccaggagatcggtgtgaagcctctggcctgtacatcggccaacatttggccccacgggaccagcctcatgaactacctgcgcatggtagagtatgatgggctgaccgggcgggtcgagttcaacagcaaagggcagagaaccaactacaccctgcgcatcctagaaaagtcccggcagggccaccgtgagattggggtgtggtactctaaccgcaccctggccatgaatgccaccaccctggacatcaacctgtcgcagacactggccaacaagaccctggtggtcacaaccatcctggagaacccatacgtcatgcgccggcccaacttccaggccctgtcggggaacgaacgcttcgagggcttctgcgtggacatgctgcgggagctggccgagctgctgcgcttccgctaccgcctgcggttggtggaggatgggctgtacggggcgcccgagcccaacggctcctggacgggcatggttggcgagctcatcaaccggaaggcagacctggctgtggccgccttcaccatcacagctgagcgggagaaggtcatcgacttttccaagccctttatgaccctggggatcagcatcctctaccgagtgcacatgggccgcaagcctggctacttctccttcctggaccccttctcccctgctgtgtggctcttcatgcttcttgcctacctggctgtcagctgcgtcctgtttctggctgccaggctgagcccctatgagtggtataacccacacccatgcctgcgggcacgcccccacatcctggagaaccagtacacgctgggcaacagcctgtggtttcccgtggggggcttcatgcagcagggctcggagatcatgccccgggcgctgtccacgcgctgtgtcagcggagtctggtgggccttcaccttgatcatcatctcctcctacacggccaacctggccgccttcctcaccgtgcagcgcatggaggtgcctgtggagtcggccgatgacctggcagatcagaccaacatcgagtatggcaccatccacgccggctccaccatgaccttcttccagaattcacggtaccaaacgtaccagcgcatgtggaactacatgcagtcgaagcagcccagcgtgttcgtcaagagcacagaagagggcattgcccgcgtcctcaactcccgctacgccttcctgctcgagtccaccatgaacgaataccaccggcgcctcaactgcaacctcacccagatcgggggactcctcgacaccaagggctacggcattggcatgccgctgggctccccgttccgggatgagatcacactggccatcctgcagcttcaggagaacaaccggctggagatcctgaagcgcaagtggtgggaggggggccggtgccccaaggaggaggaccatcgagctaaaggtttgggcatggagaacattggtggcatttttatcgtgctcatctgtggcctcatcattgctgtcttcgtggcggtcatggaattcatatggtccacacggaggtcagctgagtccgaggagaccccagctctgcatccagctgcctgccagtgttctgcacttggcccaaggactcctctgaaggagccgtccatgctgctagtaaaggtgccctccacccgtgtccaggttgccttctcaaggacatccctccggcaagtctgtcctttcctcctgcagcatcagttgtcctctctttattggattcaggccaccaacgtacaaatatgctgtcatttctccagtcttaaaccctctcctgacctcactttccctcccagccaccgcccactttcttcccttctctttacagccttggcagcagtggggggtctccctgatgcttccagtttcttctttcctcccatttcctcttgccccccactccagtctggcatcggtccctgccactccactgaagccactcttgtcaccagcaacttccatgtctgaaattcccggtctcaggcctcatgtatatgaggtagcagtgggcttcggcacagccagtcactctcaatcctcaaagccccttcttccccttctcccacttctccggtcactccttcccaggctccctcgttgggtttctctttctccccaggctctgtttgttgtggggctccagggctcagtccttagactgcttctcttctcggtctttctccactacttgaatgatcccaccagccaaatggctcttaagacccactatgtgctggtgattcttgtgttagttatctattgctatcataacaaatgaccttaacagctttt

SEQ ID NO: 113270 - DNA, 2946 bp, Artificial Sequence
  derived and/or modified sequence
atgcctgctgagctgctgctgctgctgattgtggcctttgccagccccagctgccaggtgctgagcagcctgaggatggccgccatcctggatgaccagacagtgtgtggccgcggggagcggctggccctggccctggcccgggagcagatcaatggcatcatcgaggtgcctgccaaggcccgggtggaggtggacatctttgagctgcagagggacagccagtatgagaccacagacaccatgtgccagatcctgcccaagggcgtggtgtctgtgctgggccccagcagcagccctgccagcgccagcacagtgagccacatctgtggggagaaggagatcccccacatcaaggtgggccctgaggagaccccccggctgcagtacctgcgctttgcctctgtgtccctgtaccccagcaatgaagatgtgtccctggccgtgagccgcatcctgaagagcttcaactaccccagcgccagcctcatctgtgccaaggcagaatgtctgctgcggctggaggagctggtgcggggcttcctgatcagcaaggagaccctgtctgtgaggatgctggatgacagccgggaccccacccccctgctgaaggagatcagagatgacaaggtgtccaccatcatcattgatgccaatgccagcatcagccacctgatcctgaggaaggccagcgagctgggcatgaccagcgccttctacaagtacatcctgaccaccatggacttccccatcctgcacctggatggcatcgtggaggacagcagcaacatcctgggcttctccatgttcaacaccagccaccccttctacccagagtttgtgcgcagcctgaacatgtcctggagggagaactgtgaggccagcacctacctgggccctgccctgtctgctgccctgatgtttgatgctgtgcacgtggtggtgtctgctgtgcgggagctgaacagaagccaggagattggagtgaagcccctggcctgcaccagcgccaacatctggccccacggcaccagcctgatgaactacctgaggatggtggagtatgatggcctgaccggccgggtggagttcaacagcaagggccagaggaccaactacaccctgcgcatcctggagaagagccggcagggccaccgggagattggagtgtggtacagcaacagaaccctggccatgaatgccaccaccctggacatcaacctgagccagaccctggccaacaagaccctggtggtgaccaccatcctggagaacccctacgtgatgaggcggcccaacttccaggccctgtctggaaatgaaagatttgagggcttctgtgtggacatgctgcgggagctggccgagctgctgcgcttccgctaccgcctgcggctggtggaggatggcctgtatggagcccctgagcccaacggctcctggacaggcatggtgggggagctgatcaacaggaaggctgacctggccgtggccgccttcaccatcacagctgagcgggagaaggtgattgacttcagcaagcccttcatgaccctgggcatcagcatcctgtacagagtgcacatgggcaggaagccaggctacttctccttcctggaccccttcagccctgctgtgtggctgttcatgctgctggcctacctggccgtgtcctgtgtgctcttcctggccgcccggctgagcccctatgagtggtacaacccccacccctgcctgcgggcccggccccacatcctggagaaccagtacaccctgggcaacagcctgtggttccctgtgggcggcttcatgcagcagggcagcgagatcatgccccgggccctgagcacccgctgtgtgtctggagtgtggtgggccttcaccctcatcatcatcagcagctacacagccaacctggccgccttcctgactgtgcagaggatggaggtgcctgtggagagcgcagatgacctggccgaccagaccaacatcgagtatggcaccatccatgctggcagcaccatgaccttcttccagaacagccgctaccagacctaccagaggatgtggaactacatgcagagcaagcagcccagcgtgtttgtgaagagcacagaggagggcatcgcccgggtgctgaacagccgctatgccttcctgctggagagcaccatgaatgagtaccaccggcggctgaactgcaacctgacccagattggaggcctgctggacaccaagggctacggcatcggcatgcccctgggcagccccttcagagatgagatcaccctggccatcctgcagctgcaggagaacaaccggctggagatcctgaagaggaagtggtgggagggcggccgctgccccaaggaggaggaccaccgggccaagggcctgggcatggagaacatcggcggcatcttcatcgtgctgatctgtggcctcatcatcgctgtgtttgtggccgtgatggagttcatctggagcaccaggagatctgctgagagcgaggagaccccagccctgcaccctgctgcctgccagtgcagcgccctgggccccaggacccccctgaaggagcccagcatgctgctggtgaaggtgcccagcaccagggtgcaggtggccttcagcaggaccagcctgcggcaggtgtgccccttcctgctgcagcaccagctgagcagcctgtactggatccaggccaccaacgtgcagatctgctgccacttcagcagcctgaagcccagcccagacctgaccttcccccccagccaccggcccctgagcagcctgctcttcaccgccctggccgctgtgggcggcctgcctgatgccagcagcttcttcttcccccccatcagcagctgcccccccctgcagagcggcatcggcccctgccacagcacagaggccaccctggtgaccagcaacttccacgtgtag

SEQ ID NO: 113271 - DNA, 2946 bp, Artificial Sequence
  derived and/or modified sequence
atgcccgccgagctgctgctgctgctgatcgtggccttcgccagccccagctgtcaagtgttgtcgtccctgcgcatggccgcaatcctggatgatcagactgtttgtggcaggggcgagcggctcgcacttgccctagcccgcgagcagattaacggcattatcgaggtccccgccaaagcccgcgtggaagtggacattttcgagttgcaacgagattctcagtacgagaccactgataccatgtgccagatactccccaagggagtggtgtccgttctgggcccctcctctagccccgcctccgctagcactgtctcacacatctgtggcgagaaggagattccacatataaaagttggcccagaagaaactcctcgcctccagtacctcagattcgccagcgttagcctgtacccatccaatgaggacgtgagcctggctgtgtcgaggatcctgaagagtttcaattatccttcagcctccctgatttgcgcaaaagccgaatgtctcttacgccttgaggagttggtgcgtggcttcctgatctccaaagagacactctcagttcggatgttggatgatagccgagatccgacacctcttctgaaggagattcgggatgataaggttagtactatcattatagatgccaacgctagcatttctcacttgatactccggaaggcttctgagttgggaatgacatcagcattttacaagtacatcctgactacgatggattttccaatcctccatcttgacggcattgtggaggatagtagtaacatcctcggcttttccatgttcaatacttctcaccctttttaccccgagttcgtccgcagcctcaatatgagttggcgggaaaattgcgaagcaagcacttacctgggacctgcacttagcgcagccctgatgttcgatgcggttcatgttgtagtctccgccgtccgagagttgaacaggtcgcaggagatcggggtgaaaccattggcctgcacctccgcaaatatatggccccacggaacgtccctcatgaattatctcagaatggttgagtatgatggactgacaggccgagtcgagttcaactctaaggggcagcgtacaaattatactctacgcatccttgaaaagtcaaggcagggccaccgggagatcggcgtgtggtattcaaataggactctagccatgaacgctacaacactggacataaacttgtcacagaccctcgccaataaaactctggtggtgactactattcttgagaacccttacgtgatgcgaagacccaattttcaggccttgagcgggaatgagcgatttgaggggttctgtgtggacatgctccgtgagctcgccgaactgctgagattcagatatcggctccgcttggtcgaggacggcttatatggggcccctgagcccaacggaagctggacagggatggtaggagagctcattaataggaaagcggatttggccgtggccgccttcactatcacagccgagagggagaaggttatagacttttccaagccatttatgactctggggatatccattttgtatagagtgcacatgggtagaaagcctgggtatttttctttcctggatcccttttcgcctgcagtttggctgttcatgcttctcgcttacctggccgtgtcatgcgtcctgtttctagcagctcggttgtcaccctacgagtggtataacccccacccctgcctccgcgccagaccccatatactggagaatcagtataccctgggtaattcactgtggttccccgtaggaggcttcatgcagcagggcagcgagatcatgcccagagcactttcaacaagatgtgtgagcggagtgtggtgggcctttacactgattatcatatccagttatacggcaaacctagccgccttcctgaccgtccagaggatggaggtccctgtagaaagcgctgatgaccttgctgatcagacgaacatagagtacggaactatccacgcgggctcaaccatgacatttttccagaattccaggtaccaaacataccagaggatgtggaattacatgcagtcaaagcaacctagcgtatttgtgaagtccaccgaagaggggatcgccagggttctgaacagtaggtatgccttcctgctcgagagcacaatgaatgaataccaccgccgtctgaattgcaacttgacccagattggcggcctgctggacaccaagggctatggcataggaatgccattaggctccccctttagagatgagattacactcgcaatcctgcagctgcaagagaacaaccgcttagagattctgaaaaggaaatggtgggaaggaggaaggtgccctaaggaggaggaccatagagctaaaggcctcggcatggagaatataggtgggatctttattgtattgatttgcggtctcatcatcgccgtcttcgtagcagtcatggaatttatctggtcaactaggcggtcagctgagtctgaggagacacccgcattgcatccagctgcctgccagtgcagcgcccttggaccccgcaccccactgaaagagccgtcaatgctgcttgtgaaggtcccctccacgcgcgtgcaggtcgcgttcagccgtacctccctgagacaggtgtgccctttcctgctgcaacaccagctttcatctttgtattggatccaggcgactaacgtgcagatctgctgtcacttttcttctcttaagccttcacctgacctgacatttcctccctctcaccgacccttgagtagtttgttatttactgctttggcggcagttgggggccttccagacgccagcagtttttttttcccaccgatttcttcatgtcctcccctgcaaagcgggattgggccgtgccattccacggaggctacactggtgacttccaacttccacgtttag

SEQ ID NO: 113272 - DNA, 2946 bp, Artificial Sequence
  derived and/or modified sequence
atgcctgcagaactactgctcctgctgatagtagcctttgcctcgcccagttgccaggtcttatccagcctcagaatggccgcaatcctggacgaccagaccgtgtgtggacgcggagagcggctggccttggccctcgctagggaacagattaatggaattatcgaggttcccgcaaaggccagagtcgaggtggacatttttgaactccaacgagattctcagtacgaaacaaccgatactatgtgtcagatcctcccgaagggtgtggtgtccgtcctcggcccatcatcaagcccggcatcagcctctacagtgtcacacatctgtggggaaaaggagataccccacatcaaagtgggccctgaggagacacccagacttcagtacttgcgattcgcatccgtgtcactgtacccttccaatgaggatgtctcactggccgtgagtcgcatcctcaaaagtttcaactacccctctgccagcctgatatgtgcgaaagcagaatgcctactccgtttggaggaactggttcgcggatttcttataagcaaagagaccctgagtgtgcggatgctggatgatagtagggatcccaccccactccttaaggagatcagagacgataaagtgagtactattatcatcgatgcaaatgcgtctataagtcatctaatactcaggaaagcctccgagctcggaatgaccagcgctttttataagtatatcctcactactatggacttccccatcctccacttggacggtattgttgaggacagttccaacatattgggtttctctatgtttaatacaagccaccctttctatcccgaattcgtgcggagtctcaatatgtcctggcgggagaattgcgaggccagcacttacctgggccctgcattatcagcagctctaatgtttgatgcagtgcacgttgtggtctccgccgtccgagagctaaacaggtctcaagagattggagtcaagccactggcctgcacttcagctaatatatggccacatggaacgtcgctgatgaactacctgagaatggtggagtacgatggccttaccggcagggtcgagttcaactctaaaggccagcgtactaattacactctgaggatcttggagaagagtaggcagggacatcgggaaatcggcgtttggtattccaataggactctggccatgaatgccacaaccctcgacatcaatctttcacagactctggccaacaagactctagtcgtgacaaccattctggagaatccttacgttatgcgcaggcctaatttccaggcgttgtctgggaacgaacgcttcgaaggattttgcgtggatatgttacgagaacttgccgagttgttacgctttagatatcgactccgactggtcgaggatggactgtacggagcgcctgagccgaatggctcttggactgggatggtcggtgaactcattaacagaaaggctgacttagccgtggctgcctttacgatcactgctgagcgcgaaaaagtcatcgatttcagcaagccattcatgacccttggaatctctatcctatacagggtacacatggggagaaaaccgggatacttctcttttctggatcccttctccccagctgtctggctttttatgctcttagcctatctagctgtgtcttgcgtccttttccttgccgcaagactgtcgccctatgagtggtataacccccacccttgcctgagagcacgccctcacatactggaaaatcagtacaccctcggaaattcattgtggtttcctgtcgggggattcatgcaacaaggcagcgagatcatgccgagggccttatcaacacgctgtgtatcaggggtgtggtgggccttcacactgattatcatcagcagctacacggctaacctcgcagcttttctgactgtgcagcgaatggaggtccccgtggaatctgccgatgatcttgcagaccagactaatatcgaatatggtactattcacgctggatcaacgatgacattttttcagaactctcggtatcagacgtaccagcggatgtggaactacatgcagtcaaaacagccaagtgttttcgtcaaatccactgaagaaggcatcgcgcgtgtgctgaacagcaggtatgcgttcctgctggaatcgacaatgaacgagtatcatcgaagacttaattgcaacctgacacagatcgggggactgcttgacactaaggggtacggcatcgggatgcctcttggatcacccttcagggatgagatcaccttggcaatacttcagctacaggagaacaacaggctcgaaatcctgaagaggaagtggtgggaagggggtcgctgtcccaaggaggaggatcatcgggctaaggggctcggcatggaaaacataggaggaatcttcatcgtgttaatctgcggcctcatcattgccgtttttgtggcagtgatggaattcatttggagtacgaggcgaagcgccgagtccgaggaaaccccagccttacaccctgctgcgtgtcagtgcagtgcactcggcccacgtacaccactaaaggagccctcaatgctcctcgttaaagtgccctctaccagggtacaggtcgcgttctctaggacaagcttgaggcaggtttgcccatttcttctgcagcatcagctttcttcgctgtactggatacaggcaactaatgtgcaaatctgttgtcatttctcatctctgaagcctagcccggatcttacttttcctccttctcacagaccactgtctagtctattatttactgcgctagcagccgtcggcggactgcctgacgcctccagttttttcttcccgccaatctcgtcttgtccacctctgcagtccggcataggcccatgccacagcaccgaggcaacacttgtgacatcaaattttcatgtttag

SEQ ID NO: 113273 - DNA, 2946 bp, Artificial Sequence
  derived and/or modified sequence
atgcccgccgagctgctgctgctgctgatcgtggccttcgccagccccagctgccaggtgctgagcagcctgagaatggccgccatcctggacgaccagaccgtgtgcggcagaggcgagagactggccctggccctggccagagagcagatcaacggcatcatcgaggtgcccgccaaggccagagtggaggtggacatcttcgagctgcagagagacagccagtacgagaccaccgacaccatgtgccagatcctgcccaagggcgtggtgagcgtgctgggccccagcagcagccccgccagcgccagcaccgtgagccacatctgcggcgagaaggagatcccccacatcaaggtgggccccgaggagacccccagactgcagtacctgagattcgccagcgtgagcctgtaccccagcaacgaggacgtgagcctggccgtgagcagaatcctgaagagcttcaactaccccagcgccagcctgatctgcgccaaggccgagtgcctgctgagactggaggagctggtgagaggcttcctgatcagcaaggagaccctgagcgtgagaatgctggacgacagcagagaccccacccccctgctgaaggagatcagagacgacaaggtgagcaccatcatcatcgacgccaacgccagcatcagccacctgatcctgagaaaggccagcgagctgggcatgaccagcgccttctacaagtacatcctgaccaccatggacttccccatcctgcacctggacggcatcgtggaggacagcagcaacatcctgggcttcagcatgttcaacaccagccaccccttctaccccgagttcgtgagaagcctgaacatgagctggagagagaactgcgaggccagcacctacctgggccccgccctgagcgccgccctgatgttcgacgccgtgcacgtggtggtgagcgccgtgagagagctgaacagaagccaggagatcggcgtgaagcccctggcctgcaccagcgccaacatctggccccacggcaccagcctgatgaactacctgagaatggtggagtacgacggcctgaccggcagagtggagttcaacagcaagggccagagaaccaactacaccctgagaatcctggagaagagcagacagggccacagagagatcggcgtgtggtacagcaacagaaccctggccatgaacgccaccaccctggacatcaacctgagccagaccctggccaacaagaccctggtggtgaccaccatcctggagaacccctacgtgatgagaagacccaacttccaggccctgagcggcaacgagagattcgagggcttctgcgtggacatgctgagagagctggccgagctgctgagattcagatacagactgagactggtggaggacggcctgtacggcgcccccgagcccaacggcagctggaccggcatggtgggcgagctgatcaacagaaaggccgacctggccgtggccgccttcaccatcaccgccgagagagagaaggtgatcgacttcagcaagcccttcatgaccctgggcatcagcatcctgtacagagtgcacatgggcagaaagcccggctacttcagcttcctggaccccttcagccccgccgtgtggctgttcatgctgctggcctacctggccgtgagctgcgtgctgttcctggccgccagactgagcccctacgagtggtacaacccccacccctgcctgagagccagaccccacatcctggagaaccagtacaccctgggcaacagcctgtggttccccgtgggcggcttcatgcagcagggcagcgagatcatgcccagagccctgagcaccagatgcgtgagcggcgtgtggtgggccttcaccctgatcatcatcagcagctacaccgccaacctggccgccttcctgaccgtgcagagaatggaggtgcccgtggagagcgccgacgacctggccgaccagaccaacatcgagtacggcaccatccacgccggcagcaccatgaccttcttccagaacagcagataccagacctaccagagaatgtggaactacatgcagagcaagcagcccagcgtgttcgtgaagagcaccgaggagggcatcgccagagtgctgaacagcagatacgccttcctgctggagagcaccatgaacgagtaccacagaagactgaactgcaacctgacccagatcggcggcctgctggacaccaagggctacggcatcggcatgcccctgggcagccccttcagagacgagatcaccctggccatcctgcagctgcaggagaacaacagactggagatcctgaagagaaagtggtgggagggcggcagatgccccaaggaggaggaccacagagccaagggcctgggcatggagaacatcggcggcatcttcatcgtgctgatctgcggcctgatcatcgccgtgttcgtggccgtgatggagttcatctggagcaccagaagaagcgccgagagcgaggagacccccgccctgcaccccgccgcctgccagtgcagcgccctgggccccagaacccccctgaaggagcccagcatgctgctggtgaaggtgcccagcaccagagtgcaggtggccttcagcagaaccagcctgagacaggtgtgccccttcctgctgcagcaccagctgagcagcctgtactggatccaggccaccaacgtgcagatctgctgccacttcagcagcctgaagcccagccccgacctgaccttcccccccagccacagacccctgagcagcctgctgttcaccgccctggccgccgtgggcggcctgcccgacgccagcagcttcttcttcccccccatcagcagctgcccccccctgcagagcggcatcggcccctgccacagcaccgaggccaccctggtgaccagcaacttccacgtgtag

SEQ ID NO: 113274 - DNA, 1422 bp, Artificial Sequence
  derived and/or modified sequence
atgaattatgataagctgagccgcgccctcagatattactacaataagagaatcctgcacaagactaaggggaagagatttacctacaagtttaattttaataagcttgtgctcgtcaactatcccttcattgacgtggggcttgcggggggagccgtgccccagtcagctccccccgtcccttccgggggttctcatttccggttccctccttccaccccaagcgaggtgctgtctccaactgaggacccacgcagccctccagcatgttcctcttctagctccagcttgttctctgccgtggttgcacgtaggttgggacgaggctcagtcagcgactgttcggacggaacaagcgagttggaagagccacttggagaggatcctagagctaggccgcctggtccccccgacctcggggctttccgcgggccgccactcgccagacttcctcatgacccgggcgtgttccgcgtttatcctaggccacggggtggccccgaaccccttagtcccttccccgtcagccccctggcagggcctgggtccttgttgccaccacagctatctccggctttgccaatgaccccaacacaccttgcctatacaccaagtccaacactgtcccccatgtacccatccggcggcggcggcccctcagggtctggcgggggctcccatttttccttttctcctgaggacatgaaaagatacctgcaggcccacacacagagtgtatataactaccacctgtcccctagggccttccttcattacccagggttggtcgtgccacaaccacagcggccagacaagtgcccgttaccccctatggctcccgagacacctcctgtcccatcctcagcaagctcatccagcagttcatccagtagcccctttaagttcaagttgcagccaccccccctgggtcgtcgacagagagccgctggggagaaggccgtggcgggcgccgacaagagtggagggagtgccggaggcttggccgagggtgcaggcgcactcgctccaccaccgccaccacctcagattaaggtcgagcccattagcgaaggtgagagcgaagaagtcgaggtcaccgacatttccgacgaggatgaagaggacggtgaagtctttaaaactccaagggctccacctgctcctcctaaacctgaacctggggaggcaccaggcgcctctcaatgcatgcccctaaagctgcgattcaaaagaaggtggtccgaagactgtagactggagggcggggggggcccggcaggggggttcgaagacgagggcgaagacaagaaagtgcgaggcgaagggcccggcgaggccggggggcccttaactccgaggagggtctcgagcgatttgcagcatgccaccgcacagttatcgctggagcaccgggactcgtag

SEQ ID NO: 113275 - DNA, 1422 bp, Artificial Sequence
  derived and/or modified sequence
atgaactatgacaagctgagccgggccctgcgctactactacaacaagaggatcctgcacaagaccaagggcaagcgcttcacctacaagttcaacttcaacaagctggtgctggtgaactaccccttcattgatgtgggcctggccggcggcgctgtgccccagagcgcccctcctgtgcccagcggcggcagccacttccgcttcccccccagcaccccatctgaggtgctgagccccacagaggaccccaggagccccccagcctgcagcagcagcagcagcagcctcttctctgctgtggtggcccggcggctgggccggggctctgtgtctgactgcagtgatggcaccagcgagctggaggagcccctgggggaggacccccgggcccggcccccaggccccccagacctgggcgccttccggggcccccccctggcccggctgccccatgaccccggggtcttccgggtgtacccccggccccggggcggccctgagcccctgagccccttccctgtgagccccctggccggccctggcagcctgctgcccccccagctgagccctgccctgcccatgacccccacccacctggcctacacccccagccccaccctgagccccatgtaccccagcggcggcggcggccccagcggcagcggcggcggcagccacttctccttctccccagaggacatgaagcgctacctgcaggcccacacccagagcgtgtacaactaccacctgagcccccgggccttcctgcactacccaggcctggtggtgccccagccccagaggccagacaagtgccccctgccccccatggcccctgagaccccacctgtgcccagcagcgccagcagcagcagcagcagcagcagcagccccttcaagttcaagctgcagcccccacccctgggccggcggcagagagctgctggggagaaggctgtggccggggctgacaagagcggcggcagcgctgggggcctggccgagggcgctggggccctggcccctcctcctcctccaccccagatcaaggtggagcccatcagcgagggggagagcgaggaggtggaggtgacagacatcagtgatgaagatgaggaggatggagaggtgttcaagaccccccgggcccccccagccccacccaagccagagcctggagaggcccctggggccagccagtgcatgcccctgaagctgcgcttcaagaggcgctggagcgaggactgccgcctggagggcggcggcggccctgctgggggctttgaagatgaaggagaggacaagaaggtgcggggggagggccctggagaggccggcggccccctgaccccaagaagagtgtccagtgacctgcagcacgccacagcccagctgagcctggagcaccgggacagctag

SEQ ID NO: 113276 - DNA, 1422 bp, Artificial Sequence
  derived and/or modified sequence
atgaactacgacaagctgagccgggccctgcggtactactacaacaaaaggatcctgcacaagacaaagggcaagcggttcacgtataagttcaatttcaacaaactggtgctggtcaattatcctttcatcgacgtgggactggctggcggagccgttccccagagcgccccgccagtccctagcggaggcagccacttcagattcccaccctcaacaccttctgaggtcctgtctccaacagaggaccctcggtcccctcctgcctgcagcagttcatcctcaagcctgttttccgccgtggtcgcacgtagattgggacgggggtcagtctcagactgcagtgacgggacatcagagctggaggaacctctcggtgaggatcctagggctcggcctcccggaccccccgacttaggggccttccgcggtcctcctctcgccaggttacctcatgaccctggagtcttcagagtgtaccctcgcccacggggaggaccagagccattgtcccccttccccgtcagccccttagcaggtccaggcagcttacttccacctcaactgtcccctgcactgcctatgacgcccacccaccttgcatatacaccatcaccaaccctaagccccatgtatcctagtggaggtggggggccatctggatctggcggggggtcccacttttcctttagccccgaggatatgaagcgctacttgcaggcccacactcagtctgtgtacaactatcacctgtcgcccagagcgttcctgcattacccagggctcgtggttccacagcctcagaggcccgacaagtgccctcttccgccaatggcccccgagacgccgccggtgccaagttccgcatctagctcaagcagctcatcttcctcaccattcaaattcaagttacaacccccccctctggggcggcgccagcgggcagctggagagaaggcagtggccggtgccgataaatccggcggaagcgccgggggcctagccgagggcgccggggccttggccccaccaccgcccccccctcagatcaaagttgagccaatctctgagggtgagtctgaggaggtggaagtcaccgacatctctgatgaagacgaggaggacggagaggtgtttaaaacaccgagagcccctccggctcctccgaaacccgaaccaggcgaggctccaggagcatcccagtgcatgcctttgaagctgcgctttaagcgccggtggagcgaggactgtaggcttgaaggaggagggggcccagctggcggctttgaggatgaaggcgaggacaaaaaagttcggggggaaggacctggagaagcagggggccctctgacacccaggagagtttctagcgatctgcaacatgctaccgcacagttatcattagagcatcgcgatagctag

SEQ ID NO: 113277 - DNA, 1422 bp, Artificial Sequence
  derived and/or modified sequence
atgaattatgataagctcagtagggccctcaggtattattataacaagaggatacttcacaagactaagggcaagcgattcacctataagtttaatttcaacaagctcgttctggtgaactacccatttattgatgtgggacttgccggtggcgcagtcccccagtccgccccacctgtgcctagcggaggatcacactttcgattcccccctagtaccccctccgaggttttatcccctacagaggatcccagaagccccccagcatgctccagctccagttcttctctcttctcagctgtcgtcgcaaggagactcggcagaggaagcgtgtctgactgttccgatggcacaagcgaactcgaggaacctttgggagaagatcccagggctaggcctccaggcccacccgatctcggggcattccgcggacctccgcttgctcggctcccccacgatccaggcgtgtttagagtgtacccaagaccacggggaggtcctgaaccactctcaccctttccagtctcccctcttgccggacccggaagtttacttccacctcagctgtcacctgccctgccaatgactccaactcacctagcatatactccaagccccaccctgtcacccatgtatccatccggcggaggcggaccttctggaagcggaggtggaagtcacttctccttttctcccgaggatatgaagagatacctacaggcgcacactcagtccgtatacaattaccatctttctccaagagccttcttgcactaccccggattggttgtaccccagccccagcgtccagataaatgccctttaccgcctatggcacccgagacacctcctgtcccctcctcagccagcagctcctccagcagttcctcttccccattcaagttcaagctccagccccctccactaggcaggaggcagagggccgcaggcgaaaaagctgtcgccggagccgacaagtcaggcggatcggcagggggactggctgagggtgcgggagctctggccccacctccgccacctcctcagatcaaggtggaacctatttctgaaggtgaatcagaagaggtggaggtgacggatatcagtgacgaggatgaagaagatggagaagtgtttaagactcccagggcacctcctgctcctccaaagccagagcccggtgaagccccaggcgcttcccagtgtatgcccctcaagctcaggttcaagcggcgatggagcgaggactgtcgtctggagggcggtggtgggccagccggaggctttgaagatgaaggcgaggacaagaaagtccgcggtgaaggcccaggcgaggctggcggacccttgacacctcgtcgggtatcttcagacctccaacatgcaactgcccagctgtccctcgaacatcgggactcgtag

SEQ ID NO: 113278 - DNA, 1422 bp, Artificial Sequence
  derived and/or modified sequence
atgaactacgacaagctgagcagagccctgagatactactacaacaagagaatcctgcacaagaccaagggcaagagattcacctacaagttcaacttcaacaagctggtgctggtgaactaccccttcatcgacgtgggcctggccggcggcgccgtgccccagagcgccccccccgtgcccagcggcggcagccacttcagattcccccccagcacccccagcgaggtgctgagccccaccgaggaccccagaagcccccccgcctgcagcagcagcagcagcagcctgttcagcgccgtggtggccagaagactgggcagaggcagcgtgagcgactgcagcgacggcaccagcgagctggaggagcccctgggcgaggaccccagagccagaccccccggcccccccgacctgggcgccttcagaggcccccccctggccagactgccccacgaccccggcgtgttcagagtgtaccccagacccagaggcggccccgagcccctgagccccttccccgtgagccccctggccggccccggcagcctgctgcccccccagctgagccccgccctgcccatgacccccacccacctggcctacacccccagccccaccctgagccccatgtaccccagcggcggcggcggccccagcggcagcggcggcggcagccacttcagcttcagccccgaggacatgaagagatacctgcaggcccacacccagagcgtgtacaactaccacctgagccccagagccttcctgcactaccccggcctggtggtgccccagccccagagacccgacaagtgccccctgccccccatggcccccgagaccccccccgtgcccagcagcgccagcagcagcagcagcagcagcagcagccccttcaagttcaagctgcagcccccccccctgggcagaagacagagagccgccggcgagaaggccgtggccggcgccgacaagagcggcggcagcgccggcggcctggccgagggcgccggcgccctggcccccccccccccccccccccagatcaaggtggagcccatcagcgagggcgagagcgaggaggtggaggtgaccgacatcagcgacgaggacgaggaggacggcgaggtgttcaagacccccagagccccccccgccccccccaagcccgagcccggcgaggcccccggcgccagccagtgcatgcccctgaagctgagattcaagagaagatggagcgaggactgcagactggagggcggcggcggccccgccggcggcttcgaggacgagggcgaggacaagaaggtgagaggcgagggccccggcgaggccggcggccccctgacccccagaagagtgagcagcgacctgcagcacgccaccgcccagctgagcctggagcacagagacagctag

SEQ ID NO: 113279 - protein, 918 aa, Artificial Sequence
  derived and/or modified sequence
MGRSNSRSHSSRSKSRSQSSSRSRSRSHSRKKRYRSRSRTYSRSRSRDRMYSRDYRRDYRNNRGMRRPYGYRGRGRGYYQGGGGRYHRGGYRPVWNRRHSRSPRRGRSRSRSPKRRSVSSQRSRSRSRRSYRSSRSPRSSSSRSSSPYSKSPVSKRRGSQEKQTKKAEGEPQEESPLKSKSQEEPKDTFEHDPSESIDEFNKSSATSGDIWPGLSAYDNSPRSPHSPSPIATPPSQSSSCSDAPMLSTVHSAKNTPSQHSHSIQHSPERSGSGSVGNGSSRYSPSQNSPIHHIPSRRSPAKTIAPQNAPRDESRGRSSFYPDGGDQETAKTGKFLKRFTDEESRVFLLDRGNTRDKEASKEKGSEKGRAEGEWEDQEALDYFSDKESGKQKFNDSEGDDTEETEDYRQFRKSVLADQGKSFATASHRNTEEEGLKYKSKVSLKGNRESDGFREEKNYKLKETGYVVERPSTTKDKHKEEDKNSERITVKKETQSPEQVKSEKLKDLFDYSPPLHKNLDAREKSTFREESPLRIKMIASDSHRPEVKLKMAPVPLDDSNRPASLTKDRLLASTLVHSVKKEQEFRSIFDHIKLPQASKSTSESFIQHIVSLVHHVKEQYFKSAAMTLNERFTSYQKATEEHSTRQKSPEIHRRIDISPSTLRKHTRLAGEERVFKEENQKGDKKLRCDSADLRHDIDRRRKERSKERGDSKGSRESSGSRKQEKTPKDYKEYKSYKDDSKHKREQDHSRSSSSSASPSSPSSREEKESKKEREEEFKTHHEMKEYSGFAGVSRPRGTFFRIRGRGRARGVFAGTNTGPNNSNTTFQKRPKEEEWDPEYTPKSKKYFLHDDRDDGVDYWAKRGRGRGTFQRGRGRFNFKKSGSSPKWTHDKYQGDGIVEDEEETMENNEEKKDRRKEEKE

SEQ ID NO: 113280 - DNA, 2757 bp, Artificial Sequence
  derived and/or modified sequence
atgggcaggtccaactcccgctcgcactcttcgaggtcaaagtctaggagccaaagtagctcacggtctaggagcagatcccacagcaggaagaagcgctataggtccaggtccaggacgtactcaagaagccggagcagagaccgaatgtatagcagagattataggcgggattatagaaacaacaggggaatgagacgtccatacggataccgtgggcgaggtcgcggctactatcaaggaggcggcggcaggtatcatcggggggggtatcgccccgtgtggaacaggcggcacagtaggtcaccccggcgagggcgatccagatcccggtcccccaaacgacgaagcgtctctagccagcgctctcggtctaggtctaggcggagttacaggtcaagcagatctcctcggagctcctcaagtaggagcagttccccttacagcaagagcccggtatctaaaagaaggggttcccaggagaaacagacaaaaaaggcagaaggcgaacctcaagaggaatctcctttgaaaagcaagtcacaggaagagcccaaggacacctttgagcacgacccctcggaatccattgacgagttcaataaatccagtgcgacgtctggagatatttggcccggcctctctgcatacgacaatagccctcgttctccccactcccctagcccaatcgccaccccaccaagccagagctcttcctgtagcgacgccccaatgctgtctaccgtccacagtgctaaaaacaccccctctcagcatagccacagcatccagcatagtcccgaacgatctgggagcggctctgttggtaatggctcttcgcgatactctccttcacagaacagtcccattcaccacatcccatcaaggagaagtccagctaagactatagctcctcaaaacgcccctagggatgagtcgcgcgggcgttccagtttctatccggatggaggcgatcaggaaactgccaaaacaggtaagttcctgaagcgctttaccgatgaggaatcacgagtgtttctactggaccgagggaacactagagacaaagaggcctcgaaagagaagggtagtgagaagggccgggccgagggtgaatgggaggatcaagaggcattggattacttttcagataaggagtcgggcaaacagaaatttaacgattctgaaggcgacgacaccgaggagactgaagactaccggcagtttaggaaaagcgtactggcagaccaaggcaaatcctttgctacagcttcccatcggaataccgaagaggaagggctgaaatacaaaagtaaggttagcctgaagggaaacagggagtcagacgggtttcgggaggaaaaaaattataaactgaaggagaccggctatgtcgtagagcgacccagtactaccaaggataagcataaagaagaggataagaacagcgagaggattaccgtgaaaaaggagactcaatcccccgagcaggtaaaatctgaaaaattaaaggatttgttcgattattcccccccattgcataaaaacctggacgcgcgggagaaatctacctttagggaggagagcccactacgcattaaaatgattgccagtgattcccacaggcctgaggtcaagctgaagatggccccggtgcctctggatgatagtaacagaccggccagtctgactaaggaccggctcctagcttccacattggtgcactctgtgaagaaggagcaggaattccgctctatatttgatcatattaagctgccccaggcctctaaatcaacaagcgaaagctttattcagcacatcgtatctctggtccaccatgtgaaagagcaatacttcaaaagtgcggcgatgacattaaatgagcgattcacctcttaccagaaggccacagaggagcatagtacgagacaaaagtctcccgaaattcataggcgaattgacatcagtccatctacgctcagaaagcacacccgcctggccggggaagagagagtatttaaggaagaaaatcagaaaggcgacaaaaaactccgatgcgattctgcagatctacgacacgacatagatcgaaggcgaaaagaaagaagcaaggagaggggagatagcaagggctccagagagtcctcgggctctaggaagcaagagaagactcccaaagactataaagaatataaatcatacaaagacgacagcaaacataaacgggagcaagaccacagtcgatcatcctcttcttcagcctccccctcaagtccttcatctagagaggagaaggagtcgaaaaaggagcgagaagaggagtttaaaactcatcatgagatgaaagaatattccggctttgccggagttagtcgtccgcgaggcaccttcttccgaatccggggaagggggagagccaggggggtgtttgcggggaccaacactggcccaaataactcaaacacaacatttcaaaagcgacctaaggaggaagaatgggaccctgagtacacccccaaaagcaagaagtattttctgcacgatgatcgagacgatggtgtagactattgggcgaagcgaggccgagggaggggaacattccaaaggggacgcggccgattcaacttcaagaagtctggcagctcccctaagtggacccacgataagtaccaaggggatgggatcgtggaggatgaagaggaaactatggaaaacaatgaggaaaagaaggatagacgtaaggaagagaaagagtag

SEQ ID NO: 113281 - DNA, 2763 bp, Artificial Sequence
  derived and/or modified sequence
atgggcagatcaaatagccgctctcattcttccaggagtaagagccgctctcagagctcctcaagatcacggagtcgctcccatagccggaagaaacggtattcatcacggagtaggagcagaacttacagtcgttccaggtcacgggaccggatgtatagccgggattaccgaagggattacagaaacaatcggggaatgaggcggccctatggctatagaggcaggggccggggatattaccaaggtggggggggccgctatcatcggggaggctatcggccggtgtggaacagaaggcactctcgatccccccgccggggccgttccaggagcagaagccccaagcgcaggtcggtttcttctcaacgcagtcggtccaggtcccggagatcttataggagcagtagatcccctcgttcctcttccagccgatcgagtagtccttattctaagtcacccgtgtccaagaggcgcggaagccaggagaaacagacgaaaaaggcagagggtgagccgcaggaggaatctccactgaaatccaagtcccaggaggagcctaaggatacattcgaacacgatcccagtgagtcgattgatgagttcaataaatctagtgcgactagcggggacatttggcctgggctgtccgcatacgacaactcacctcgtagcccccatagcccctcacccattgcaactccccccagccagagcagcagttgctccgatgcaccaatgctctccaccgtgcattctgcaaaaaacaccccctcacagcactcccactctatccagcactcccccgaacggtccggcagtggttcagttggcaacggctccagccggtatagtccatcacagaacagccccattcaccatatccccagtcgcaggagtcctgccaaaacaattgctcctcagaacgcccccagggatgagtcaaggggccgcagctcattctaccctgacggaggcgaccaggaaacagcgaagaccggcaagttcctcaaacggttcaccgatgaagagtcccgtgtttttctgctcgacagaggcaatacccgtgataaggaggcaagcaaagaaaaaggcagcgagaaggggagagcggaaggagaatgggaggaccaggaagcactggactacttttccgacaaagaatctggtaagcagaagtttaatgatagcgagggtgacgatacagaggaaaccgaagactaccggcaatttcgcaaatctgtcctcgccgatcaaggtaagtccttcgctacggcaagtcacaggaacactgaagaagagggactgaaatacaaaagcaaagtgtcgctgaaaggtaatagagagagcgacggctttagagaggagaaaaattacaagttaaaggaaactggatacgtggtggagcggcccagtactacaaaagacaaacataaagaggaagacaagaattccgagaggattaccgtgaagaaagagacacaatcccccgagcaggtgaagagcgagaagttaaaggatttgtttgattatagcccaccactgcacaaaaacttggatgcccgggagaaaagcacgttcagggaagagagtcctctgcggatcaaaatgattgcctctgactcacacaggcctgaagtgaaacttaaaatggcacctgtacccttagacgattcgaatcgaccggcatccctgacaaaagatcgcctcttggcctctacactggtgcactctgttaagaaggagcaggaattcaggtctatcttcgatcatattaagttaccccaggcatccaaaagtacctccgaatcgttcatccaacacattgtgagcctcgttcaccacgtcaaagaacaatattttaaatcagccgccatgacgctcaacgagagatttacttcctatcaaaaagccaccgaggaacactccactagacaaaagagccccgagattcacagaagaatcgacatttccccgtctaccctgagaaagcacacccggcttgcaggcgaggaacgcgtgtttaaagaagagaaccagaagggggacaagaaactgagatgtgattctgccgatctgagacatgatatagatcggcggaggaaggagagaagtaaagagcggggggatagtaaaggaagcagagagtcatctggatccagaaagcaagaaaagacacctaaagactacaaagagtataagtcatacaaggatgactccaagcataaaagggagcaagaccatagtcgctcttcgagttctagtgcaagtccatcaagtccgtcgtcacgagaggagaaagagtctaaaaaggagagggaggaggagtttaagacccatcatgagatgaaggaatatagtggctttgctggtgtgtcgcgacctaggggtacattctttagaatcagaggtcggggccgggccagaggtgtgttcgctgggactaatacagggccaaataacagcaataccacttttcagaagagaccgaaggaggaggaatgggacccagagtatactcctaagtctaaaaaatattttctacatgatgatagggacgacggagtggactactgggctaaaagagggcgtggccgtgggacttttcagcgcggcagaggaagatttaactttaaaaaatcgggtagctcaccgaagtggacccatgataaataccagggcgacgggatcgtggaagacgaagaagagactatggagaacaatgaggagaaaaaagaccgccgcaaggaagagaaggagtag

SEQ ID NO: 113282 - DNA, 2757 bp, Artificial Sequence
  derived and/or modified sequence
atgggccgcagcaacagccgcagccacagcagccgcagcaagagccgcagccagagcagcagccgcagccgcagccgcagccacagcaggaagaagcgctaccgcagccgcagcaggacctacagccgcagccgcagccgggacaggatgtacagccgggactaccgccgggactacagaaacaacagaggcatgaggcggccctacggctaccggggccggggccggggctactaccagggcggcggcggccgctaccacagaggaggctacagacctgtgtggaacagaagacacagccgcagcccccggcggggccgcagccgcagccgcagccccaagagaagatctgtgagcagccagaggagccgcagccgcagccgccgcagctaccgcagcagccgcagccccaggagcagcagcagccgcagcagcagcccctacagcaagagccctgtgtccaagaggcggggcagccaggagaagcagaccaagaaggccgagggggagccccaggaggagagccccctgaagagcaagagccaggaggagcccaaggacacctttgaacatgaccccagcgagagcattgatgagttcaacaagagcagcgccaccagcggggacatctggccaggcctgagcgcctatgacaacagccccaggagcccccacagccccagccccatcgccaccccacccagccagagcagcagctgcagtgatgcccccatgctgagcacagtgcacagcgccaagaacacccccagccagcacagccacagcatccagcacagccctgagaggagcggcagcggctctgtgggcaatggcagcagccgctacagccccagccagaacagccccatccaccacatccccagccgccgcagccctgccaagaccatcgccccccagaatgcccccagagatgagagccggggccgcagcagcttctacccagatggaggagaccaggagacagccaagacaggcaagttcctgaagcgcttcacagatgaggagagcagggtcttcctgctggaccggggcaacacccgggacaaggaggccagcaaggagaagggcagcgagaagggccgggcagagggggagtgggaggaccaggaggccctggactacttcagtgacaaggagagcggcaagcagaagttcaatgattctgaaggagatgacacagaggagacagaggactaccggcagttcaggaagtctgtgctggccgaccagggcaagagctttgccacagccagccacaggaacacagaggaggagggcctgaagtacaagagcaaggtgtccctgaagggcaaccgggagagtgatggcttccgggaggagaagaactacaagctgaaggagaccggctacgtggtggagcggcccagcaccaccaaggacaagcacaaggaggaggacaagaacagcgagcgcatcaccgtgaagaaggagacccagagccctgagcaggtgaagtctgagaagctgaaggacctgtttgactacagcccccccctgcacaagaacctggatgcccgggagaagagcaccttccgggaggagagccccctgcgcatcaagatgattgccagtgacagccacaggcctgaggtgaagctgaagatggcccctgtgcccctggatgacagcaacagacctgccagcctgaccaaggaccggctgctggccagcaccctggtgcacagcgtgaagaaggagcaggagttccgcagcatctttgaccacatcaagctgccccaggccagcaagagcaccagcgagagcttcatccagcacatcgtgtccctggtgcaccacgtgaaggagcagtacttcaagtctgctgccatgaccctgaatgaacgcttcaccagctaccagaaggccacagaggagcacagcacccggcagaagagccctgagatccacagaagaattgacatcagccccagcaccctgaggaagcacacccggctggccggggaggagagggtcttcaaggaggagaaccagaagggggacaagaagctgcgctgtgacagcgctgacctgcggcatgacatcgacagaagaaggaaggagaggagcaaggagcggggggacagcaagggcagccgggagagcagcggcagcaggaagcaggagaagacccccaaggactacaaggagtacaagagctacaaggatgacagcaagcacaagcgggagcaggaccacagccgcagcagcagcagcagcgccagccccagcagccccagcagccgggaggagaaggagagcaagaaggagcgggaggaggagttcaagacccaccacgagatgaaggagtacagcggctttgctggggtgtcccggccccggggcaccttcttccgcatccggggccggggccgggcccggggcgtgtttgctggcaccaacacaggccccaacaacagcaacaccaccttccagaagaggcccaaggaggaggagtgggaccctgagtacacccccaagagcaagaagtacttcctgcatgatgacagagatgatggagtggactactgggccaagaggggccggggccggggcaccttccagaggggccggggccgcttcaacttcaagaagagcggcagcagccccaagtggacccatgacaagtaccagggagatggcatcgtggaggatgaggaggagaccatggagaacaatgaggagaagaaggacaggaggaaggaggagaaggagtag

SEQ ID NO: 113283 - DNA, 2763 bp, Artificial Sequence
  derived and/or modified sequence
atgggccgcagcaacagccgcagccacagcagccgcagcaagagccgcagccagagcagcagccgcagccgcagccgcagccacagcaggaagaagcgctacagcagccgcagccgcagcaggacctacagccgcagccgcagccgggacaggatgtacagccgggactaccgccgggactacagaaacaacagaggcatgaggcggccctacggctaccggggccggggccggggctactaccagggcggcggcggccgctaccacagaggaggctacagacctgtgtggaacagaagacacagccgcagcccccggcggggccgcagccgcagccgcagccccaagagaagatctgtgagcagccagaggagccgcagccgcagccgccgcagctaccgcagcagccgcagccccaggagcagcagcagccgcagcagcagcccctacagcaagagccctgtgtccaagaggcggggcagccaggagaagcagaccaagaaggccgagggggagccccaggaggagagccccctgaagagcaagagccaggaggagcccaaggacacctttgaacatgaccccagcgagagcattgatgagttcaacaagagcagcgccaccagcggggacatctggccaggcctgagcgcctatgacaacagccccaggagcccccacagccccagccccatcgccaccccacccagccagagcagcagctgcagtgatgcccccatgctgagcacagtgcacagcgccaagaacacccccagccagcacagccacagcatccagcacagccctgagaggagcggcagcggctctgtgggcaatggcagcagccgctacagccccagccagaacagccccatccaccacatccccagccgccgcagccctgccaagaccatcgccccccagaatgcccccagagatgagagccggggccgcagcagcttctacccagatggaggagaccaggagacagccaagacaggcaagttcctgaagcgcttcacagatgaggagagcagggtcttcctgctggaccggggcaacacccgggacaaggaggccagcaaggagaagggcagcgagaagggccgggcagagggggagtgggaggaccaggaggccctggactacttcagtgacaaggagagcggcaagcagaagttcaatgattctgaaggagatgacacagaggagacagaggactaccggcagttcaggaagtctgtgctggccgaccagggcaagagctttgccacagccagccacaggaacacagaggaggagggcctgaagtacaagagcaaggtgtccctgaagggcaaccgggagagtgatggcttccgggaggagaagaactacaagctgaaggagaccggctacgtggtggagcggcccagcaccaccaaggacaagcacaaggaggaggacaagaacagcgagcgcatcaccgtgaagaaggagacccagagccctgagcaggtgaagtctgagaagctgaaggacctgtttgactacagcccccccctgcacaagaacctggatgcccgggagaagagcaccttccgggaggagagccccctgcgcatcaagatgattgccagtgacagccacaggcctgaggtgaagctgaagatggcccctgtgcccctggatgacagcaacagacctgccagcctgaccaaggaccggctgctggccagcaccctggtgcacagcgtgaagaaggagcaggagttccgcagcatctttgaccacatcaagctgccccaggccagcaagagcaccagcgagagcttcatccagcacatcgtgtccctggtgcaccacgtgaaggagcagtacttcaagtctgctgccatgaccctgaatgaacgcttcaccagctaccagaaggccacagaggagcacagcacccggcagaagagccctgagatccacagaagaattgacatcagccccagcaccctgaggaagcacacccggctggccggggaggagagggtcttcaaggaggagaaccagaagggggacaagaagctgcgctgtgacagcgctgacctgcggcatgacatcgacagaagaaggaaggagaggagcaaggagcggggggacagcaagggcagccgggagagcagcggcagcaggaagcaggagaagacccccaaggactacaaggagtacaagagctacaaggatgacagcaagcacaagcgggagcaggaccacagccgcagcagcagcagcagcgccagccccagcagccccagcagccgggaggagaaggagagcaagaaggagcgggaggaggagttcaagacccaccacgagatgaaggagtacagcggctttgctggggtgtcccggccccggggcaccttcttccgcatccggggccggggccgggcccggggcgtgtttgctggcaccaacacaggccccaacaacagcaacaccaccttccagaagaggcccaaggaggaggagtgggaccctgagtacacccccaagagcaagaagtacttcctgcatgatgacagagatgatggagtggactactgggccaagaggggccggggccggggcaccttccagaggggccggggccgcttcaacttcaagaagagcggcagcagccccaagtggacccatgacaagtaccagggagatggcatcgtggaggatgaggaggagaccatggagaacaatgaggagaagaaggacaggaggaaggaggagaaggagtag

SEQ ID NO: 113284 - DNA, 2757 bp, Artificial Sequence
  derived and/or modified sequence
atgggccggagcaacagccggagccacagcagccggagcaagagccggtctcagtcttcttcccgctctcgcagcagatctcattcacggaagaagaggtaccgctccagatcacgcacctactccagatctaggtcacgcgacagaatgtacagcagagactaccgaagggactacaggaataataggggcatgcgaaggccgtatgggtatcggggtcgaggcagagggtattaccagggcgggggcggccggtaccatcgaggcggttatagacctgtatggaacagacgccatagtaggtcccccaggagaggccgatcaagatcccggtctccaaagaggcggtccgtgtcctcacaaaggagcaggtctcgaagccgacggagctatagatcaagccgtagcccccgctcctctagctccaggtcttcctctccttactccaagtcccccgtgtcaaaacgcagaggcagtcaagagaaacagactaagaaggccgaaggcgagcctcaggaggagtcccctcttaaatctaagtctcaggaagaacccaaggataccttcgagcatgacccatcagaatctatcgacgagtttaacaagtcgagcgcgacctcaggtgatatctggcccggcctcagtgcatatgataatagtcccaggtctcctcattctcctagccctattgccacaccccccagccaatcatctagctgtagcgatgcgcctatgctgtcaaccgtccacagcgccaagaacaccccatcacagcattcgcactcaattcaacactctcctgagagaagtggatccggctctgtggggaatggttcgagtaggtattccccttcccagaattcaccaattcatcacataccatccagaaggagcccagccaagacaatagcaccccagaacgcaccccgggacgagagcagggggcggtccagcttctatcctgatggcggggatcaagagacagctaaaacgggaaagtttctgaagagattcactgacgaggagagccgggtgttcctgctggacagggggaatacacgggacaaggaagcctctaaggagaagggatcagaaaaaggaagagctgagggtgagtgggaggatcaggaagcattggactatttcagcgacaaagagtctggtaagcagaaattcaacgatagcgaaggcgacgataccgaagaaaccgaggattatcgacagttccgcaagtccgtgttggctgaccaaggcaagtcatttgccactgcttcccacagaaacactgaggaggagggcctgaaatataagtccaaggtgagcctgaaaggaaatagggaaagcgacggcttcagagaggagaagaactataagcttaaagagacaggatatgtagtcgaacggccgagtaccactaaggataaacacaaggaggaagacaagaacagcgagcggataaccgtgaagaaggagacacaatctcctgaacaggtgaagagcgaaaaactaaaggatctttttgactactccccccctctgcacaagaatctggacgccagagagaagagcacctttagggaggagtcccctttgcgcatcaagatgatcgcttccgactcccaccgacctgaggtcaagctcaagatggctccagttcctctggatgacagtaatagacccgcatctttgacgaaggatagattgcttgcctctaccctggtccacagtgttaagaaagagcaagagtttagatccattttcgatcacattaagctccctcaagcaagtaagagtaccagcgagagttttattcagcacattgtatcactggtccaccacgtgaaggagcagtacttcaagtccgcggccatgacgttaaacgagaggttcacctcttaccaaaaggccactgaggagcacagcaccaggcagaagtctcctgaaatccaccgacggatagatataagtccgtctactcttcgcaagcacactcggctcgccggcgaggaaagagtgtttaaggaggaaaaccagaagggagacaagaaactgcgatgtgacagcgccgatctcaggcatgatatcgaccggcgacgcaaggaacgcagcaaggagagaggcgattcaaaaggtagccgcgagtctagcgggagcagaaaacaggaaaaaactcccaaggactataaggaatataaatcctataaagatgacagcaagcacaaacgtgaacaggaccattcacgcagcagtagctcctcagctagccccagtagcccaagcagccgggaagagaaagagtcgaagaaggaacgagaggaagagttcaagactcatcacgagatgaaagaatacagcgggttcgccggcgtaagcaggccccgaggtaccttttttagaatcagaggacggggcagagcacgcggcgtgttcgcagggacgaataccggacctaacaacagcaataccacattccaaaaaagaccaaaagaagaggagtgggaccctgagtacacaccaaagagcaagaaatacttcttgcatgatgacagagacgatggcgtcgactattgggctaagaggggccgcggtagagggacgttccagcgtggccggggtcgttttaacttcaagaagtccggctccagcccgaaatggacacacgacaagtaccagggcgatggaatcgtggaagatgaggaagagactatggagaataatgaggagaagaaggacaggcggaaggaggagaaagagtag

SEQ ID NO: 113285 - DNA, 2763 bp, Artificial Sequence
  derived and/or modified sequence
atgggccggagcaacagccggagccacagcagccggagcaagagcaggagccagagctcaagccgcagccgcagtagatcgcactcacgcaaaaagcgttactcaagtagatctaggtcacggacttattcacggtcccgttctcgggaccgcatgtacagtcgagactatagacgtgattaccggaacaaccgcggcatgaggcggccatacggctacaggggccgcggccgaggatactatcagggcggcggcgggaggtatcatagaggtggctatcgccccgtatggaataggcgacactcacgcagtcctcggcgcggccgcagccgcagtcggtctcccaagagacgttctgtctctagccagaggagccgctcgcgcagtaggcgcagctaccgctctagtcgatcaccaagatcctcgtccagccgtagcagctctccgtatagtaaaagccccgtgagtaaaagacggggatcacaggaaaaacagaccaaaaaagcggagggggagccacaggaggaatccccactcaagtcaaaaagccaggaagagccaaaggacaccttcgaacatgacccgagcgagagcatcgatgaatttaataaatcatccgctactagcggggatatctggccaggcctttccgcatatgacaactcccccagatctcctcacagtcccagtccaatcgccactcccccttcccagtcatcttcctgcagcgacgctcccatgttgagtacagttcattccgcaaagaatactccctctcaacacagtcattctatccagcacagccctgaacggtccggctccggttccgtgggcaatggttcttccaggtattctccatctcagaattcacccatccaccatatcccctcgagacgctcaccagccaagacgatcgccccacagaacgccccaagggacgagtctagggggcgctcaagcttctaccctgacggaggagatcaagagacggccaagacaggtaagttcctgaaacggttcactgatgaggagagccgggttttcctgcttgatagagggaacactcgggacaaagaggcttccaaggagaagggcagcgagaagggccgcgccgaaggcgaatgggaagatcaggaagcactggattatttctccgacaaggaatctggaaagcagaaatttaacgattccgaaggagatgatactgaagaaacagaagactaccggcagtttagaaaatcagtgcttgctgaccaggggaaaagcttcgcaacagcttctcaccggaacaccgaggaggaaggcctgaagtacaagtctaaagtgtccctcaaaggtaaccgcgaatccgatgggtttagagaggagaagaactataagctgaaggaaaccggctatgtggtggagaggccatccactaccaaggataaacataaagaagaggacaagaactcagagcggattacggtgaagaaagagacccagagcccagagcaggtgaaaagcgagaaattaaaagacctttttgactactctcccccattacacaaaaatctcgatgccagagagaagagtaccttcagagaagaaagcccactgaggatcaaaatgattgccagtgacagccaccgcccagaggtcaaactgaagatggcgccagtaccactcgacgactctaatagacctgccagcctgacgaaggatcgcctcttagcaagcaccctggtgcactctgtaaagaaagaacaagagttccgtagtatcttcgaccatataaaactgccccaggccagcaaatctacgtccgaatcttttattcagcatatcgtgagtctcgtgcatcacgtgaaggaacagtactttaagtccgcagcaatgacccttaatgaaagattcacaagctatcagaaggccacagaggaacactctacccggcagaagagccccgagatccacagaagaatcgacatttctccttctacactgaggaagcacacaagattggcgggggaggagagagtatttaaggaagagaatcagaagggagacaaaaaactacgctgcgattccgcagacctgcggcatgacatcgaccgacgccgcaaggagcgctcaaaggaaagaggagactcgaagggtagtagggagtcctccggatcccggaagcaggaaaagacccctaaagactataaggagtacaaatcctacaaggatgactccaaacataagcgggaacaagaccactcaaggagttcctctagcagcgcctcccctagttctccttcttctcgcgaagagaaagagtcaaaaaaggaaagagaggaggaattcaagacacaccacgagatgaaggaatatagtgggtttgcgggcgtttcacggccaagaggtactttcttccggatccgcggccgcgggagggccagaggggtgtttgccggcacaaatactggtccaaataattctaataccacatttcagaaacggcctaaggaggaagaatgggaccccgaatacacacccaaaagcaagaagtactttttgcacgatgacagggacgacggcgtcgactactgggccaaaaggggaagagggcgcggcacgttccagagaggccgtggccgcttcaattttaagaaatccggcagctctcccaaatggacccatgataaataccagggcgatggcatcgttgaggacgaggaagaaaccatggagaacaatgaggagaagaaggaccgcagaaaggaggagaaggaatag

SEQ ID NO: 113286 - DNA, 2757 bp, Artificial Sequence
  derived and/or modified sequence
atgggacgctctaatagtcgatcccacagctcccgatcaaaatcacgttcacagtcttcatcccggtccagaagccggtcccatagtcggaagaagaggtatagaagccggtcccgcacctactctcgctcacggagccgggaccggatgtactcacgggattatagacgagattaccgaaataacagaggtatgagacgcccatacggttacaggggtcggggtagaggctattaccaggggggaggaggacgctaccataggggagggtacagaccagtgtggaaccgccgacacagtagatcccccagacgtggccgttcacggtctcgcagccccaagcggcgttccgtctcttctcaaagatcacggtcacgctctcggagatcttacagaagtagcagatcaccaagaagtagctcctcccgttcgtcctcaccatattcaaagtcccctgtgtcaaaacgacgcggatcccaggaaaagcaaaccaagaaggctgaaggcgagccccaggaggaatctcccctgaaatctaaaagtcaggaggaaccaaaagacacatttgaacatgatccttctgagtccatcgatgagttcaacaagtcctccgcgacaagtggtgatatctggccgggtctgtctgcctatgataattcaccacgcagcccacattcaccaagcccaatcgcaacccccccatcccagagcagctcttgtagcgacgccccaatgctgtcaaccgtgcattccgcaaagaacactccgtcccagcattcccacagcatccaacacagccccgagcgctcagggtccggctcggtgggaaatggcagctccaggtattcccctagccagaacagcccaattcaccacatccctagcaggagatctcctgctaaaacaattgcgccacaaaacgcccctcgcgacgaaagccgcggtcgctcatccttttacccggacgggggtgaccaagagacagctaaaaccggcaagtttctgaagcgcttcactgacgaggagtcgagagtgttcctgcttgaccgcggaaacacacgggacaaggaagccagcaaagagaaaggctcagagaaggggagggccgagggagagtgggaggaccaggaagctttggactacttcagcgataaggagtccggcaagcagaagtttaacgacagcgagggtgacgataccgaagagacagaggattacaggcagttcagaaagagcgttttagcagaccagggtaaaagtttcgccacagcctcccacagaaacacagaggaagaaggcctgaaatataaatctaaggttagtttgaaaggaaacagagagtctgatggcttccgggaagaaaaaaactataaactgaaagaaacagggtatgtggtggaacggccttcaactaccaaggacaagcataaggaggaggataaaaactctgaacggatcacagtcaagaaagaaactcagagccctgaacaggtcaagagtgagaagttaaaagaccttttcgattactccccccctcttcacaaaaacctggacgcacgggagaaatccacatttcgagaagagagtcccctgcgcattaaaatgatcgcctcagatagccatcgacctgaagtgaagctgaagatggcgcctgtgcccctggatgactccaacagacctgccagcctcacaaaggatcggctactggccagtactttagtgcatagcgtgaaaaaggagcaggagttcagaagcatattcgatcacatcaagctcccacaagcgtcgaagagcacatccgagagctttattcagcacatcgttagtctggtacatcatgtcaaagagcaatactttaagtccgccgctatgacgctcaatgagaggtttacctcgtaccagaaggctacggaggagcattcgacccggcagaagagccctgaaattcataggcgaatcgatatctctcctagcaccctgaggaagcataccagactagctggcgaggaaagggtcttcaaggaggaaaaccagaagggcgacaagaagttgcgctgtgatagtgctgacctacgtcatgacattgataggagacgcaaagagaggtccaaagagcgcggtgattctaaggggtcacgggagagcagcgggtctaggaagcaggagaaaacccccaaggattacaaggagtacaaaagctataaagacgatagcaagcataagagagagcaggatcacagccgaagcagcagttccagcgcatcaccaagctccccaagctcgcgcgaggagaaagagtccaagaaagaacgcgaggaagagtttaagactcaccatgagatgaaagagtactccggcttcgcaggtgtgtcccgccctagggggaccttcttccggattagaggacgaggaagagccagaggcgtctttgcagggacgaacacgggaccaaataacagtaacactacattccagaagcggcctaaggaggaagagtgggatccggaatataccccaaaaagcaagaaatacttcctgcacgacgacagagatgacggcgtggactactgggcaaagagggggagggggcgaggcaccttccagagaggaagaggacggtttaattttaaaaaatcggggagctctccaaaatggacccacgataaataccaaggggatggtattgttgaagacgaggaagagacaatggaaaacaatgaagagaagaaagaccgcagaaaggaggaaaaagagtag

SEQ ID NO: 113287 - DNA, 2763 bp, Artificial Sequence
  derived and/or modified sequence
atggggcgttctaacagccgttcgcattcttctcgttccaagtcccgcagccagagctcaagtcgctctagatccaggagccactcccggaagaagaggtactcctccaggagccggtcccgaacgtacagtagaagtagatcacgagatcggatgtactctcgcgattatcggcgtgactacaggaataatcgagggatgcggaggccctacggctacagaggcaggggacgcggatactaccagggagggggtgggagatatcataggggtggctacaggcctgtctggaaccggaggcactcccgttcccctcgcagggggaggagccggtcaaggtcacctaagagacgctcagtctcatcccagaggagtcggtcacgatcccggcgaagctaccgctccagcaggagcccacggtcctcttcatcacggagtagcagcccgtattctaaaagtcctgtgagcaagcgtcgcggatcccaggagaagcagacgaagaaggccgaaggcgaaccccaggaagagtcacccttgaagtccaaaagccaggaagagcccaaagacacttttgagcatgacccaagcgaaagcattgatgagtttaacaaatcgagcgcgaccagcggcgatatttggccgggacttagcgcctatgacaattctccaaggtcaccccattctccaagtcccatagctacccctccatctcaatccagcagctgttcagatgcccctatgctgtcgacggtgcactcagcaaaaaatacacctagccaacacagccattcaatccagcattcccccgagcgatcgggttcggggtcggtgggcaacggaagcagtcgttactccccaagtcaaaactccccaatacatcacatccccagcaggcgatcaccagccaagacgattgctcctcagaatgctccgagggacgagagtcggggtaggagcagtttttatcctgacgggggagatcaagagacagccaagacaggcaagttccttaaacgcttcaccgacgaggaaagccgtgtgtttttgctagacagggggaatacgcgagataaggaagctagcaaagaaaaaggaagcgaaaaagggagggctgagggcgagtgggaggaccaggaagctctggattatttctccgacaaggagtcaggaaagcaaaaattcaacgacagtgaaggggacgataccgaggaaaccgaggactatcgccagttccgtaaaagtgttctggcagatcagggcaagtcatttgctaccgcctcccaccggaacacagaagaggaggggcttaagtacaaatcaaaagtctcactgaaaggtaatcgagagtccgatggtttcagagaggaaaaaaattacaaactgaaggaaacaggatatgtggtggaacgcccttcaacgacaaaagacaaacacaaggaggaggacaagaactccgaacgaattactgtcaagaaggaaacgcagagcccagagcaggtgaaatctgaaaaactcaaggatctgtttgactattcaccccctctgcacaagaatctggatgccagggaaaaatcaacctttcgagaggagagccctctgagaataaaaatgatagcctccgattcacatcgccctgaagtaaagctgaaaatggccccagtgcccttggatgacagcaacagacccgctagtctgacaaaggataggcttctggcctcaactcttgtgcattccgtgaagaaagagcaggaattccgctctatcttcgaccatatcaagcttccacaggcctcaaaatccacttctgagagcttcatccagcatatcgtctccctggttcaccatgtcaaggagcagtactttaaatctgcggctatgaccctgaacgaaagattcaccagttatcagaaggccacggaggaacactcaaccaggcagaagtctccagaaatccaccggcgtattgacatcagcccatctaccttaaggaagcacaccaggcttgcgggtgaagaacgagtgtttaaagaggagaatcagaagggagacaagaagctacgctgcgattcagccgatcttagacacgatatagatagaagaagaaaagagcgaagcaaggaaaggggtgatagtaaagggtcaagggagagcagtggatctcgaaaacaagagaagacgccaaaagattataaggagtacaagtcgtataaggatgattcgaaacacaaaagagagcaggatcattctcgcagctcttcttctagcgcctctcctagcagtccatcgtcgcgggaggagaaggagtcgaaaaaagagagggaagaggaatttaagacacatcatgagatgaaggagtatagcggatttgccggtgtgagccggccaaggggcacatttttccgcattcggggaaggggtcgggcaaggggggtctttgcagggactaacaccggaccaaataattccaacacaacattccagaaaagaccgaaagaagaggaatgggaccccgagtacacgcctaaatcaaagaagtattttttacacgatgacagggatgacggagttgactactgggcaaagcgcggacggggtagggggacatttcagcgcggaaggggcaggttcaatttcaagaaaagcggctctagccctaaatggactcatgataaatatcagggagatggtatcgtagaagacgaagaggagaccatggagaacaacgaggaaaagaaagatcggcgtaaggaagagaaggaatag

SEQ ID NO: 113288 - DNA, 4373 bp, Artificial Sequence
  derived and/or modified sequence
ttcctcgcgttcttgagtcgggaaatggccgctgtgtggttgcaacggagataaattcccggaaccgcgattcggcgtgtcaggaattcgaatttagagtttaatttctcagagcattctctccaggaagaatttttacagtatctcaaagacttcacttgacttcttgatcctgcataaaaccaaggagaaaagaaatgggtcgctccaattctagatcacattcttcaaggtcaaagtctagatcacagtctagttctcgatcaagatcaagatctcattctagaaagaagcgatacaggtctcgttccagaacatattcaaggtctcgtagtagagatcgtatgtattctagagattatcgtcgcgattacagaaataatagaggaatgagacgaccttatgggtacagaggaaggggtagagggtattatcaaggaggaggaggtagatatcatcgaggtggttatagacctgtctggaatagaaggcactctaggagtcctagacgaggtcgttcacgttccaggagtccaaaaagaagatccgtttcttctcaaagatccagaagcagatctcgccggtcatatagatcttctaggtctccaagatcatcctcttctcgttcttcatccccatatagcaaatctcctgtttctaaaagacgagggtctcaggaaaaacaaaccaaaaaagctgaaggggaaccccaagaagagagtccgttgaaaagtaaatcacaggaggaaccgaaagatacatttgaacatgacccatctgagtctatcgatgaatttaataagtcatcagccacatccggtgatatttggcctggcctttcagcttatgataatagtcctagatcaccccatagtccttcacctattgctacaccacctagtcagagttcatcttgctctgatgctcccatgctcagtacagttcactctgcaaaaaatactccttctcagcattcacattccattcagcatagtcctgaaaggtctgggtctggttctgttggaaatggatctagtcgatacagtccttctcagaatagtccaattcatcacatcccttcacgaagaagtcctgcaaagacaatcgcaccacagaatgctccaagagatgagtctaggggccgttcctcgttttatcctgatggtggagatcaggaaactgcaaagactgggaagttcttaaaaaggttcacagatgaagagtctagagtattcctgcttgataggggtaataccagggataaagaggcttcaaaagagaaaggatcagagaaagggagggcagagggagaatgggaagatcaggaagctctagattacttcagtgataaagagtctggaaaacaaaagtttaatgattcagaaggggatgacacagaggagacagaggattatagacagttcaggaagtcagtcctcgcagatcagggtaaaagttttgctactgcatctcaccggaatactgaggaggaaggactcaagtacaagtccaaagtttcactgaaaggcaatagagaaagtgatggatttagagaagaaaaaaattataaacttaaagagactggatatgtagtggaaaggcctagcactacaaaagataagcacaaagaagaagacaaaaattctgaaagaataacagtaaagaaagaaactcagtcacctgagcaggtaaagtctgaaaagctcaaagacctctttgattacagtccccctctacacaagaatctggatgcacgagaaaagtctaccttcagagaggaaagcccacttaggatcaaaatgatagcgagtgattctcaccgtcctgaagtcaaactcaaaatggcacctgttcctcttgatgattctaacagacctgcttccttgactaaagacaggctgcttgctagtacacttgtccattctgtcaagaaggagcaagaattccgatccatctttgaccacattaagttgccacaggccagcaaaagcacttcagagtcatttattcaacacattgtgtccttggttcatcatgttaaagagcaatacttcaagtcagctgcaatgaccctaaacgagcggttcacttcgtatcagaaagccactgaagaacatagtactcggcaaaagagccctgaaatacacaggagaattgacatctcaccaagtaccctgaggaagcatacccgtttagcaggggaagagagagtttttaaagaagaaaatcaaaagggagataaaaaattaaggtgtgactctgctgaccttcggcatgacattgatcgccgtagaaaagaaagaagtaaagaacggggagattccaagggctccagggaatccagtggatcaagaaagcaggaaaaaactccaaaagattacaaggaatacaaatcttacaaagatgacagtaaacataaaagagagcaagatcattctcgatcttcatcctcttcagcatcaccttcttctcccagttctcgagaagaaaaggagagtaagaaggaaagagaagaagaatttaaaactcaccatgaaatgaaagaatactcaggctttgcaggagttagccgaccacgaggaaccttttttcgaattagaggcagaggaagagccagaggagtttttgctgggacaaatactggtccaaacaactcaaatactacttttcaaaagagaccgaaggaagaggaatgggatccagaatataccccaaagagcaagaagtacttcttgcatgacgacagagatgatggtgtggattattgggccaaaagaggaagaggtcgtggtacttttcaacgtggcagagggcgctttaacttcaaaaaatcaggtagcagtcctaaatggactcatgacaaataccaaggggatgggattgttgaagatgaagaagagaccatggaaaataatgaagaaaagaaggacagacgcaaggaagaaaaggaataataaatatgaagtaagattacaacagagcagaacttgcacccaccattttttttacctgatttttgttttcaaataagaatgtaagcattttacttaaattttactgtttgcaagtagtctatagaaattttgttttaagtcttcaaatatcttgagaaatagtagactgtatgttgaaaattgtactgaaataaagtagaaaattgttacgtaccatatttgtaactatcaacttttaaaacttttaacgtttttgttacatgcattgtaattctgctttgtctataagatatggtcaagtacagctctgtgaaagttctgattctcttccttccctgtttgtcaatgttttattctgaagtaaacgttagctctacatataaatcctggaacagaaattgtttatagagactacactaattattttaactgtatacatctgtttaatttgaacacactacatcgtagggtgactgatttttgaagtataccacagacaaaaagttgttactatggtaaactaagctagtttaacacttgagcaaatgcttaagaaggaattaaaaaaaaaaagctttgccaatagctaaaaagtacaagctattaaaaatcagattgaaaagttttgagaaaatgttatttttactgaaagcaagcagtggcctataaagaacattcttaggagccttttctatttgcgttcaaaactgtgtgttctctttctattcctatttgatagtttgagtcatggtcttagatattagctatttgtgagaggaaactggtttgtaacaatactgcaaatagaaaccccatttctactgaacatcctagttttaaacagaagaaaaactgtaatcctggggttggtatgtaggaggtctatcctgcagaataagttgatacattagtacctgatttcatatcttacatatttatttgagctgaacattagtttgtagtgtaactattagtaaaaatagagaaacacagcatactgttcattaatagtattttaaaaaaattgtttttcaaatgtcaccaataaaagttttggcaggaagcttgttgcggcattgatctaacctttttcccccccatttcagttgcagtttttgtagaatggctttttctttttcctcttaagagttctattcttcaggtagataatttttcaaatgtgaattatcttttgtgtctatattgatagctcttaaaggagtgaaaatctaaaatagtaaatttcaatgttaagtgtctgctttatgggcatatataaaagtagacacatttcatttgttaatttagttgtgtgtgtgtgttaaaaggagctaatgcttattctgttaatgtaaacttttgaagatcttaagtgtattgctctttcatcttaaacactttcgaggatttgcagtgcgt

SEQ ID NO: 113289 - DNA, 7263 bp, Artificial Sequence
  derived and/or modified sequence
gccccagatcggaagtgacggagacgtgctagcgcgtcgaaggtagctctatggttttcctcgcgttcttgagtcgggaaatggccgctgtgtggttgcaacggagataaattcccggaaccgcgattcggcgtgtcaggaattcgaatttagagtttaatttctcagagcattctctccaggaagaatttttacagtatctcaaagacttcacttgacttcttgatcctgcataaaaccaaggagaaaagaaatgggtcgctccaattctagatcacattcttcaaggtcaaagtctagatcacagtctagttctcgatcaagatcaagatctcattctagaaagaagcgatacagttctaggtctcgttccagaacatattcaaggtctcgtagtagagatcgtatgtattctagagattatcgtcgcgattacagaaataatagaggaatgagacgaccttatgggtacagaggaaggggtagagggtattatcaaggaggaggaggtagatatcatcgaggtggttatagacctgtctggaatagaaggcactctaggagtcctagacgaggtcgttcacgttccaggagtccaaaaagaagatccgtttcttctcaaagatccagaagcagatctcgccggtcatatagatcttctaggtctccaagatcatcctcttctcgttcttcatccccatatagcaaatctcctgtttctaaaagacgagggtctcaggaaaaacaaaccaaaaaagctgaaggggaaccccaagaagagagtccgttgaaaagtaaatcacaggaggaaccgaaagatacatttgaacatgacccatctgagtctatcgatgaatttaataagtcatcagccacatccggtgatatttggcctggcctttcagcttatgataatagtcctagatcaccccatagtccttcacctattgctacaccacctagtcagagttcatcttgctctgatgctcccatgctcagtacagttcactctgcaaaaaatactccttctcagcattcacattccattcagcatagtcctgaaaggtctgggtctggttctgttggaaatggatctagtcgatacagtccttctcagaatagtccaattcatcacatcccttcacgaagaagtcctgcaaagacaatcgcaccacagaatgctccaagagatgagtctaggggccgttcctcgttttatcctgatggtggagatcaggaaactgcaaagactgggaagttcttaaaaaggttcacagatgaagagtctagagtattcctgcttgataggggtaataccagggataaagaggcttcaaaagagaaaggatcagagaaagggagggcagagggagaatgggaagatcaggaagctctagattacttcagtgataaagagtctggaaaacaaaagtttaatgattcagaaggggatgacacagaggagacagaggattatagacagttcaggaagtcagtcctcgcagatcagggtaaaagttttgctactgcatctcaccggaatactgaggaggaaggactcaagtacaagtccaaagtttcactgaaaggcaatagagaaagtgatggatttagagaagaaaaaaattataaacttaaagagactggatatgtagtggaaaggcctagcactacaaaagataagcacaaagaagaagacaaaaattctgaaagaataacagtaaagaaagaaactcagtcacctgagcaggtaaagtctgaaaagctcaaagacctctttgattacagtccccctctacacaagaatctggatgcacgagaaaagtctaccttcagagaggaaagcccacttaggatcaaaatgatagcgagtgattctcaccgtcctgaagtcaaactcaaaatggcacctgttcctcttgatgattctaacagacctgcttccttgactaaagacaggctgcttgctagtacacttgtccattctgtcaagaaggagcaagaattccgatccatctttgaccacattaagttgccacaggccagcaaaagcacttcagagtcatttattcaacacattgtgtccttggttcatcatgttaaagagcaatacttcaagtcagctgcaatgaccctaaacgagcggttcacttcgtatcagaaagccactgaagaacatagtactcggcaaaagagccctgaaatacacaggagaattgacatctcaccaagtaccctgaggaagcatacccgtttagcaggggaagagagagtttttaaagaagaaaatcaaaagggagataaaaaattaaggtgtgactctgctgaccttcggcatgacattgatcgccgtagaaaagaaagaagtaaagaacggggagattccaagggctccagggaatccagtggatcaagaaagcaggaaaaaactccaaaagattacaaggaatacaaatcttacaaagatgacagtaaacataaaagagagcaagatcattctcgatcttcatcctcttcagcatcaccttcttctcccagttctcgagaagaaaaggagagtaagaaggaaagagaagaagaatttaaaactcaccatgaaatgaaagaatactcaggctttgcaggagttagccgaccacgaggaaccttttttcgaattagaggcagaggaagagccagaggagtttttgctgggacaaatactggtccaaacaactcaaatactacttttcaaaagagaccgaaggaagaggaatgggatccagaatataccccaaagagcaagaagtacttcttgcatgacgacagagatgatggtgtggattattgggccaaaagaggaagaggtcgtggtacttttcaacgtggcagagggcgctttaacttcaaaaaatcaggtagcagtcctaaatggactcatgacaaataccaaggggatgggattgttgaagatgaagaagagaccatggaaaataatgaagaaaagaaggacagacgcaaggaagaaaaggaataataaatatgaagtaagattacaacagagcagaacttgcacccaccattttttttacctgatttttgttttcaaataagaatgtaagcattttacttaaattttactgtttgcaagtagtctatagaaattttgttttaagtcttcaaatatcttgagaaatagtagactgtatgttgaaaattgtactgaaataaagtagaaaattgttacgtaccatatttgtaactatcaacttttaaaacttttaacgtttttgttacatgcattgtaattctgctttgtctataagatatggtcaagtacagctctgtgaaagttctgattctcttccttccctgtttgtcaatgttttattctgaagtaaacgttagctctacatataaatcctggaacagaaattgtttatagagactacactaattattttaactgtatacatctgtttaatttgaacacactacatcgtagggtgactgatttttgaagtataccacagacaaaaagttgttactatggtaaactaagctagtttaacacttgagcaaatgcttaagaaggaattaaaaaaaaaaagctttgccaatagctaaaaagtacaagctattaaaaatcagattgaaaagttttgagaaaatgttatttttactgaaagcaagcagtggcctataaagaacattcttaggagccttttctatttgcgttcaaaactgtgtgttctctttctattcctatttgatagtttgagtcatggtcttagatattagctatttgtgagaggaaactggtttgtaacaatactgcaaatagaaaccccatttctactgaacatcctagttttaaacagaagaaaaactgtaatcctggggttggtatgtaggaggtctatcctgcagaataagttgatacattagtacctgatttcatatcttacatatttatttgagctgaacattagtttgtagtgtaactattagtaaaaatagagaaacacagcatactgttcattaatagtattttaaaaaaattgtttttcaaatgtcaccaataaaagttttggcaggaagcttgttgcggcattgatctaacctttttcccccccatttcagttgcagtttttgtagaatggctttttctttttcctcttaagagttctattcttcaggtagataatttttcaaatgtgaattatcttttgtgtctatattgatagctcttaaaggagtgaaaatctaaaatagtaaatttcaatgttaagtgtctgctttatgggcatatataaaagtagacacatttcatttgttaatttagttgtgtgtgtgtgttaaaaggagctaatgcttattctgttaatgtaaacttttgaagatcttaagtgtattgctctttcatcttaaacactttcgaggatttgcagtgcgtctagcacctagattacagccaggaacattggttaagaactgttggaaacaaaactaaaagcaaactcaacatatgtgatgtttatggccctcagatccttagtattgtgtgattttcccccgttaacatgtctttctaaaattgtctattaaagcagaggaaatacctgccaaaggaagtatgtattgcattaatcagggcataactaatattctcctgttcagaataatacttatttacgtgtgaaagcaacatggatgtgattcccaacacagaattttcatgacccttttattgtatacaaataaataccataacagttacttggttagacatcaaatctgtgtgcatgactatgtgcttatccacttaagacaataggtaaaaggggatctgagaaattatgtaatagggagtgggaataaaactacttaattcctgtgggcaggttatattttaagttcaaatgcattgctttaacctttggttacttttattctgttaaacagaattgaagaaagagtattataccagagtgtagtaggctagggtgattgtaagaactctgtaatagaatgtcattgtggatgttacctttttcagatccaagcatataaaaagcctgtatattttttaaaaacacatcttaactccacgctttacgatattataaaagttgaatggttcctcttggtaaggatatttgcttacaagtgctaggaaataactcactgatacctgcgttaacatactttgttttgcctagagaggggcaataaaaatgaaccaaaggatatttccagaaaggattaagaaagctgtttaagaaggccatgactctttaggtgtgtatgtgtacctttcagcatcctaggaatttttatactaaaagcaaaatgttttttccagttagtcttcttcaaggaattactattgttccttttgtcacaggtaaaatcagtgttgggaattataatttgagaaaaatattacccagtaacattgaatgtagatggctaaacgattcttactcagtgtgatgtataatgatgcaacagggacccttgtaaattgtcatacgccaataaaatgtcacaagtaataactgctgttgtttgtttacctgtgtctatttcacacatcttatttctgtggcctattttagaatatcagcgcatctgttaggaagattactggtgtggtaaggcttgataaatgctttataaactccctcaaacctttctttactgtttttttgttttgtcttgtttttgtttttgtttttgtttttgtttttgtttttgtttttcccttgtctcccctgggaaaatgggaaattttacagttggtaaatctaagccaaaattattttgaaataaaggaattctggatgtccagtttagtcctcgttttcttacgttaatctgggaccttatcacccataatatggtgattacttctctttctaaaaacatagtagctagtaaataagtaaaaagaattgtcttttcattcactttaagtaagatgtggtataattcttaccatgtgccatcctgtcagttttaacaaagcattttcacagaaatttgtgtactaagacaaactgacacattttgactcatacaaatggcaaattagtccttaaaaattctgtgagagaaataactctgtgtgtacatacatatgcatgtaaagtgttgtgtaagatcattggtagcttaattatactggataattgtaatgttatatacaaatttcttatataaaagtatgctgcattattaacatttgtttaacttttcttatttttctttttctgggtttcaactggaatcccattggtggggatgtaccttaagtttccttgtggaataatagactttcacatccagaaagagaagttcagaggcctttctcaatttacagagttgaagaggaaaggcaaatggaggaataaacttcattgtcattgggattaatttggctagactcaatctcttgagccttaaaatgagaaagtaatatccattacatgtttagagttctcaaatagttgatactattattaaatgtttcaaattttattggggtagatactaaaaattagtacactgtcctaatgaagtttaaatgaacaagttttacatttcttaggattcaggaatatatggaatctagttgtatttaattgacttgagagccacagagattgtgttgatttatgagctggactcctattgttttagaaacatgcagtaatgattaacttgtgtcaatgatggtaatgagaccaaacttgtacatttaattaagggtaccagttctttttatgttactagactataccttggcctttaaaaatgaatctcactgattaaagagaacaggcattattaggatagcattccaccacaactagaaacattcaaataatgtgtcttaattgtaatctgtatataggaaaatttttcctatggatatttttggtgttttaccacagtgaactgatttgtagcacttatgaagtgcagaaggtaatattcttgaaaatagaaaaaggttgggtgagcaggctttaatgcctttcccccaagaatatacatcgaatttttcttaatcttttggggttggccagcttccagatttcattaataatgagctctgcctttaataaaagtacatgatcatagctacactgtatgtttaggtggtgtgaaatgatttataatcacagcttgaactgtgtttgcttggtactgtcatagtgattacaaatttcatggaatgcgaagagcaacaataaataaaaaataccactcaccctc

SEQ ID NO: 113290 - DNA, 2757 bp, Artificial Sequence
  derived and/or modified sequence
atgggcagaagcaacagcagaagccacagcagcagaagcaagagcagaagccagagcagcagcagaagcagaagcagaagccacagcagaaagaagagatacagaagcagaagcagaacctacagcagaagcagaagcagagacagaatgtacagcagagactacagaagagactacagaaacaacagaggcatgagaagaccctacggctacagaggcagaggcagaggctactaccagggcggcggcggcagataccacagaggcggctacagacccgtgtggaacagaagacacagcagaagccccagaagaggcagaagcagaagcagaagccccaagagaagaagcgtgagcagccagagaagcagaagcagaagcagaagaagctacagaagcagcagaagccccagaagcagcagcagcagaagcagcagcccctacagcaagagccccgtgagcaagagaagaggcagccaggagaagcagaccaagaaggccgagggcgagccccaggaggagagccccctgaagagcaagagccaggaggagcccaaggacaccttcgagcacgaccccagcgagagcatcgacgagttcaacaagagcagcgccaccagcggcgacatctggcccggcctgagcgcctacgacaacagccccagaagcccccacagccccagccccatcgccaccccccccagccagagcagcagctgcagcgacgcccccatgctgagcaccgtgcacagcgccaagaacacccccagccagcacagccacagcatccagcacagccccgagagaagcggcagcggcagcgtgggcaacggcagcagcagatacagccccagccagaacagccccatccaccacatccccagcagaagaagccccgccaagaccatcgccccccagaacgcccccagagacgagagcagaggcagaagcagcttctaccccgacggcggcgaccaggagaccgccaagaccggcaagttcctgaagagattcaccgacgaggagagcagagtgttcctgctggacagaggcaacaccagagacaaggaggccagcaaggagaagggcagcgagaagggcagagccgagggcgagtgggaggaccaggaggccctggactacttcagcgacaaggagagcggcaagcagaagttcaacgacagcgagggcgacgacaccgaggagaccgaggactacagacagttcagaaagagcgtgctggccgaccagggcaagagcttcgccaccgccagccacagaaacaccgaggaggagggcctgaagtacaagagcaaggtgagcctgaagggcaacagagagagcgacggcttcagagaggagaagaactacaagctgaaggagaccggctacgtggtggagagacccagcaccaccaaggacaagcacaaggaggaggacaagaacagcgagagaatcaccgtgaagaaggagacccagagccccgagcaggtgaagagcgagaagctgaaggacctgttcgactacagcccccccctgcacaagaacctggacgccagagagaagagcaccttcagagaggagagccccctgagaatcaagatgatcgccagcgacagccacagacccgaggtgaagctgaagatggcccccgtgcccctggacgacagcaacagacccgccagcctgaccaaggacagactgctggccagcaccctggtgcacagcgtgaagaaggagcaggagttcagaagcatcttcgaccacatcaagctgccccaggccagcaagagcaccagcgagagcttcatccagcacatcgtgagcctggtgcaccacgtgaaggagcagtacttcaagagcgccgccatgaccctgaacgagagattcaccagctaccagaaggccaccgaggagcacagcaccagacagaagagccccgagatccacagaagaatcgacatcagccccagcaccctgagaaagcacaccagactggccggcgaggagagagtgttcaaggaggagaaccagaagggcgacaagaagctgagatgcgacagcgccgacctgagacacgacatcgacagaagaagaaaggagagaagcaaggagagaggcgacagcaagggcagcagagagagcagcggcagcagaaagcaggagaagacccccaaggactacaaggagtacaagagctacaaggacgacagcaagcacaagagagagcaggaccacagcagaagcagcagcagcagcgccagccccagcagccccagcagcagagaggagaaggagagcaagaaggagagagaggaggagttcaagacccaccacgagatgaaggagtacagcggcttcgccggcgtgagcagacccagaggcaccttcttcagaatcagaggcagaggcagagccagaggcgtgttcgccggcaccaacaccggccccaacaacagcaacaccaccttccagaagagacccaaggaggaggagtgggaccccgagtacacccccaagagcaagaagtacttcctgcacgacgacagagacgacggcgtggactactgggccaagagaggcagaggcagaggcaccttccagagaggcagaggcagattcaacttcaagaagagcggcagcagccccaagtggacccacgacaagtaccagggcgacggcatcgtggaggacgaggaggagaccatggagaacaacgaggagaagaaggacagaagaaaggaggagaaggagtag

SEQ ID NO: 113291 - DNA, 2763 bp, Artificial Sequence
  derived and/or modified sequence
atgggcagaagcaacagcagaagccacagcagcagaagcaagagcagaagccagagcagcagcagaagcagaagcagaagccacagcagaaagaagagatacagcagcagaagcagaagcagaacctacagcagaagcagaagcagagacagaatgtacagcagagactacagaagagactacagaaacaacagaggcatgagaagaccctacggctacagaggcagaggcagaggctactaccagggcggcggcggcagataccacagaggcggctacagacccgtgtggaacagaagacacagcagaagccccagaagaggcagaagcagaagcagaagccccaagagaagaagcgtgagcagccagagaagcagaagcagaagcagaagaagctacagaagcagcagaagccccagaagcagcagcagcagaagcagcagcccctacagcaagagccccgtgagcaagagaagaggcagccaggagaagcagaccaagaaggccgagggcgagccccaggaggagagccccctgaagagcaagagccaggaggagcccaaggacaccttcgagcacgaccccagcgagagcatcgacgagttcaacaagagcagcgccaccagcggcgacatctggcccggcctgagcgcctacgacaacagccccagaagcccccacagccccagccccatcgccaccccccccagccagagcagcagctgcagcgacgcccccatgctgagcaccgtgcacagcgccaagaacacccccagccagcacagccacagcatccagcacagccccgagagaagcggcagcggcagcgtgggcaacggcagcagcagatacagccccagccagaacagccccatccaccacatccccagcagaagaagccccgccaagaccatcgccccccagaacgcccccagagacgagagcagaggcagaagcagcttctaccccgacggcggcgaccaggagaccgccaagaccggcaagttcctgaagagattcaccgacgaggagagcagagtgttcctgctggacagaggcaacaccagagacaaggaggccagcaaggagaagggcagcgagaagggcagagccgagggcgagtgggaggaccaggaggccctggactacttcagcgacaaggagagcggcaagcagaagttcaacgacagcgagggcgacgacaccgaggagaccgaggactacagacagttcagaaagagcgtgctggccgaccagggcaagagcttcgccaccgccagccacagaaacaccgaggaggagggcctgaagtacaagagcaaggtgagcctgaagggcaacagagagagcgacggcttcagagaggagaagaactacaagctgaaggagaccggctacgtggtggagagacccagcaccaccaaggacaagcacaaggaggaggacaagaacagcgagagaatcaccgtgaagaaggagacccagagccccgagcaggtgaagagcgagaagctgaaggacctgttcgactacagcccccccctgcacaagaacctggacgccagagagaagagcaccttcagagaggagagccccctgagaatcaagatgatcgccagcgacagccacagacccgaggtgaagctgaagatggcccccgtgcccctggacgacagcaacagacccgccagcctgaccaaggacagactgctggccagcaccctggtgcacagcgtgaagaaggagcaggagttcagaagcatcttcgaccacatcaagctgccccaggccagcaagagcaccagcgagagcttcatccagcacatcgtgagcctggtgcaccacgtgaaggagcagtacttcaagagcgccgccatgaccctgaacgagagattcaccagctaccagaaggccaccgaggagcacagcaccagacagaagagccccgagatccacagaagaatcgacatcagccccagcaccctgagaaagcacaccagactggccggcgaggagagagtgttcaaggaggagaaccagaagggcgacaagaagctgagatgcgacagcgccgacctgagacacgacatcgacagaagaagaaaggagagaagcaaggagagaggcgacagcaagggcagcagagagagcagcggcagcagaaagcaggagaagacccccaaggactacaaggagtacaagagctacaaggacgacagcaagcacaagagagagcaggaccacagcagaagcagcagcagcagcgccagccccagcagccccagcagcagagaggagaaggagagcaagaaggagagagaggaggagttcaagacccaccacgagatgaaggagtacagcggcttcgccggcgtgagcagacccagaggcaccttcttcagaatcagaggcagaggcagagccagaggcgtgttcgccggcaccaacaccggccccaacaacagcaacaccaccttccagaagagacccaaggaggaggagtgggaccccgagtacacccccaagagcaagaagtacttcctgcacgacgacagagacgacggcgtggactactgggccaagagaggcagaggcagaggcaccttccagagaggcagaggcagattcaacttcaagaagagcggcagcagccccaagtggacccacgacaagtaccagggcgacggcatcgtggaggacgaggaggagaccatggagaacaacgaggagaagaaggacagaagaaaggaggagaaggagtag

SEQ ID NO: 113292 - protein, 127 aa, Artificial Sequence
  derived and/or modified sequence
MLYVYDPPTTIPPPTTTTTTTTTTTTTILTIITDTTATTEPAVHDSRAGEEGSIRAVDHAVIGGVVAVVVFAMLCLLIILGRYFARHKGTYFTHEAKGADDAADADTAIINAEGGQNNSEEKKEYFI

SEQ ID NO: 113293 - DNA, 649 bp, Artificial Sequence
  derived and/or modified sequence
agccatcgggaagccccagcctgtgatggtaacttgggtgagagtcgatgatgaaatgcctcaacacgccgtactgtctgggcccaacctgttcatcaataacctaaacaaaacagataatggtacataccgctgtgaagcttcaaacatagtggggaaagctcactcggattatatgctgtatgtatacgatccccccacaactatccctcctcccacaacaaccaccaccaccaccaccaccaccaccaccaccatccttaccatcatcacagacacaacggcgacgacagaaccagcagttcacgattcccgagcaggtgaagaaggctcgatcagggcagtggatcatgccgtgatcggtggcgtcgtggcggtggtggtgttcgccatgctgtgcttgctcatcattctggggcgctattttgccagacataaaggtacatacttcactcatgaagccaaaggagccgatgacgcagcagacgcagacacagctataatcaatgcagaaggaggacagaacaactccgaagaaaagaaagagtacttcatctagatcagcctttttgtttcaatgaggtgtccaactggccctatttagatgataaagagacagtgatattggaacttgcgagaaattcgtgtg

SEQ ID NO: 113294 - protein, 290 aa, Artificial Sequence
  derived and/or modified sequence
MWMHVAKVHPKGGEMVGAIRNAAFLAKPSIPQVPNYRLSMTIPDWLQAIQNYMKTLQYNHTGTQFFEIRKMRPLSGLMETAKEMTRESLPIKCLEAVILGIYLTNGQPSIERFPISFKTYFSGNYFHHVVLGIYCNGRYGSLGMSRRAELMDKPLTFRTLSDLIFDFEDSYKKYLHTVKKVKIGLYVPHEPHSFQPIEWKQLVLNVSKMLRADIRKELEKYARDMRMKILKPASAHSPTQVRSRGKSLSPRRRQASPPRRLGRREKSPALPEKKVADLSTLNEVGYQIRI

SEQ ID NO: 113295 - protein, 355 aa, Artificial Sequence
  derived and/or modified sequence
MTGSAADTHRCPHPKGAKGTRSRSSHARPVSLATSGGSEEEDKDGGVLFHVNKSGFPIDSHTWERMWMHVAKVHPKGGEMVGAIRNAAFLAKPSIPQVPNYRLSMTIPDWLQAIQNYMKTLQYNHTGTQFFEIRKMRPLSGLMETAKEMTRESLPIKCLEAVILGIYLTNGQPSIERFPISFKTYFSGNYFHHVVLGIYCNGRYGSLGMSRRAELMDKPLTFRTLSDLIFDFEDSYKKYLHTVKKVKIGLYVPHEPHSFQPIEWKQLVLNVSKMLRADIRKELEKYARDMRMKILKPASAHSPTQVRSRGKSLSPRRRQASPPRRLGRREKSPALPEKKVADLSTLNEVGYQIRI

SEQ ID NO: 113296 - DNA, 1068 bp, Artificial Sequence
  derived and/or modified sequence
atgaccggcagcgccgccgacacccacagatgcccccaccccaagggcgccaagggcaccagaagcagaagcagccacgccagacccgtgagcctggccaccagcggcggcagcgaggaggaggacaaggacggcggcgtgctgttccacgtgaacaagagcggcttccccatcgacagccacacctgggagagaatgtggatgcacgtggccaaggtgcaccccaagggcggcgagatggtgggcgccatcagaaacgccgccttcctggccaagcccagcatcccccaggtgcccaactacagactgagcatgaccatccccgactggctgcaggccatccagaactacatgaagaccctgcagtacaaccacaccggcacccagttcttcgagatcagaaagatgagacccctgagcggcctgatggagaccgccaaggagatgaccagagagagcctgcccatcaagtgcctggaggccgtgatcctgggcatctacctgaccaacggccagcccagcatcgagagattccccatcagcttcaagacctacttcagcggcaactacttccaccacgtggtgctgggcatctactgcaacggcagatacggcagcctgggcatgagcagaagagccgagctgatggacaagcccctgaccttcagaaccctgagcgacctgatcttcgacttcgaggacagctacaagaagtacctgcacaccgtgaagaaggtgaagatcggcctgtacgtgccccacgagccccacagcttccagcccatcgagtggaagcagctggtgctgaacgtgagcaagatgctgagagccgacatcagaaaggagctggagaagtacgccagagacatgagaatgaagatcctgaagcccgccagcgcccacagccccacccaggtgagaagcagaggcaagagcctgagccccagaagaagacaggccagcccccccagaagactgggcagaagagagaagagccccgccctgcccgagaagaaggtggccgacctgagcaccctgaacgaggtgggctaccagatcagaatctag

SEQ ID NO: 113297 - DNA, 1369 bp, Artificial Sequence
  derived and/or modified sequence
gttgcggtggccaatagacgcattcggaacatcggcggctgcccgggtgacttggttatatgtcacagaataacattcgagaatgggacatggaatgaggcgacggccccagcaagccccagcagccccagccccagccccaggcccagcagcagcagcagcagcccctgctctcccgccgcccggagaggctctgcagccatgaagccaaccgtcccgaggcaccgccggtaagcagggagcctccgcggagctcccgccgccgctcccccttggtgacctcgccaccagcgggggctcagaggaggaggacaaagacggcggggtgctgttccacgtcaacaagagcggcttccccatcgacagccacacctgggagcgcatgtggatgcacgtggccaaggtgcaccctaaggggggagaaatggtgggcgccatcaggaacgccgccttcttggcaaagccttcaataccccaggtcccaaactacaggctgtcgatgacgatcccagactggctccaggcgatccagaattacatgaagaccctacaatataatcacacagggacccagttctttgaaattaggaaaatgagaccgctgagtgggttaatggaaacagcaaaagaaatgacccgagagtccttgcctatcaaatgccttgaagctgtcatcctgggcatctacttaaccaatgggcagccttccattgagcggttccccatcagctttaaaacctacttctcaggaaactactttcaccacgttgtgctggggatttactgcaatggccgctatggctcattgggcatgagccgcagggctgagctgatggacaagccattgacttttcggactctgagtgacctcatctttgactttgaggactcttacaagaaatacctgcacacagtcaagaaggtcaagattgggctgtacgtcccccatgagcctcatagcttccagcccattgagtggaagcagctggtcctcaacgtctcaaagatgctgagggctgacataaggaaggagctggagaaatatgccagggacatgagaatgaagatcctgaaacctgcaagtgcccactctccgacccaagtgagaagccggggaaaatccctgtcccccagaaggagacaggcaagccccccgaggaggctcggccggcgagagaagtcgcctgcactgcctgaaaagaaggtggctgatctgagcactctgaatgaagtgggctatcaaatccgaatttagccaagccataccggccagcaagagggtttctgtggtgcttctctctgcactttacccagcatcttcaggaggaactgcaactatttattaagaacttgtgaattttatttttaa

SEQ ID NO: 113298 - DNA, 4224 bp, Artificial Sequence
  derived and/or modified sequence
attcgagaatgggacatggaatgaggcgacggccccagcaagccccagcagccccagccccagccccaggcccagcagcagcagcagcagcccctgctctcccgccgcccggagaggctctgcagccatgaagccaaccgtcccgaggcaccgccggtaagcagggagcctccgcggagctcccgccgccgctcccccttggcgccaaaggcacccggtcccggagcagccacgcgcggcccgtgagcctcgccaccagcgggggctcagaggaggaggacaaagacggcggggtgctgttccacgtcaacaagagcggcttccccatcgacagccacacctgggagcgcatgtggatgcacgtggccaaggtgcaccctaaggggggagaaatggtgggcgccatcaggaacgccgccttcttggcaaagccttcaataccccaggtcccaaactacaggctgtcgatgacgatcccagactggctccaggcgatccagaattacatgaagaccctacaatataatcacacagggacccagttctttgaaattaggaaaatgagaccgctgagtgggttaatggaaacagcaaaagaaatgacccgagagtccttgcctatcaaatgccttgaagctgtcatcctgggcatctacttaaccaatgggcagccttccattgagcggttccccatcagctttaaaacctacttctcaggaaactactttcaccacgttgtgctggggatttactgcaatggccgctatggctcattgggcatgagccgcagggctgagctgatggacaagccattgacttttcggactctgagtgacctcatctttgactttgaggactcttacaagaaatacctgcacacagtcaagaaggtcaagattgggctgtacgtcccccatgagcctcatagcttccagcccattgagtggaagcagctggtcctcaacgtctcaaagatgctgagggctgacataaggaaggagctggagaaatatgccagggacatgagaatgaagatcctgaaacctgcaagtgcccactctccgacccaagtgagaagccggggaaaatccctgtcccccagaaggagacaggcaagccccccgaggaggctcggccggcgagagaagtcgcctgcactgcctgaaaagaaggtggctgatctgagcactctgaatgaagtgggctatcaaatccgaatttagccaagccataccggccagcaagagggtttctgtggtgcttctctctgcactttacccagcatcttcaggaggaactgcaactatttattaagaacttgtgaattttatttttaaggattcacctggaaatagaatctgagtgggtggtaaccattagctttaaaaaattcactaaaaggcaccatgaaaaggctgaagtaataagccccactggggttggactatgtccctcactcaagatcttaaggataaccgtaactgaagttttatatttttccatttacctactttcttttacttgctttgaacattatgcctcaccaatagtaaatgttcatgaaataatctcttgaacttttggtatagtaaggtaactctaacagtattactgtctttttcagcaataacagaaagcaaaaatgggtgggttttttttaagcagttattacctcagcattttgacatcagatatgcaaacttaatggcgttttgtttttttatattctatttgtattctttccccagtatttcccatggggatctccacaagtttggagttttttcctggtgcacacacgtgaggagatttaaggtactatatgcaagtgttttactaaaaagcactgaaattcttctggcaatacaagaaccattttcaggatcttggagttacttccttcttaatctttcttaaagcattcactgatgtttttgttttttcaaaatgaaacaaaaatatcacattgagaagctagtctatgttctgtcactaacatttaaactttgcagactctaacaaaaagcacaagaggtcacgtactattatacaaatttagcggtactggatttacctctgacattaacacactcaggcagagaccaggagtgatcagcaggtcttcagaaccaaaaaacctttctgttcacatttcatctgatttttaaactgaggcaggctttgattcttctgaaggatgccaagaatcaaactaagggaggactcactgttaaagatgtgttctgatgtcttatattaagaccaaatgtgacatgatgtgattatcttccagtactttgcttttaggtaccatttcatgacattttaggaatgagtattggaaaatataaagaattagaaaagcagcactttttttttaatggaaaagtcttcggtccagtgttacaccttatagtgtaattcagtccctaagcacagaatgaatgtctggcctgcatatggtagttacagtgtaacctctggctgcagaccacacaggacaaccctaacagcctagtcttgtatggtgtaaatatcaagagtacagcttcaatttcatttgctttatcttagcaacaatgccaactcaggagagcagacggccgatttcagtgaagtctggtagtcaacagatgttatttcagtctcagtgcatctcctctggctttctttgactgaaggtgtttataggaaggaagttaaaaaaaaaaaaagctcattgagattctttaccaattctttacaagatttctgggggtgacagggaaagcaaaaggacttcaaagcaaaagggtgcacaagagcttacttcaccctgaaaatcagtattattaatgaaaagtactgttttcttaaagaagtcgaatgtcctttagatgaacaagaccaagtatacatctccattagattaaaatgtagcacagggttaaaaattatcagtttaatctctttaagaacagtattatcagagtttaaaatgagttagctctgtttatctacacacagcaaacccattcgcagcctcttggccacatgtattcagatgtttgaaatagtgaatcatttcattttcattctaaaacaatactgacttagccatataccttctgtttgtcaatctgaaacttgcttacatctaataagtagacctcttataacactgcaaccattctaagagttggaatttatttttgccaagtattaagtactgttacatctaaaatacagaatgtcaaatggttgcatagcttgtttcccacaacaaggaggaaaagaacaggaatacaaactctgtaatatgctgataaagaagccttagaactgccaactggcttgatggttcaattagtaagctaatttctcccacacccgctccttgatttttagactaattttcccaaagcaaggtttagtcacacaaacttgaaagtacatttaaaatgttcttagttgtcatcctacttttattgcctatggaatatgctaatttctaaaaaaaatacgggagaggcaccaaacccctaaattctagtgcaataatttaaaaaacaaaaaacaaaacaaaacaaaaaacatgttatatgcacccccctcccaaagctgattttaagactggctagaattcaaaatataaaaaataaaactatgaagtgatttgaaatcggttttaaaaagttgttagtgcaagagaaattttatgtttaagccatcatggcaatatatgcaaagtttaaatgaatgacagaaatcttgattttagactgtatgttgtgctgttttgagtacactttatttcggagatatttagtattttctatacactctgaaatcatgagcatttcactttttctaagtcaattatttcataaggattttattaatagatattggtaaatagaactttggaaatcttaattcagaattcttactatacctgagtcttttgtaagctatagttttatgtacaaccttgtacagtttttttgacatacaattcagaactttgtttattctcttggactttgttctggccaatacattttttttaaatctttaagaagaactgtgattgttttagtgggtatttttctaattaaatgaaaacttgtataatggtattttagagaatgccagtaagtgcatgtttcaagttaatgtttttctcatcacttgtatgtttctaacacagcatgggactttaataaaaccatcctggaaacttaa

SEQ ID NO: 113299 - DNA, 1068 bp, Artificial Sequence
  derived and/or modified sequence
atgaccggctcagcagccgacacacatcgttgcccccaccctaagggcgcgaagggcacacggtcacgctcttcgcatgctagaccagtgagcctggcaacctccgggggctcagaggaggaggataaagacggaggtgtgctgttccatgttaacaaaagcgggttcccaatcgacagccacacatgggagagaatgtggatgcatgtggccaaggtgcaccccaaaggcggcgagatggtcggagctatcaggaatgccgccttcctggccaagccctccattccccaggtacctaattacaggctctccatgaccattcccgattggctccaagccatccagaactatatgaagactctacaatacaatcacactggcacccagttttttgagattagaaagatgaggccactatctgggctcatggaaactgccaaggaaatgacgagggagagcctccccattaaatgcttagaggcggtaattctcggtatctatttaactaatggtcagccctcaatcgaacgtttccccatttcctttaagacgtacttctccgggaactatttccaccacgtcgtgctcggaatatactgtaatgggcggtatgggagtctcggcatgtcacgccgcgctgagctcatggataagcctcttacctttcgaaccctcagcgacctgatttttgatttcgaagactcctacaaaaagtacctccacaccgtcaagaaggtgaaaatcggactgtacgttccacacgagcctcactcgttccaacccatcgaatggaaacaactagttctgaatgtgtcgaagatgttgagagcggatattcgtaaagaattggagaaatatgctcgtgacatgaggatgaagattctgaagcccgcttccgcacacagccctacccaggtgcggtctcgcggcaaatcccttagccccaggcggagacaggcctcaccacccaggcggctgggccgacgggagaagtctccagctctgccggagaaaaaggttgccgacttgtctacactgaatgaggtgggctaccagatccgcatctag

SEQ ID NO: 113300 - DNA, 1068 bp, Artificial Sequence
  derived and/or modified sequence
atgacaggcagcgctgctgacacccaccgctgcccccaccccaagggggccaagggcaccaggagccgcagcagccacgcccggcctgtgtccctggccaccagcggcggcagcgaggaggaggacaaggatggcggcgtgctcttccacgtgaacaagagcggcttccccatcgacagccacacctgggagaggatgtggatgcacgtggccaaggtgcaccccaagggcggggagatggtgggcgccatcagaaatgctgccttcctggccaagcccagcatcccccaggtgcccaactaccgcctgtccatgaccatcccagactggctgcaggccatccagaactacatgaagaccctgcagtacaaccacacaggcacccagttctttgagatcaggaagatgaggcccctgagcggcctgatggagacagccaaggagatgacccgggagagcctgcccatcaagtgcctggaggccgtcatcctgggcatctacctgaccaacggccagcccagcattgagcgcttccccatctccttcaagacctacttcagcggcaactacttccaccacgtggtgctgggcatctactgcaatggccgctatggcagcctgggcatgagcagaagagctgagctgatggacaagcccctgaccttccgcaccctgagtgacctgatctttgattttgaagattcctacaagaagtacctgcacacagtgaagaaggtgaagattggcctgtatgtgccccatgagccccacagcttccagcccatcgagtggaagcagctggtgctgaatgtgtccaagatgctgcgggctgacatcaggaaggagctggagaagtatgcccgggacatgaggatgaagatcctgaagccagccagcgcccacagccccacccaggtgcgcagccggggcaagagcctgagcccccggcggcggcaggccagccccccccggcggctgggccggcgggagaagagccctgccctgcctgagaagaaggtggccgacctgagcaccctgaatgaggtgggctaccagatccgcatctag

SEQ ID NO: 113301 - DNA, 1068 bp, Artificial Sequence
  derived and/or modified sequence
atgaccggcagcgccgccgacacccaccggtgcccccaccccaagggcgccaagggcacaagatccaggagttctcacgcccgtccagtgagcctggctacaagcggcggttccgaagaagaggacaaggacggcggagttctgttccatgtcaacaaaagcggttttcccatcgattctcacacgtgggagcgcatgtggatgcacgtggcaaaggtacaccctaaaggcggagaaatggttggcgccatccggaacgcagcattcctcgccaaaccatcgataccccaagtacccaattacaggttatcaatgactataccggactggctccaggccattcagaactatatgaaaactctgcagtataatcatacaggcacgcagttttttgagatccgcaagatgaggcctctgtcagggctgatggagacagcaaaggagatgacccgagagtccttacccattaaatgtttagaggcagtaatactgggtatctacctgacaaatggtcagcccagcatcgaacggttccctatatcttttaagacctacttctctggcaactactttcaccatgtcgttcttggaatatactgcaacggcaggtacggtagcctcgggatgagtaggcgggctgaactcatggataaaccgttgacatttcgcaccctctctgatcttattttcgacttcgaagattcctataaaaaatatttacacaccgtgaagaaggtgaagataggactgtatgttccacatgagcctcatagcttccaacctatcgagtggaaacaattggtacttaatgtcagcaaaatgttgcgtgctgacatcaggaaggagcttgaaaagtatgccagagacatgaggatgaagatcctgaaacccgcatcagcccactcacctacacaggtgcggagccgtgggaaaagcctatcacctagacgacgccaggccagccccccacgacgcctcgggagacgtgagaagtctccggccttaccagagaagaaagtggcagacttatcaacactaaacgaggtcgggtatcagatcagaatctag

SEQ ID NO: 113302 - DNA, 1068 bp, Artificial Sequence
  derived and/or modified sequence
atgactggcagcgctgcagacacacaccgatgcccacacccgaagggggctaaaggtacgaggtcccgatcaagccacgcaagaccagtctctctggctacgtccggcggatccgaggaggaagacaaggacggcggagtcttattccatgtcaacaagtccggtttcccaatagactctcacacttgggaacggatgtggatgcacgtcgccaaggttcaccccaaaggcggtgaaatggttggcgcaattaggaatgccgcattcctggctaagccttccatcccacaggtgccaaactatcggctgtcaatgactattcccgactggctgcaggctatccagaattatatgaaaacacttcagtataaccatacaggcacgcaattctttgagatcaggaagatgcgaccactttccgggctgatggagaccgccaaggagatgacccgagaatccctgcctataaagtgcctggaagccgtgatcctgggtatatatctgaccaatggccaaccatccatcgagcggttcccaatcagcttcaagacgtattttagtggcaattacttccatcacgttgtgcttgggatttactgtaatgggaggtatggcagcctaggcatgtctagacgggctgaactcatggataaacctctgacctttagaacattgtcagacctcatctttgattttgaagactcttataagaaatatctgcacacagtgaaaaaggtgaaaattggattgtacgttcctcacgaaccccactccttccagccaatcgaatggaagcagttggttctgaatgtcagcaaaatgcttcgggctgatatcaggaaggagttagagaagtacgctcgcgatatgagaatgaaaatactaaagccagccagtgcccactcccccacacaagttagaagccgcggaaagtccctgagcccacgccgacgtcaggcttctcctccaaggcggctgggtcgccgagagaaatctcccgcactgcccgagaagaaggtggccgatctcagcactctcaacgaagtgggataccaaatcagaatctag

SEQ ID NO: 113303 - DNA, 1068 bp, Artificial Sequence
  derived and/or modified sequence
atgaccggctccgcggccgacactcaccgctgcccccaccccaaaggcgccaaaggcacccggtcccggagcagccacgcgcggcccgtgagcctcgccaccagcgggggctcagaggaggaggacaaagacggcggggtgctgttccacgtcaacaagagcggcttccccatcgacagccacacctgggagcgcatgtggatgcacgtggccaaggtgcaccctaaggggggagaaatggtgggcgccatcaggaacgccgccttcttggcaaagccttcaataccccaggtcccaaactacaggctgtcgatgacgatcccagactggctccaggcgatccagaattacatgaagaccctacaatataatcacacagggacccagttctttgaaattaggaaaatgagaccgctgagtgggttaatggaaacagcaaaagaaatgacccgagagtccttgcctatcaaatgccttgaagctgtcatcctgggcatctacttaaccaatgggcagccttccattgagcggttccccatcagctttaaaacctacttctcaggaaactactttcaccacgttgtgctggggatttactgcaatggccgctatggctcattgggcatgagccgcagggctgagctgatggacaagccattgacttttcggactctgagtgacctcatctttgactttgaggactcttacaagaaatacctgcacacagtcaagaaggtcaagattgggctgtacgtcccccatgagcctcatagcttccagcccattgagtggaagcagctggtcctcaacgtctcaaagatgctgagggctgacataaggaaggagctggagaaatatgccagggacatgagaatgaagatcctgaaacctgcaagtgcccactctccgacccaagtgagaagccggggaaaatccctgtcccccagaaggagacaggcaagccccccgaggaggctcggccggcgagagaagtcgcctgcactgcctgaaaagaaggtggctgatctgagcactctgaatgaagtgggctatcaaatccgaatttag

SEQ ID NO: 113304 - protein, 350 aa, Artificial Sequence
  derived and/or modified sequence
MAAAGEGTPSSRGPRRDPPRRPPRNGYGVYVYPNSFFRYEGEWKAGRKHGHGKLLFKDGSYYEGAFVDGEITGEGRRHWAWSGDTFSGQFVLGEPQGYGVMEYKAGGCYEGEVSHGMREGHGFLVDRDGQVYQGSFHDNKRHGPGQMLFQNGDKYDGDWVRDRRQGHGVLRCADGSTYKGQWHSDVFSGLGSMAHCSGVTYYGLWINGHPAEQATRIVILGPEVMEVAQGSPFSVNVQLLQDHGEIAKSESGRVLQISAGVRYVQLSAYSEVNFFKVDRDNQETLIQTPFGFECIPYPVSSPAAGVPGPRAAKGGAEADVPLPRGDLELHLGALHGQEDTPGGLLGSSLF

SEQ ID NO: 113305 - DNA, 1053 bp, Artificial Sequence
  derived and/or modified sequence
atggccgccgccggcgagggcacccccagcagcagaggccccagaagagacccccccagaagaccccccagaaacggctacggcgtgtacgtgtaccccaacagcttcttcagatacgagggcgagtggaaggccggcagaaagcacggccacggcaagctgctgttcaaggacggcagctactacgagggcgccttcgtggacggcgagatcaccggcgagggcagaagacactgggcctggagcggcgacaccttcagcggccagttcgtgctgggcgagccccagggctacggcgtgatggagtacaaggccggcggctgctacgagggcgaggtgagccacggcatgagagagggccacggcttcctggtggacagagacggccaggtgtaccagggcagcttccacgacaacaagagacacggccccggccagatgctgttccagaacggcgacaagtacgacggcgactgggtgagagacagaagacagggccacggcgtgctgagatgcgccgacggcagcacctacaagggccagtggcacagcgacgtgttcagcggcctgggcagcatggcccactgcagcggcgtgacctactacggcctgtggatcaacggccaccccgccgagcaggccaccagaatcgtgatcctgggccccgaggtgatggaggtggcccagggcagccccttcagcgtgaacgtgcagctgctgcaggaccacggcgagatcgccaagagcgagagcggcagagtgctgcagatcagcgccggcgtgagatacgtgcagctgagcgcctacagcgaggtgaacttcttcaaggtggacagagacaaccaggagaccctgatccagacccccttcggcttcgagtgcatcccctaccccgtgagcagccccgccgccggcgtgcccggccccagagccgccaagggcggcgccgaggccgacgtgcccctgcccagaggcgacctggagctgcacctgggcgccctgcacggccaggaggacacccccggcggcctgctgggcagcagcctgttctag

SEQ ID NO: 113306 - DNA, 1053 bp, Artificial Sequence
  derived and/or modified sequence
atggccgctgccggggaaggcacccccagtagccgcggtccaaggagggatccaccaagacgcccccccaggaacggatacggtgtctacgtctaccccaacagcttcttcagatatgagggcgaatggaaagctgggcgaaagcacggacatggcaaactgttgttcaaagacgggtcttactatgagggcgccttcgtggacggcgagatcactggcgaggggcgccgccactgggcttggtctggcgacacatttagtggtcaatttgtcctgggggaaccccaggggtatggcgtgatggaatacaaggctggcggttgttacgagggagaggtctcccatggaatgcgcgaaggacacgggttcctcgttgatagggatgggcaggtgtaccaaggcagcttccacgataacaagcgccatggccccggtcagatgttgtttcagaacggggacaaatacgacggtgactgggtgcgtgatcgccgacaaggtcacggggtcctccgttgtgccgacggcagtacctataaaggccagtggcattccgatgtcttctcaggcctgggaagcatggcacattgttccggcgtgacctattatggactgtggatcaatggccatcccgccgagcaggccacaagaattgtcatcctcggtcccgaggtgatggaagtagcccagggcagccccttttccgtcaacgtacaacttcttcaggaccacggcgagattgctaagagcgaatcaggccgggttctgcagatcagtgctggcgtgagatatgtacagctctcagcatacagcgaagtgaatttcttcaaagtggatagagacaaccaagagaccctgatccagacaccatttgggtttgagtgtataccatatcctgtcagtagtcccgcagccggtgttccgggaccaagggccgctaagggcggtgctgaggctgacgtccctctgccgaggggggacctcgagctgcatctaggggcactgcacgggcaggaggatacacccggcgggctactcggcagctctctcttttag

SEQ ID NO: 113307 - DNA, 1053 bp, Artificial Sequence
  derived and/or modified sequence
atggctgctgctggggagggcacccccagcagccggggcccccggcgggaccccccccggcggcccccaagaaatggctatggagtgtatgtgtaccccaacagcttcttccgctatgaaggagagtggaaggccggcaggaagcacggccacggcaagctgctcttcaaggatggcagctactatgagggcgcctttgtggatggagagatcaccggggagggccgccgccactgggcctggagcggggacaccttcagcggccagtttgtgctgggggagccccagggctacggcgtgatggagtacaaggccggcggctgctatgaaggagaggtgagccacggcatgagggagggccacggcttcctggtggacagagatggccaggtgtaccagggcagcttccatgacaacaagagacatggccctggccagatgctgttccagaatggagacaagtatgatggagactgggtgcgggaccggcggcagggccatggagtgctgcgctgtgctgatggcagcacctacaagggccagtggcacagtgatgtgttcagcggcctgggctccatggcccactgcagcggcgtgacctactacggcctgtggatcaatggccaccctgctgagcaggccaccagaattgtcatcctgggccctgaggtgatggaggtggcccagggcagccccttctctgtgaatgtgcagctgctgcaggaccatggagagatcgccaagtctgagagcggccgggtgctgcagatctctgctggggtgcgctacgtgcagctgagcgcctacagcgaggtgaacttcttcaaggtggaccgggacaaccaggagaccctcatccagacccccttcggctttgagtgcatcccctaccctgtgagcagccctgctgctggggtgcccggccccagggctgccaagggcggcgctgaggctgatgtgcccctgcccaggggggacctggagctgcacctgggcgccctgcacggccaggaggacaccccaggcggcctgctgggcagcagcctcttctag

SEQ ID NO: 113308 - DNA, 1053 bp, Artificial Sequence
  derived and/or modified sequence
atggccgccgccggcgagggcacccccagcagccggggcccccggcgcgaccctccgcggaggccgcctcgcaacgggtacggggtgtacgtgtatccaaacagcttttttcggtacgagggtgagtggaaagcgggtcgaaaacacggtcacggaaagcttctgtttaaggacggaagctactatgagggggctttcgtggatggggagattaccggggagggtcgcaggcattgggcctggtcaggcgatacctttagcgggcagttcgtccttggggagcctcaggggtacggcgtcatggaatacaaggcagggggttgctacgagggcgaggtcagtcatggaatgagggagggccatggctttctagtagaccgcgatggtcaagtctatcagggctcctttcacgacaataaacggcacggacctggtcagatgctgttccagaatggcgataagtacgatggagattgggtgcgggacagacggcagggacacggcgtgctgaggtgtgccgatggctcgacatataagggtcagtggcattcagatgttttttccggcctgggctctatggcccattgcagcggagtcacttattatggcctgtggatcaacggtcaccctgccgaacaggctacaagaattgtgatcctggggccggaagtgatggaggttgctcagggaagcccgttttccgtgaatgtccaactgctgcaagaccacggggagattgccaaaagcgaaagcggccgcgtcctccagatcagtgccggggtccgttacgtccagctctccgcatatagtgaggttaatttctttaaggttgatcgtgataatcaggaaactctcattcagaccccattcggattcgagtgcatcccgtatcccgtatcttccccggctgcgggagtgccggggcccagagctgcaaaggggggcgccgaagcagacgtcccgcttcctcgcggagacctagagcttcacttgggagcactccacggacaggaagatacacctggcggcttgctaggaagcagtttgttctag

SEQ ID NO: 113309 - DNA, 1498 bp, Artificial Sequence
  derived and/or modified sequence
gacagcggcggaaacgcgcacaggcgcagctgcgtcctctggctccgggcccggctagcttcgctccagagattgcgcgggctcagggactaggcccgtggccacacccccccttgcgacaaagaccaatggaagcgggcgttgctggtcgctaagagaaccctcggcggcaagatggcagcggcgggcgagggcaccccgagctcccgcgggccgcgtcgggacccgcctaggcggccgccccggaacggttatggtgtctacgtatacccaaattccttctttcgatatgaaggagaatggaaagcagggaggaagcacggtcacgggaagttgttatttaaagatggcagttattacgaaggggcgtttgtggacggagagatcacgggagaaggccgccggcactgggcctggtcaggagacaccttctctggacagtttgttctgggagagcctcaaggctacggcgtcatggagtacaaagccggcggatgttatgaaggggaggtctcccacggcatgcgggaaggacacgggtttctggtggaccgggatggacaagtgtaccagggctccttccatgacaacaagaggcacggccctgggcagatgctctttcagaacggtgacaagtacgacggcgactgggtccgggaccggcgtcagggacacggggtgctgcgctgcgccgacggctccacctacaagggacagtggcacagcgacgtcttcagtggactgggcagcatggcccactgctcaggggtcacctattatgggttgtggatcaatggccacccagcagaacaagctacgaggatcgtgatcttgggtccggaggtgatggaagtggcccaagggtctcccttctcggtgaacgttcagctgctgcaggaccacggggaaattgccaagagcgagagcggccgggtcctgcagatctcagcgggcgtcagatacgtgcagctgtcagcctactctgaggtcaactttttcaaagtggacagagacaaccaagagacactcatccagaccccatttgggttcgaatgcatcccttatcctgtgtccagccccgcagctggggtgccggggcccagagctgccaagggaggggcagaagccgacgtgcccctgcccaggggagacctggagctgcatttgggtgccctccatggccaggaggacacccctggtggcctgcttgggagctcactcttctaggatcagacgagtctccttccagacaacagctgtgagaggaccagcaagcgcaggcgtcattcatcatataaaagagcatgcaggcatcccaggtggggcagcagggcccggcgccactccacgggaggccaaggcggccaagcctcaggccaacaggcccacggggggcccggcccgcgcccccttgtctgccttcacctcagttgatagaagcagttccacaccgcataggtggaatagctctcatatttctgcataaaaatacttactg

SEQ ID NO: 113310 - DNA, 1053 bp, Artificial Sequence
  derived and/or modified sequence
atggccgctgccggagagggtacgcctagcagcagaggcccaaggcgtgatccccctagaaggcctccaaggaatggctatggcgtttatgtgtatccaaattcattttttagatacgagggcgaatggaaggccggtcggaagcatggacatggtaaactcctgttcaaagatgggtcctactacgaaggggctttcgttgatggcgaaattacgggagagggcaggcggcattgggcctggagcggcgacactttcagtggccaattcgtgctgggagagcctcagggatacggggtgatggagtacaaagccggagggtgttatgaaggggaagtcagccatgggatgcgagaggggcatggttttctggtggatagagacggacaggtgtatcaaggcagctttcacgataataaacgacacggcccaggccaaatgctgttccagaacggggacaagtacgacggtgattgggtgcgagatcgcaggcaggggcatggagttctccgttgcgcagatgggagcacttacaaaggtcagtggcacagcgacgtattctctggcctgggttccatggcgcactgctccggcgtgacatactatggcttgtggatcaacggccatcccgcagaacaggcaacccgtattgtgattctcggacccgaggtgatggaggtcgctcaggggagccccttctctgtcaacgtgcagctcctgcaggaccacggggagatagccaaatctgaaagcggtcgggtgctccagatatccgccggtgttcgatacgtgcagctgtccgcctattctgaggttaacttcttcaaggtggacagagataaccaggagactctaattcagactccattcggctttgagtgcataccctatcccgtgtcaagtcctgccgctggagttcccggtcctcgggctgctaagggaggcgctgaagctgatgtgccccttcccaggggggatctcgaactgcatttgggcgctctccacggccaagaggacacccccggtggccttctcggcagttccctgttctag

SEQ ID NO: 113311 - protein, 621 aa, Artificial Sequence
  derived and/or modified sequence
MAAPLLHTRLPGDAAASSSAVKKLGASRTGISNMRALENDFFNSPPRKTVRFGGTVTEVLLKYKKGETNDFELLKNQLLDPDIKRLPWLNRSQTVVEEYLAFLGNLVSAQTVFLRPCLSMIASHFVPPRVIIKEGDVDVSDSDDEDDNLPANFDTCHRALQIIARYVPSTPWFLMPILVEKFPFVRKSERTLECYVHNLLRISVYFPTLRHEILELIIEKLLKLDVNASRQGIEDAEETATQTCGGTDSTEGLFNMDEDEETEHETKAGPERLDQMVHPVAERLDILMSLVLSYMKDVCYVDGKVDNGKTKDLYRDLINIFDKLLLPTHASCHVQFFMFYLCSFKLGFAEAFLEHLWKKLQDPSNPAIIRQAAGNYIGSFLARAKFIPLITVKSCLDLLVNWLHIYLNNQDSGTKAFCDVALHGPFYSACQAVFYTFVFRHKQLLSGNLKEGLQYLQSLNFERIVMSQLNPLKICLPSVVNFFAAITNKYQLVFCYTIIERNNRQMLPVIRSTAGGDSVQICTNPLDTFFPFDPCVLKRSKKFIDPIYQVWEDMSAEELQEFKKPMKKDIVEDEDDDFLKGEVPQNDTVIGITPSSFDTHFRSPSSSVGSPPVLYMQPSPL

SEQ ID NO: 113312 - DNA, 1461 bp, Artificial Sequence
  derived and/or modified sequence
atggccgcccccctgctgcacaccagactgcccggcgacgccgccgccagccccagcgccgtgaagatgctgggcgccagcagaaccggcatcagcaacatgagagccctggagaacgacttcttcaacagcccccccagaaagaccgtgcagttcggcggcaccgtgaccgaggtgctgctgaagtacaagaccggcgagaccaacgacttcgagctgctgaagaaccagctgctggaccccgacatcaagagactgccctggctgaacagaagccagaccgtggtggaggagtacctggccttcctgggcaacctggtgagcgcccagaccgtgttcctgagaccctgcctgagcatgatcgccagccacttcgtgccccccagagtgatcatcaaggagggcgacgtggacgtgagcgacagcgacgacgaggacgacaacctgcccgccaacttcgacaccagccagagcctggccaacaacagcaagatctgcaccatcgagtgctacgtgcacaacctgctgagaatcagcgtgtacttccccaccctgagacacgagatcctggagctgatcatcgagaagctgctgaagctggacgtgaacgccagcagacagggcatcgaggacgccgaggagaccgccaaccagacctgcggcggcaccgacagcaccgagggcctgtgcaacatggtgagcagcctgctgatgaaggtggagatgaagttcatcatcatcaagggctggaagcagctggtgctgctgatcttcggcttcgccgaggccttcctggagcccctgtggaagaagctgcaggaccccagcaaccccgccatcatcagacaggccgccggcaactacatcggcagcttcctggccagagccaagttcatccccctgatcaccgtgaagagctgcctggacctgctggtgaactggctgcacatctacctgaacaaccaggacagcggcaccaaggccttctgcgacgtggccctgcacggccccttctacagcgcctgccaggccgtgttctacaccttcgtgttcagacacaagcagctgctgagcggcaacctgaaggagggcctgcagtacctgcagagcctgaacttcgagtggatcgtgatgagccagctgaaccccctgaagatctgcctgcccagcgtggtgaacttcttcgccgccatcaccaacaagtaccagctggtgttctgctacaccatcatcgagagaaacaacagacagatgctgcccgtgatcagaagcaccaccggcggcgacagcgtgcagacctgcaccaaccccctggacaccttcttccccttcgacccctgcgtgctgaagagaagcaagaagttcatcgaccccatctaccaggtgtgggaggacatgagcgccgaggagctgcaggagttcaagaagcccatgaagaagctgttctggagaatcatgtag

SEQ ID NO: 113313 - DNA, 1461 bp, Artificial Sequence
  derived and/or modified sequence
atggctgcccctctgttgcacacgaggctgcctggggacgccgccgctagcccttccgcagtcaaaatgctgggagcctccagaactggcatctcgaacatgcgagccctagagaatgacttcttcaatagtccccctcggaaaacagtgcagttcgggggcactgttacagaagtcctcctgaagtataagacgggggaaactaatgattttgagctgttaaagaaccagcttctggatcctgacattaaaaggctgccttggctaaacaggtctcaaacagtggtcgaagaatatctggccttcttagggaacctggtgtctgctcaaaccgtgtttctcaggccatgcctatccatgatcgccagtcacttcgtccctccaagagttatcataaaggaaggagacgtggacgtgtccgactcggatgatgaagatgataaccttcctgccaatttcgatacctcacagagcctagcgaacaactctaagatctgtactattgagtgttacgttcataatctcctaagaataagcgtttacttccctacactgagacacgaaattctggagctgatcatcgagaaactgttgaaattagacgtgaacgcttctaggcaggggatcgaggacgctgaggagacagccaaccagacatgcggaggcacggatagtactgagggtctctgcaatatggtgtctagtctgctaatgaaggtcgaaatgaagtttattattataaagggatggaagcagctcgtgctgctgattttcggcttcgccgaagcttttctagaaccactttggaaaaagcttcaagatccatcgaatccagccatcatcaggcaggctgctggaaactacataggctccttcctggcacgggcgaaattcattccgttaatcacagtgaaatcttgtctcgatctgctggtcaactggctgcacatatacttaaataatcaggacagcggcacaaaagccttctgtgatgtcgctctccacggtcctttttactcggcgtgccaagcagttttctacactttcgtcttcaggcacaaacaattgctgagtgggaacctaaaggaagggttgcagtacctgcagtccctgaatttcgagtggatcgtcatgtcacaattaaatccgctaaagatttgcctccctagcgtagtgaactttttcgccgcaattacaaacaaatatcaactggtcttttgctacaccatcatagagcggaacaacagacagatgttgcctgtgattcggagcactacaggcggggatagtgttcaaacgtgtaccaacccactcgataccttctttcccttcgacccatgtgtgctcaaacggtccaagaagtttatagatccaatttaccaggtgtgggaagacatgagcgcagaagagctccaggagttcaaaaagcccatgaaaaaattgttttggcggattatgtag

SEQ ID NO: 113314 - DNA, 1461 bp, Artificial Sequence
  derived and/or modified sequence
atggccgcccccctgctgcacacccggctgcctggagatgctgctgccagccccagcgctgtgaagatgctgggcgccagcaggacaggcatcagcaacatgagggccctggagaatgacttcttcaacagcccccccaggaagacagtgcagtttggaggcaccgtgacagaggtgctgctgaagtacaagacaggagagaccaatgactttgagctgctgaagaaccagctgctggaccctgacatcaagaggctgccctggctgaacagaagccagacagtggtggaggagtacctggccttcctgggcaacctggtgtctgcccagacagtgttcctgcggccctgcctgtccatgattgccagccactttgtgccccccagggtcatcatcaaggagggagatgtggatgtgtctgacagtgatgatgaagatgacaacctgcctgccaactttgacaccagccagagcctggccaacaacagcaagatctgcaccattgaatgttatgtgcacaacctgctgcgcatctctgtgtacttccccaccctgcggcatgagatcctggagctgatcatcgagaagctgctgaagctggatgtgaatgccagccggcagggcattgaagatgctgaggagacagccaaccagacctgtggcggcacagacagcacagagggcctgtgcaacatggtgagcagcctgctgatgaaggtggagatgaagttcatcatcatcaagggctggaagcagctggtgctgctgatcttcggctttgctgaggccttcctggagcccctgtggaagaagctgcaggaccccagcaacccagccatcatccggcaggccgccggcaactacatcggcagcttcctggcccgggccaagttcatccccctcatcaccgtgaagagctgcctggacctgctggtgaactggctgcacatctacctgaacaaccaggacagcggcaccaaggccttctgtgatgtggccctgcacggccccttctacagcgcctgccaggccgtgttctacacctttgtgttccgccacaagcagctgctgagcggcaacctgaaggagggcctgcagtacctgcagagcctgaactttgagtggatcgtgatgagccagctgaaccccctgaagatctgcctgcccagcgtggtgaacttctttgctgccatcaccaacaagtaccagctggtgttctgctacaccatcattgaaagaaacaaccggcagatgctgcccgtcatccgcagcaccaccggcggggacagcgtgcagacctgcaccaaccccctggacaccttcttcccctttgacccctgtgtgctgaagaggagcaagaagttcatcgaccccatctaccaggtgtgggaggacatgtctgctgaggagctgcaggagttcaagaagcccatgaagaagctgttctggaggatcatgtag

SEQ ID NO: 113315 - DNA, 1461 bp, Artificial Sequence
  derived and/or modified sequence
atggccgcccccctgctgcacacccggctgcccggcgacgccgccgctagtccaagcgcagttaagatgctcggcgcctctcgcacagggatcagcaatatgagggctctcgagaatgacttcttcaactcaccgccaaggaagactgtgcagttcggagggaccgttacagaggttctcctaaagtataagacaggagaaaccaatgactttgaattgctgaaaaaccaattgctggacccagacattaaacggttgccatggctcaatcgatctcagactgtggtggaggagtacctggcctttctcgggaacctggtatccgcccagactgtttttctcaggccatgtttgtccatgatcgcctcccatttcgtccccccacgcgtgatcatcaaagagggagacgtggacgtttcagacagcgatgatgaggacgacaacctgcctgcaaattttgatacttctcagtcacttgccaacaattccaagatatgcaccattgagtgctatgttcacaatctcctgcgaataagcgtctacttccctacgctcagacacgaaattcttgaactgattatagagaagctgctgaagttagatgtcaatgcatcaagacagggcattgaggacgccgaggagactgcaaaccaaacgtgcggaggtactgactcaactgaaggcctgtgtaatatggtttcatccctgctaatgaaagtagaaatgaaattcatcatcatcaaaggctggaagcagctggtattgctgatattcggttttgccgaggccttcctagaaccactttggaaaaagctccaggatccatcaaaccctgcaatcatccgccaagccgcgggcaactacatcggctccttcctggccagggccaagttcattccactaataacagttaaatcctgtctggatttgctggtgaattggctgcatatttacctgaacaaccaggatagcggtaccaaggctttttgcgatgtggcactgcatggccctttttacagcgcctgtcaggctgttttctacacatttgtctttcgccacaagcagctgttatccggcaatttaaaagagggtctacagtatctgcagagtctaaactttgaatggatcgtgatgagccaactgaacccactgaagatctgcctaccatccgtggtcaattttttcgcggctattaccaataaataccaattggttttctgttacaccatcatcgagcgcaacaacaggcagatgctgcctgttattaggtcaacaacagggggcgacagcgtgcagacatgtaccaacccactcgacacatttttcccctttgacccatgcgttctaaaaaggtctaaaaaattcatcgatcctatctaccaggtctgggaagatatgtcggccgaagagttgcaggaatttaagaaacccatgaagaaactgttctggcggataatgtag

SEQ ID NO: 113316 - DNA, 1461 bp, Artificial Sequence
  derived and/or modified sequence
atggccgcaccattgctccacaccaggctgcctggagacgcagcggctagtccttcagctgtgaaaatgctgggggcatcccgcaccgggatcagtaacatgcgagcactggaaaatgacttttttaattccccgcctagaaagactgtacagttcggaggcacagtcacggaagtcctcctgaagtataagactggtgaaacgaatgacttcgaactgttaaagaatcagctgctcgatcccgatataaagaggcttccatggctgaatcgatcccaaaccgttgtcgaggaatatcttgcgtttttggggaatctggtcagtgcccaaaccgtcttcctccgcccttgtttgagcatgatcgcctctcatttcgttcccccacgggtaatcattaaggagggagatgtggatgtgtcagactccgacgatgaggacgacaaccttccagccaatttcgacactagtcaatcccttgccaacaattctaaaatttgcactatagagtgttatgtgcacaatcttctccggatcagcgtttattttccaaccttgcgccatgaaattctcgagttgataattgaaaaactgttaaaactcgatgttaatgcctcccggcagggcatagaggatgcagaggaaacagctaaccagacctgtgggggaactgatagcacagagggactgtgtaacatggtatcttcgctgctgatgaaggtagaaatgaaatttatcatcataaagggatggaagcagctagtgctgttgatcttcggatttgccgaggcgtttttggaaccactttggaagaaattacaggatcctagcaatccggctatcattaggcaggccgcaggaaactacatcggcagctttctcgcacgagccaaattcattcccctaatcaccgtgaaatcctgcctggatctgctcgtgaattggttgcacatttaccttaacaaccaggactccggcacaaaggccttttgcgatgttgccctgcacggccctttttattccgcttgccaggcagtattctatacatttgtttttaggcacaagcagcttttgtctggaaaccttaaagagggacttcagtacctgcagtcacttaacttcgagtggatcgtgatgtctcaactgaaccctctgaaaatctgtctgcctagtgtggtgaatttctttgctgcaatcacgaacaagtatcaattagtgttctgttacacaattatcgagagaaacaatcggcagatgctgccagtcattagatctacaaccgggggagactccgtgcagacgtgcactaatccattagatacgttcttccctttcgacccttgtgtcttaaagagatcaaagaaattcatcgatcctatctatcaggtgtgggaggacatgtcggctgaggagttgcaggagtttaagaagccgatgaaaaagctgttctggaggatcatgtag

SEQ ID NO: 113317 - DNA, 1618 bp, Artificial Sequence
  derived and/or modified sequence
gttagttcggcccaatggcggcaccgctgcttcacacgcgtttgccgggagatgcggccgcttcgccctctgcagtcaagatgctgggcgcgtcgaggactgggatttcaaatatgcgtgcattagagaatgattttttcaattctcccccaagaaaaactgttcagtttggtggaactgtgacagaagtcttgctgaagtacaaaacgggtgaaacaaatgactttgagttgttgaagaaccagctgttagatccagacataaagagattgccttggttgaatagaagtcaaacagtagtggaagagtatttggcttttcttggtaatcttgtatcagcacagactgttttcctcagaccgtgtctcagcatgattgcttcccattttgtgcctccccgagtgatcattaaggaaggcgatgtagatgtttcagattctgatgatgaagatgataatcttcctgcaaattttgacacgtcacagagccttgcaaataatagcaagatatgtaccattgaatgttacgttcataacttactaaggattagtgtatattttccaaccttgaggcatgaaattctggagcttattattgaaaaactactcaagttggatgtgaatgcatcccggcagggtattgaagatgctgaagaaacagcaaatcaaacttgtggtgggacagattccacggaaggattgtgtaatatggttagcagtttattaatgaaagtggagatgaagtttatcataatcaaagggtggaaacagctagtgctgctcatctttggattcgcagaggcatttttggaacctctttggaaaaaattgcaggatccaagtaatcctgccatcatcaggcaggctgctggaaattatattggaagctttttggcaagagctaaatttattcctcttattactgtaaaatcatgcctagatcttttggttaactggctgcacatataccttaataaccaggattcgggaacaaaggcattctgcgatgttgctctccatggaccattttactcagcctgccaagctgtgttctacacctttgtttttagacacaagcagcttttgagcggaaacctgaaagaaggtttgcagtatcttcagagtctgaattttgagtggatagtgatgagccagctaaatcccctgaagatttgcctgccctcagtggttaacttttttgctgcaatcacaaataagtaccagctcgtcttctgctacaccatcattgagaggaacaatcgccagatgctgccagtcattaggagtaccactggaggagactcagtgcagacctgcacaaacccactggacaccttcttcccctttgatccctgtgtgctgaagaggtcaaagaaattcattgatcctatttatcaggtatgggaagacatgagtgctgaagagctacaggagttcaagaaacccatgaaaaagttgttctggagaatcatgtagcgacagatgaagacgaacctgctttgaaatgccagcgactagaaatcaattgccaggatccatctataaagtcattcctgtattccatcaaccagacaatctgcttgcggttggatagcattgaagccaaattgcaagccctg

SEQ ID NO: 113318 - DNA, 1866 bp, Artificial Sequence
  derived and/or modified sequence
atggcggcaccactgctacacactcggctccccggcgacgccgcggctagctcttccgccgtcaagaagctgggagcatctaggaccggcataagtaatatgagagctctagaaaacgattttttcaatagccccccccgtaaaaccgtgaggtttggaggaaccgtcaccgaagtcctccttaagtacaagaaaggcgaaactaatgatttcgaactccttaaaaaccagctcttggaccctgatattaaacgactcccatggctcaataggagtcagaccgtagtcgaggagtaccttgcctttctggggaacctcgtgagtgcgcagaccgtgtttctgcgcccgtgtctgagcatgattgcctcccactttgtcccacccagagtgataattaaagaaggtgatgtggatgtgtctgacagtgacgacgaggatgacaatctgccagccaatttcgatacctgtcaccgcgccctgcagatcatcgccagatatgtcccttctactccatggttcctgatgccaatcttagtcgagaagtttccttttgtacggaaatcagagcgcactctggagtgctacgtgcataatctactacgtatcagcgtgtattttccaacgctccgacacgaaatattggaacttatcatagaaaaactgctcaagttggatgtgaacgcctcccggcaggggattgaggatgctgaagaaacggccacccagacatgtggaggcacagactctacagaggggctgtttaatatggacgaggatgaagagaccgagcacgaaaccaaggcaggccccgaaaggctcgatcaaatggtccatccagttgccgaacggctagacattcttatgagtctcgtgctgtcctacatgaaggatgtctgttacgtggacgggaaggtggataatggtaagacaaaagacttatatagagacctcataaacatctttgacaaacttttattacctacacatgcgagttgtcacgtgcagttcttcatgttttatctttgttctttcaaattaggcttcgccgaggcattcctcgagcacctgtggaaaaagctccaagaccctagtaatcctgcaatcattcgccaggcagctggcaactacatagggtcctttctggctagagccaaattcattccactgataaccgttaaaagctgcctcgatttgctggtgaattggctgcatatttatctgaataaccaagactctggcacaaaagctttctgtgacgtggctttacacggacccttctattccgcctgccaagctgtcttttacaccttcgtgtttcgccataagcagctgctatcagggaatctgaaggagggcctgcagtacttacagtctctgaattttgagagaatcgtgatgagtcagctgaatcctctcaaaatatgcttaccctccgtggtgaactttttcgccgcgatcaccaacaagtatcagctggtgttttgctatacgatcattgaacgcaataatcgccagatgttgccggttatcaggtctacagccggcggggattcagtgcagatttgcacaaaccctctagatacatttttcccttttgatccttgtgtactcaagcggagcaaaaagtttatcgatccgatctatcaggtttgggaagacatgagtgctgaagagctgcaggaatttaaaaaacctatgaaaaaggacatagttgaggacgaggatgacgattttctgaagggagaggtgccccagaacgacactgttattggcattaccccatcatcgttcgatacgcacttcaggagcccctcctcctcagttggttcacccccagtgctgtacatgcagcccagccctttgtag

SEQ ID NO: 113319 - DNA, 1410 bp, Artificial Sequence
  derived and/or modified sequence
atgattgcatctcatttcgttccccctcgagtgatcatcaaggagggcgacgtggatgttagtgactccgatgatgaggacgacaacctcccagccaatttcgacacctgtcacagagcattacagatcattgccaggtacgttccttccaccccatggttcttgatgccaattttagtggagaaatttccttttgtgagaaagagcgagaggacccttgtgaatgcttctcggcagggcattgaggatgctgaggaaaccgcaacgcaaacgtgcggcggcaccgattctaccgaggggctgtttaatatggatgaggatgaggagaccgagcacgagactaaggccggtccggaaaggctcgatcaaatggtccatcccgtagctgagaggctcgacatactcatgagtctggtattgtcctacatgaaggatgtgtgctatgttgatggcaaagtcgataatgggaagaccaaggatctgtaccgcgacttgattaatatcttcgataagcttttattaccaactcatgcctcctgtcatgtacaattctttatgttttatctgtgcagcttcaagctcggctttgccgaggcctttttggagcacttatggaaaaagttacaggatccatccaatcccgccattattcgccaggcggccggcaactacattgggtctttccttgcaagagccaagtttattccactcatcacagtgaagtcatgtctggacctactagtcaactggctgcacatatatcttaacaaccaggattccggaacaaaggctttttgcgatgtggccttgcatggccccttttattctgcatgccaggctgtgttttacacttttgtctttcgccataaacagctcctgtctgggaatctgaaagaggggctgcagtatctgcagtcccttaattttgaacgcatcgtcatgtctcagttaaatccactcaaaatctgcctgcccagcgtagtgaactttttcgccgccataacaaacaagtaccagctggtgttttgttacactatcatagaacgaaataacaggcaaatgcttcccgtcattcgcagcaccgcaggcggcgactccgtacagatatgcaccaatcctctcgacacatttttcccatttgatccatgtgtgctcaagagatccaagaagtttatcgatcctatttatcaagtgtgggaggacatgtctgccgaagaactgcaggagtttaaaaagccgatgaagaaagacattgtggaagatgaagatgacgacttcctgaaaggcgaggtaccccaaaacgacaccgtgatcggaattaccccctcctccttcgatactcatttcagatccccttcaagttccgtgggaagccctcccgtgctttacatgcagccctcccccctgtag

SEQ ID NO: 113320 - DNA, 1866 bp, Artificial Sequence
  derived and/or modified sequence
atggccgcccccctgctgcacacccggctgcctggagatgctgctgccagcagcagcgctgtgaagaagctgggcgccagcaggacaggcatcagcaacatgagggccctggagaatgacttcttcaacagcccccccaggaagacagtgcgctttggaggcaccgtgacagaggtgctgctgaagtacaagaagggggagaccaatgactttgagctgctgaagaaccagctgctggaccctgacatcaagaggctgccctggctgaacagaagccagacagtggtggaggagtacctggccttcctgggcaacctggtgtctgcccagacagtgttcctgcggccctgcctgtccatgattgccagccactttgtgccccccagggtcatcatcaaggagggagatgtggatgtgtctgacagtgatgatgaagatgacaacctgcctgccaactttgacacctgccaccgggccctgcagatcatcgcccgctacgtgcccagcaccccctggttcctgatgcccatcctggtggagaagttcccctttgtgaggaagtctgagaggaccctggagtgctacgtgcacaacctgctgcgcatctctgtgtacttccccaccctgcggcatgagatcctggagctgatcatcgagaagctgctgaagctggatgtgaatgccagccggcagggcattgaagatgctgaggagacagccacccagacctgtggcggcacagacagcacagagggcctcttcaacatggatgaagatgaggagacagagcacgagaccaaggccggccctgagcggctggaccagatggtgcaccctgtggccgagcggctggacatcctgatgagcctggtgctgagctacatgaaggatgtgtgctacgtggatggcaaggtggacaatggcaagaccaaggacctgtacagagacctgatcaacatctttgacaagctgctgctgcccacccacgccagctgccacgtgcagttcttcatgttctacctgtgcagcttcaagctgggctttgctgaggccttcctggagcacctgtggaagaagctgcaggaccccagcaacccagccatcatccggcaggccgccggcaactacatcggcagcttcctggcccgggccaagttcatccccctcatcaccgtgaagagctgcctggacctgctggtgaactggctgcacatctacctgaacaaccaggacagcggcaccaaggccttctgtgatgtggccctgcacggccccttctacagcgcctgccaggccgtgttctacacctttgtgttccgccacaagcagctgctgagcggcaacctgaaggagggcctgcagtacctgcagagcctgaactttgagcgcatcgtgatgagccagctgaaccccctgaagatctgcctgcccagcgtggtgaacttctttgctgccatcaccaacaagtaccagctggtgttctgctacaccatcattgaaagaaacaaccggcagatgctgcccgtcatccgcagcacagctggaggagacagcgtgcagatctgcaccaaccccctggacaccttcttcccctttgacccctgtgtgctgaagaggagcaagaagttcatcgaccccatctaccaggtgtgggaggacatgtctgctgaggagctgcaggagttcaagaagcccatgaagaaggacatcgtggaggatgaagatgatgacttcctgaagggggaggtgccccagaatgacaccgtcatcggcatcacccccagcagctttgacacccacttccgcagccccagcagctctgtgggcagcccccctgtgctgtacatgcagcccagccccctgtag

SEQ ID NO: 113321 - DNA, 1410 bp, Artificial Sequence
  derived and/or modified sequence
atgattgccagccactttgtgccccccagggtcatcatcaaggagggagatgtggatgtgtctgacagtgatgatgaagatgacaacctgcctgccaactttgacacctgccaccgggccctgcagatcatcgcccgctacgtgcccagcaccccctggttcctgatgcccatcctggtggagaagttcccctttgtgaggaagtctgagaggaccctggtgaatgccagccggcagggcattgaagatgctgaggagacagccacccagacctgtggcggcacagacagcacagagggcctcttcaacatggatgaagatgaggagacagagcacgagaccaaggccggccctgagcggctggaccagatggtgcaccctgtggccgagcggctggacatcctgatgagcctggtgctgagctacatgaaggatgtgtgctacgtggatggcaaggtggacaatggcaagaccaaggacctgtacagagacctgatcaacatctttgacaagctgctgctgcccacccacgccagctgccacgtgcagttcttcatgttctacctgtgcagcttcaagctgggctttgctgaggccttcctggagcacctgtggaagaagctgcaggaccccagcaacccagccatcatccggcaggccgccggcaactacatcggcagcttcctggcccgggccaagttcatccccctcatcaccgtgaagagctgcctggacctgctggtgaactggctgcacatctacctgaacaaccaggacagcggcaccaaggccttctgtgatgtggccctgcacggccccttctacagcgcctgccaggccgtgttctacacctttgtgttccgccacaagcagctgctgagcggcaacctgaaggagggcctgcagtacctgcagagcctgaactttgagcgcatcgtgatgagccagctgaaccccctgaagatctgcctgcccagcgtggtgaacttctttgctgccatcaccaacaagtaccagctggtgttctgctacaccatcattgaaagaaacaaccggcagatgctgcccgtcatccgcagcacagctggaggagacagcgtgcagatctgcaccaaccccctggacaccttcttcccctttgacccctgtgtgctgaagaggagcaagaagttcatcgaccccatctaccaggtgtgggaggacatgtctgctgaggagctgcaggagttcaagaagcccatgaagaaggacatcgtggaggatgaagatgatgacttcctgaagggggaggtgccccagaatgacaccgtcatcggcatcacccccagcagctttgacacccacttccgcagccccagcagctctgtgggcagcccccctgtgctgtacatgcagcccagccccctgtag

SEQ ID NO: 113322 - DNA, 1866 bp, Artificial Sequence
  derived and/or modified sequence
atggccgcccccctgctgcacacccggctgcccggcgacgccgccgcctcttcgtctgccgttaaaaaactgggcgcttctaggaccggcatttccaacatgcgcgccctcgaaaacgactttttcaactcacccccacggaaaactgtgcgatttggagggaccgtgaccgaggttctgctaaaatacaaaaaaggagaaactaatgattttgaacttttaaaaaatcagctccttgaccccgacatcaaacgtctgccctggttgaacagatcccagactgtcgtcgaagaatatctcgccttcctggggaatctagtatccgcccagacagtgttcttgaggccatgtctgtccatgattgcttcccacttcgtgcccccccgggtcatcataaaagaaggcgacgttgatgtgtccgattccgacgacgaggacgacaaccttcccgctaacttcgacacttgtcatagagccttgcagattatcgccaggtacgtgcccagtaccccctggtttctgatgcccatcctggtggagaagttccccttcgttcgaaaatcagaacggacacttgaatgctacgtacacaacctcctgaggatcagcgtgtattttccaacactcagacacgagatcctggaactcatcatagaaaagttgctgaaactggacgtgaacgcatccagacagggcatcgaggatgccgaggaaacagctacgcagacctgcgggggtaccgacagcaccgaggggctgtttaatatggacgaagatgaagaaacagaacatgaaactaaggcaggccctgagagattggaccagatggtgcaccccgtggccgagcgccttgacattctaatgtctctggttctttcttatatgaaggacgtttgctatgtggatggcaaagtggataatgggaagaccaaagatctatatagagacctgattaacatatttgacaagctgctgctccccacgcacgcctcctgccacgtgcagttttttatgttctacctgtgcagttttaagttgggcttcgccgaggcatttttagaacacctatggaagaaactgcaggatccaagcaatccggccatcatccgccaagcggcaggcaactatattggctcatttctggcgcgggccaaattcatacccttgatcactgtgaagtcgtgtttggatctacttgtgaattggttacacatatacctaaataaccaggattcaggcactaaagccttctgcgacgttgccctgcacggaccgttttacagcgcttgccaggcagtcttctatacattcgttttccgacataagcagctgctgtccgggaacctgaaagagggcctccaatatctccagtcgcttaacttcgagcggatagtgatgagccaactgaaccccctgaaaatttgtctcccaagtgttgtgaacttctttgctgccataacaaacaagtatcaactcgtgttctgctacacaatcatcgagcggaataaccggcagatgctgcccgttatccgcagcacagccggcggagatagcgtgcagatttgcaccaaccctctcgatacatttttccctttcgatccctgtgtcctaaagcgtagtaagaaattcatcgatcctatctatcaggtatgggaagacatgtcagctgaagaactgcaggagtttaagaagccaatgaaaaaagacattgtcgaagacgaggatgacgacttcttaaagggcgaggtcccccagaacgatacggtgattggtatcacacctagtagctttgatacacactttcgatctccgagtagcagcgtcggatcacctcccgttctctatatgcagccctcacctctgtag

SEQ ID NO: 113323 - DNA, 1410 bp, Artificial Sequence
  derived and/or modified sequence
atgatcgccagccacttcgtgcccccccgggtgatcatcaaggagggggacgtggacgtaagtgatagtgacgacgaagacgataacctccctgcgaattttgacacctgccaccgcgctctgcagatcatcgctaggtatgtaccttcaactccatggtttctgatgcctatcctggtcgaaaagttcccattcgtcaggaagtcggaaaggacactcgttaatgcatctaggcagggaattgaggacgctgaagaaacggccacacaaacttgcggagggaccgacagtacagagggcttgttcaacatggatgaggacgaggaaaccgaacacgagaccaaggctgggcccgaacgactggaccaaatggtacatcccgtggcggagagactggacatcctgatgagtctcgtgctgtcatatatgaaagatgtctgctacgtggatggtaaagtcgacaatggaaaaacgaaggatctctacagagatctgataaatattttcgataagctcctgcttcccacacacgcctcttgtcatgtgcaatttttcatgttttacctgtgttcattcaaattaggcttcgcagaggcttttctggagcacctttggaagaagttgcaggatccatccaaccctgcgattatcaggcaggcagctggaaactatatcgggtcatttctcgcccgagccaagtttattccgctcatcactgtaaagtcctgtttggacctgttggtcaactggctgcacatctacctaaacaatcaagactcaggcaccaaggctttctgtgatgttgctcttcatggacccttttactctgcttgccaggccgtgttctacacctttgtcttcagacacaaacagctcctctcaggaaatttgaaagaagggcttcagtacctgcagagcctaaatttcgagagaattgtaatgagtcagctcaatcctctcaaaatttgtttgccctcagtggtaaatttttttgctgctataacaaacaagtaccagctcgttttctgctatacaatcatagagcgcaataatcggcagatgctccctgtcatacgatcaacagctgggggcgattctgtccaaatctgtactaatcccttggacacattttttccctttgacccatgcgtccttaagagatccaaaaagtttatcgaccccatctaccaggtatgggaagacatgagtgctgaagagctgcaggagttcaaaaagcctatgaaaaaagacatagtggaagacgaagatgatgatttcctcaagggcgaagtgccacagaatgacacggtcattggaatcacccctagctctttcgacactcattttaggagtcctagcagttcagtaggaagtccaccggtgctttacatgcagccgtctcctctatag

SEQ ID NO: 113324 - DNA, 1866 bp, Artificial Sequence
  derived and/or modified sequence
atggcggcacctcttcttcacacgagacttcccggagacgcagccgcatccagttcggctgtgaaaaagctgggtgcctcccggaccggcattagcaacatgcgggctttggagaacgacttcttcaattcccccccaagaaagactgtgagattcggcggaactgtgacggaggttctgctgaagtataagaaaggagagaccaatgatttcgaactgcttaaaaatcagctgctggaccctgacatcaaacggttgccatggctgaacagaagccagacagtggttgaagagtatctggcattccttggaaacctcgtcagtgcacagacggtgttcctacggccatgtctcagcatgatagcatcacatttcgtacccccaagagtcattataaaagagggcgatgtcgatgtgagcgacagtgatgatgaggacgataatctgccagcaaatttcgatacctgtcatagggcgttacagattatagcgaggtacgtgccaagtacaccttggtttttgatgccaattctggttgaaaagtttccattcgttcgaaagtcagagagaacgttggagtgctacgttcacaacctactgcgaatctccgtgtatttccccacactcaggcatgagatcctcgaactcatcatcgaaaaacttctcaaattggatgtcaacgccagcagacagggaattgaggacgctgaggagactgctacacaaacctgcggaggcacagatagcactgaaggcctgtttaacatggatgaggacgaagagaccgagcatgaaacaaaggcaggccctgagaggctcgaccagatggtgcatcctgtggctgaaagactggacatcctgatgtcattagttctgtcttacatgaaggacgtgtgctacgtggatgggaaggtggacaacggaaaaacaaaagatctatatcgggacctgataaatattttcgataaactgttattacctacccatgcctcatgccatgtgcagttctttatgttctacctgtgtagttttaaattgggcttcgctgaggcttttttggaacatttatggaaaaagttgcaggatccgagcaatcccgctattatccgccaggccgctggtaattacatcggctcgtttctggccagagctaaatttatccctttaattactgtgaagtcttgcctggatctcctcgtgaattggttgcacatctacctgaacaaccaggatagcggtacaaaagcattctgcgatgtggctcttcacggcccattctactcggcctgtcaggctgttttctacaccttcgttttccgacacaagcagctgcttagcggcaacctaaaggaaggtcttcaatatctgcaatctcttaactttgaacggattgtgatgtctcagctcaatccacttaagatttgtttacccagcgttgtcaatttttttgcagccattaccaacaagtaccagctggtcttctgttacaccattatagaacggaacaaccgccagatgctaccggtgattaggtctactgctggaggcgacagtgtccagatttgtaccaatccactggacacattctttcccttcgacccttgtgtgctcaagagatccaagaagtttattgaccccatctatcaggtctgggaggatatgagtgcagaggaattacaggagtttaaaaaacctatgaagaaggacatcgtagaagacgaagacgacgattttctgaaaggcgaagtcccacaaaatgatacagtgattggtatcacaccttcatcatttgacacacacttcaggtctccaagctcgagcgtcggctcccctcctgtgctttatatgcagcctagccccctctag

SEQ ID NO: 113325 - DNA, 1410 bp, Artificial Sequence
  derived and/or modified sequence
atgatcgccagccattttgtgccccctcgggtcattatcaaggagggcgacgtcgacgtatcggattctgatgacgaagatgataacctgcctgccaacttcgacacatgtcatcgtgccttgcagataatcgcacgctacgttccttccactccttggtttctgatgcccattctcgtggagaaatttccattcgtcagaaaaagtgagcggacactcgtaaacgcaagccgccaggggatcgaagatgctgaggagacggcaacgcagacttgcggcggaactgattcaacagagggcttatttaatatggatgaagacgaggagacagagcatgagaccaaagcaggtcctgagagactcgaccagatggtccaccctgtggctgaacgcctcgacattctgatgtccctagtgctgagctatatgaaggacgtgtgttacgtggacggtaaagttgacaacgggaagacgaaggacctctacagagacctgataaatattttcgataaactgctgctgcccactcacgcttcttgccacgtgcagttctttatgttctatctgtgctcatttaagctagggtttgcggaggcctttctcgaacacttatggaagaagctgcaggatccaagtaatccagccattatcagacaggccgcagggaattacattggttctttcttggcacgcgctaaatttatcccactcattacagtgaaaagttgcctggatctcctagtgaactggctgcatatctaccttaacaatcaggacagtgggacaaaggctttctgcgatgtggcgcttcacggccctttttatagtgcctgccaagccgttttttacacctttgtattccggcacaagcaactgcttagtggcaatcttaaggagggactccagtatcttcaatcgctcaactttgagcgcatcgttatgtcccaactcaacccgctgaaaatatgcctccctagtgtagtgaattttttcgcagccatcactaataaataccagcttgtattctgctataccatcattgagagaaacaaccggcagatgttacctgttatcaggtctacagcaggaggtgactctgttcagatatgtacaaacccactggacacgttcttcccctttgacccctgcgtgctcaaaagaagtaaaaagttcatagatccgatctatcaggtgtgggaggacatgtctgccgaggaactgcaagagttcaagaagccaatgaagaaagatatcgttgaagatgaagatgatgactttctcaagggtgaggtgcctcagaatgacaccgtgataggcataaccccgagtagcttcgatactcacttccggagtccatcatcttcggttggcagccctccagtcctgtatatgcaacccagtcccctttag

SEQ ID NO: 113326 - DNA, 2198 bp, Artificial Sequence
  derived and/or modified sequence
gcgttagttcggcccaatggcggcaccgctgcttcacacgcgtttgccgggagatgcggccgcttcgtcctctgcagttaagaagctgggcgcgtcgaggactgggatttcaaatatgcgtgcattagagaatgactttttcaattctcccccaagaaaaactgttcggtttggtggaactgtgacagaagtcttgctgaagtacaaaaagggtgaaacaaatgactttgagttgttgaagaaccagctgttagatccagacataaagagattgccttggttgaatagaagtcaaacagtagtggaagagtatttggcttttcttggtaatcttgtatcagcacagactgttttcctcagaccgtgtctcagcatgattgcttcccattttgtgcctccccgagtgatcattaaggaaggcgatgtagatgtttcagattctgatgatgaagatgataatcttcctgcaaattttgacacatgtcacagagccttgcaaataatagcaagatatgtaccatcgacaccgtggtttctcatgccaatactggtggaaaaatttccatttgttcgaaaatcagagagaacactggaatgttacgttcataacttactaaggattagtgtatattttccaaccttgaggcatgaaattctggagcttattattgaaaaactactcaagttggatgtgaatgcatcccggcagggtattgaagatgctgaagaaacagcaactcaaacttgtggtgggacagattccacggaaggattgtttaatatggatgaagatgaagaaactgaacatgaaacaaaggctggtcctgaacggctcgaccagatggtgcatcctgtagccgagcgcctggacatcctgatgtctttggttttgtcctacatgaaggatgtctgctatgtagatggtaaggttgataacggcaaaacaaaggatctatatcgcgacctgataaacatctttgacaaactcctgttgcccacccatgcctcctgccatgtacagtttttcatgttttacctctgtagtttcaaattgggattcgcagaggcatttttggaacatctctggaaaaaattgcaggacccaagtaatcctgccatcatcaggcaggctgctggaaattatattggaagctttttggcaagagctaaatttattcctcttattactgtaaaatcatgcctagatcttttggttaactggctgcacatataccttaataaccaggattcgggaacaaaggcattctgcgatgttgctctccatggaccattttactcagcctgccaagctgtgttctacacctttgtttttagacacaagcagcttttgagcggaaacctgaaagaaggtttgcagtatcttcagagtctgaattttgagcggatagtgatgagccagctaaatcccctgaagatttgcctgccctcagtggttaacttttttgctgcaatcacaaataagtaccagctcgtcttctgctacaccatcattgagaggaacaatcgccagatgctgccagtcattaggagtaccgctggaggagactcagtgcagatctgcacaaacccgctggacaccttcttcccctttgatccctgtgtgctgaagaggtcaaagaaattcattgatcctatttatcaggtgtgggaagacatgagtgctgaagagctacaggagttcaagaaacccatgaaaaaggacatagtggaagatgaagatgatgactttctgaaaggcgaagtgccccagaatgataccgtgattgggatcacaccaagctcctttgacacgcatttccgaagtccttcaagtagtgtgggctccccacccgtgttgtacatgcaacccagtcccctctgacggcagaaatttgtgactgagatgtgacatttgggattccccatcacttgtcatgccctcagcacccagcttgtgccattgggcattgatggcattgaactagagcgagtgcctgcctcggctgtggcacttccaggttcgactgaatcaagcatctgaagactgggtttttttgttgttgttgttccccttacagacaaaatgaagactatcatgtgcaatcttttacagtggggttgatgatacatttggaaggatttgcttgtttaatatgtacattttttgtgttaacagctttttgacacaattactgggt

SEQ ID NO: 113327 - DNA, 1866 bp, Artificial Sequence
  derived and/or modified sequence
atggccgcccccctgctgcacaccagactgcccggcgacgccgccgccagcagcagcgccgtgaagaagctgggcgccagcagaaccggcatcagcaacatgagagccctggagaacgacttcttcaacagcccccccagaaagaccgtgagattcggcggcaccgtgaccgaggtgctgctgaagtacaagaagggcgagaccaacgacttcgagctgctgaagaaccagctgctggaccccgacatcaagagactgccctggctgaacagaagccagaccgtggtggaggagtacctggccttcctgggcaacctggtgagcgcccagaccgtgttcctgagaccctgcctgagcatgatcgccagccacttcgtgccccccagagtgatcatcaaggagggcgacgtggacgtgagcgacagcgacgacgaggacgacaacctgcccgccaacttcgacacctgccacagagccctgcagatcatcgccagatacgtgcccagcaccccctggttcctgatgcccatcctggtggagaagttccccttcgtgagaaagagcgagagaaccctggagtgctacgtgcacaacctgctgagaatcagcgtgtacttccccaccctgagacacgagatcctggagctgatcatcgagaagctgctgaagctggacgtgaacgccagcagacagggcatcgaggacgccgaggagaccgccacccagacctgcggcggcaccgacagcaccgagggcctgttcaacatggacgaggacgaggagaccgagcacgagaccaaggccggccccgagagactggaccagatggtgcaccccgtggccgagagactggacatcctgatgagcctggtgctgagctacatgaaggacgtgtgctacgtggacggcaaggtggacaacggcaagaccaaggacctgtacagagacctgatcaacatcttcgacaagctgctgctgcccacccacgccagctgccacgtgcagttcttcatgttctacctgtgcagcttcaagctgggcttcgccgaggccttcctggagcacctgtggaagaagctgcaggaccccagcaaccccgccatcatcagacaggccgccggcaactacatcggcagcttcctggccagagccaagttcatccccctgatcaccgtgaagagctgcctggacctgctggtgaactggctgcacatctacctgaacaaccaggacagcggcaccaaggccttctgcgacgtggccctgcacggccccttctacagcgcctgccaggccgtgttctacaccttcgtgttcagacacaagcagctgctgagcggcaacctgaaggagggcctgcagtacctgcagagcctgaacttcgagagaatcgtgatgagccagctgaaccccctgaagatctgcctgcccagcgtggtgaacttcttcgccgccatcaccaacaagtaccagctggtgttctgctacaccatcatcgagagaaacaacagacagatgctgcccgtgatcagaagcaccgccggcggcgacagcgtgcagatctgcaccaaccccctggacaccttcttccccttcgacccctgcgtgctgaagagaagcaagaagttcatcgaccccatctaccaggtgtgggaggacatgagcgccgaggagctgcaggagttcaagaagcccatgaagaaggacatcgtggaggacgaggacgacgacttcctgaagggcgaggtgccccagaacgacaccgtgatcggcatcacccccagcagcttcgacacccacttcagaagccccagcagcagcgtgggcagcccccccgtgctgtacatgcagcccagccccctgtag

SEQ ID NO: 113328 - DNA, 1410 bp, Artificial Sequence
  derived and/or modified sequence
atgatcgccagccacttcgtgccccccagagtgatcatcaaggagggcgacgtggacgtgagcgacagcgacgacgaggacgacaacctgcccgccaacttcgacacctgccacagagccctgcagatcatcgccagatacgtgcccagcaccccctggttcctgatgcccatcctggtggagaagttccccttcgtgagaaagagcgagagaaccctggtgaacgccagcagacagggcatcgaggacgccgaggagaccgccacccagacctgcggcggcaccgacagcaccgagggcctgttcaacatggacgaggacgaggagaccgagcacgagaccaaggccggccccgagagactggaccagatggtgcaccccgtggccgagagactggacatcctgatgagcctggtgctgagctacatgaaggacgtgtgctacgtggacggcaaggtggacaacggcaagaccaaggacctgtacagagacctgatcaacatcttcgacaagctgctgctgcccacccacgccagctgccacgtgcagttcttcatgttctacctgtgcagcttcaagctgggcttcgccgaggccttcctggagcacctgtggaagaagctgcaggaccccagcaaccccgccatcatcagacaggccgccggcaactacatcggcagcttcctggccagagccaagttcatccccctgatcaccgtgaagagctgcctggacctgctggtgaactggctgcacatctacctgaacaaccaggacagcggcaccaaggccttctgcgacgtggccctgcacggccccttctacagcgcctgccaggccgtgttctacaccttcgtgttcagacacaagcagctgctgagcggcaacctgaaggagggcctgcagtacctgcagagcctgaacttcgagagaatcgtgatgagccagctgaaccccctgaagatctgcctgcccagcgtggtgaacttcttcgccgccatcaccaacaagtaccagctggtgttctgctacaccatcatcgagagaaacaacagacagatgctgcccgtgatcagaagcaccgccggcggcgacagcgtgcagatctgcaccaaccccctggacaccttcttccccttcgacccctgcgtgctgaagagaagcaagaagttcatcgaccccatctaccaggtgtgggaggacatgagcgccgaggagctgcaggagttcaagaagcccatgaagaaggacatcgtggaggacgaggacgacgacttcctgaagggcgaggtgccccagaacgacaccgtgatcggcatcacccccagcagcttcgacacccacttcagaagccccagcagcagcgtgggcagcccccccgtgctgtacatgcagcccagccccctgtag

SEQ ID NO: 113329 - protein, 551 aa, Artificial Sequence
  derived and/or modified sequence
MPGRTWELCLLLLLGLGLGSQEALPPPCESEIYCHGELLNQVQMAKLYQDDKQFVDMPLSIAPEQVLQTFTELSRDHNHSIPREQLQAFVHEHFQAKGQELQPWTPADWKDSPQFLQKISDAKLRAWAGQLHQLWKKLGKKMKPEVLSHPERFSLIYSEHPFIVPGGRFVEFYYCYGHVPNGGRVYYLQRSQPPLLTLMMDCYLTHTNDTAFLQENIETLALELDFWTKNRTVSVSLEGKNYLLNRYYVPYGGPRPESYSKDVELADTLPEGDREALWAELKAGAESGWDFSSRWLIGGPNPNSLSGIRTSKLVPVDLNAFLCQAEELMSNFYSRLGNDSQATKYRILRSQRLAALNTVLWDEQTGAWFDYDLEKKKKNREFYPSNLTPLWAGCFSDPGVADKALKYLEDNRILTYQYGIPTSLQKTGQQWDFPNAWAPLQDLVIRGLAKAPLRRAQEVAFQLAQNWIRTNFDVYSQKSAMYEKYDVSNGGQPGGGGEYEVQEGFGWTNGVVLMLLDRYGDRLTSGPKLPFLEPHCLATLLPSLLLSLLPW

SEQ ID NO: 113330 - protein, 546 aa, Artificial Sequence
  derived and/or modified sequence
MPGRTWELCLLLLLGLGLGSQEALPPPCESEIYCHGELLNQVQMAKLYQDDKQFVDMPLSIAPEQVLQTFTELSRDHNHSIPREQLQAFVHEHFQAKGQELQPWTPADWKDSPQFLQKISDAKLRAWAGQLHQLWKKLGKKMKPEVLSHPERFSLIYSEHPFIVPGGRFVEFYYCYGHVPNGGRVYYLQRSQPPLLTLMMDCYLTHTNDTAFLQENIETLALELDFWTKNRTVSVSLEGKNYLLNRYYVPYGGPRPESYSKDVELADTLPEGDREALWAELKAGAESGWDFSSRWLIGGPNPNSLSGIRTSKLVPVDLNAFLCQAEELMSNFYSRLGNDSQATKYRILRSQRLAALNTVLWDEQTGAWFDYDLEKKKKNREFYPSNLTPLWAGCFSDPGVADKALKYLEDNRILTYQYGIPTSLQKTGQQWDFPNAWAPLQDLVIRGLAKAPLRRAQEVAFQLAQNWIRTNFDVYSQKSAMYEKYDVSNGGQPGGGGEYEVQEGFGWTNGVVLMLLDRYGDRLTSGPKLPFLEPHCLGPPFCPASC

SEQ ID NO: 113331 - DNA, 1656 bp, Artificial Sequence
  derived and/or modified sequence
atgcccggcagaacctgggagctgtgcctgctgctgctgctgggcctgggcctgggcagccaggaggccctgccccccccctgcgagagcgagatctactgccacggcgagctgctgaaccaggtgcagatggccaagctgtaccaggacgacaagcagttcgtggacatgcccctgagcatcgcccccgagcaggtgctgcagaccttcaccgagctgagcagagaccacaaccacagcatccccagagagcagctgcaggccttcgtgcacgagcacttccaggccaagggccaggagctgcagccctggacccccgccgactggaaggacagcccccagttcctgcagaagatcagcgacgccaagctgagagcctgggccggccagctgcaccagctgtggaagaagctgggcaagaagatgaagcccgaggtgctgagccaccccgagagattcagcctgatctacagcgagcaccccttcatcgtgcccggcggcagattcgtggagttctactactgctacggccacgtgcccaacggcggcagagtgtactacctgcagagaagccagccccccctgctgaccctgatgatggactgctacctgacccacaccaacgacaccgccttcctgcaggagaacatcgagaccctggccctggagctggacttctggaccaagaacagaaccgtgagcgtgagcctggagggcaagaactacctgctgaacagatactacgtgccctacggcggccccagacccgagagctacagcaaggacgtggagctggccgacaccctgcccgagggcgacagagaggccctgtgggccgagctgaaggccggcgccgagagcggctgggacttcagcagcagatggctgatcggcggccccaaccccaacagcctgagcggcatcagaaccagcaagctggtgcccgtggacctgaacgccttcctgtgccaggccgaggagctgatgagcaacttctacagcagactgggcaacgacagccaggccaccaagtacagaatcctgagaagccagagactggccgccctgaacaccgtgctgtgggacgagcagaccggcgcctggttcgactacgacctggagaagaagaagaagaacagagagttctaccccagcaacctgacccccctgtgggccggctgcttcagcgaccccggcgtggccgacaaggccctgaagtacctggaggacaacagaatcctgacctaccagtacggcatccccaccagcctgcagaagaccggccagcagtgggacttccccaacgcctgggcccccctgcaggacctggtgatcagaggcctggccaaggcccccctgagaagagcccaggaggtggccttccagctggcccagaactggatcagaaccaacttcgacgtgtacagccagaagagcgccatgtacgagaagtacgacgtgagcaacggcggccagcccggcggcggcggcgagtacgaggtgcaggagggcttcggctggaccaacggcgtggtgctgatgctgctggacagatacggcgacagactgaccagcggccccaagctgcccttcctggagccccactgcctggccaccctgctgcccagcctgctgctgagcctgctgccctggtag

SEQ ID NO: 113332 - DNA, 1641 bp, Artificial Sequence
  derived and/or modified sequence
atgcccggcagaacctgggagctgtgcctgctgctgctgctgggcctgggcctgggcagccaggaggccctgccccccccctgcgagagcgagatctactgccacggcgagctgctgaaccaggtgcagatggccaagctgtaccaggacgacaagcagttcgtggacatgcccctgagcatcgcccccgagcaggtgctgcagaccttcaccgagctgagcagagaccacaaccacagcatccccagagagcagctgcaggccttcgtgcacgagcacttccaggccaagggccaggagctgcagccctggacccccgccgactggaaggacagcccccagttcctgcagaagatcagcgacgccaagctgagagcctgggccggccagctgcaccagctgtggaagaagctgggcaagaagatgaagcccgaggtgctgagccaccccgagagattcagcctgatctacagcgagcaccccttcatcgtgcccggcggcagattcgtggagttctactactgctacggccacgtgcccaacggcggcagagtgtactacctgcagagaagccagccccccctgctgaccctgatgatggactgctacctgacccacaccaacgacaccgccttcctgcaggagaacatcgagaccctggccctggagctggacttctggaccaagaacagaaccgtgagcgtgagcctggagggcaagaactacctgctgaacagatactacgtgccctacggcggccccagacccgagagctacagcaaggacgtggagctggccgacaccctgcccgagggcgacagagaggccctgtgggccgagctgaaggccggcgccgagagcggctgggacttcagcagcagatggctgatcggcggccccaaccccaacagcctgagcggcatcagaaccagcaagctggtgcccgtggacctgaacgccttcctgtgccaggccgaggagctgatgagcaacttctacagcagactgggcaacgacagccaggccaccaagtacagaatcctgagaagccagagactggccgccctgaacaccgtgctgtgggacgagcagaccggcgcctggttcgactacgacctggagaagaagaagaagaacagagagttctaccccagcaacctgacccccctgtgggccggctgcttcagcgaccccggcgtggccgacaaggccctgaagtacctggaggacaacagaatcctgacctaccagtacggcatccccaccagcctgcagaagaccggccagcagtgggacttccccaacgcctgggcccccctgcaggacctggtgatcagaggcctggccaaggcccccctgagaagagcccaggaggtggccttccagctggcccagaactggatcagaaccaacttcgacgtgtacagccagaagagcgccatgtacgagaagtacgacgtgagcaacggcggccagcccggcggcggcggcgagtacgaggtgcaggagggcttcggctggaccaacggcgtggtgctgatgctgctggacagatacggcgacagactgaccagcggccccaagctgcccttcctggagccccactgcctgggcccccccttctgccccgccagctgctag

SEQ ID NO: 113333 - DNA, 1656 bp, Artificial Sequence
  derived and/or modified sequence
atgccgggtcgaacttgggagttgtgtctcctcctgttgcttggattgggcttaggcagtcaggaagcactcccccccccttgtgaaagcgagatctattgtcacggcgaacttctcaaccaagtacagatggccaagctctaccaagatgacaaacagtttgtcgatatgcctctaagtatagcccctgagcaggtgctgcaaacatttaccgaactctcccgcgaccacaatcattctatcccacgggaacagttgcaggctttcgttcatgagcattttcaggccaaaggacaggaattacaaccctggactccagcagactggaaggattctccccagtttctgcagaagatctccgacgctaaactaagggcgtgggcggggcagctgcatcagctatggaagaaactgggcaaaaagatgaagccagaggtgctgagtcatcccgagcgttttagcctgatctacagtgagcaccccttcatcgtgcccggcgggcggttcgtggagttctattattgttacggacatgtgcccaacggaggtagagtgtactacttgcagcggagccagcctcctttactaaccctgatgatggattgctatctcacccataccaacgacaccgcttttctccaggagaatattgaaacactcgcgctggaactagacttttggacgaagaatcggactgtgtctgtgtctctggagggcaaaaactatcttctcaaccgctactatgttccttacggaggaccccggcccgagtcttacagtaaggatgtggagttagcggacacactcccagagggggatcgggaagccctttgggccgagctcaaggctggtgctgaatcagggtgggatttttctagcaggtggttaattggggggccgaaccctaactcacttagcggcatacgcacatccaagttagtacccgttgatcttaacgcattcttatgccaggccgaggagctgatgtccaacttctatagccgtctgggcaatgactcccaggctacaaaataccggatcctgagaagccagagactggcagccctgaataccgtgctgtgggatgaacagaccggagcctggttcgattatgaccttgaaaagaagaaaaagaaccgggagttttacccatccaatcttacacccttatgggctggctgctttagcgatccgggcgtcgctgacaaagccttgaagtacctggaagataacagaatcttaacttatcagtatggcatccccacttccctgcagaagacaggacagcagtgggacttccctaatgcttgggcccctttacaagacctggtcatccgaggcttggctaaagctcctcttcgacgcgctcaagaggtggccttccagcttgcacaaaattggataagaacaaatttcgatgtctattctcagaagtctgctatgtacgaaaaatacgacgtgtcaaacggtggacagcctggcggcggcggagagtatgaggtccaggaggggttcggctggaccaacggcgtggtgctgatgcttctggacagatacggggaccgtctgacctcggggccaaagctcccgttcctggaaccgcactgcctcgccacgcttctaccgagtctgctgctctcccttttgccgtggtag

SEQ ID NO: 113334 - DNA, 1641 bp, Artificial Sequence
  derived and/or modified sequence
atgcccggacggacttgggaactttgtcttttgctcctgctcggtctcggactgggcagccaggaggcgctcccacctccctgtgagagcgagatctactgtcacggcgaacttctgaatcaagtgcaaatggccaagctgtaccaggatgataagcaattcgtggacatgccactctcaatcgctcccgagcaggtcctgcagacctttaccgagctgtcacgtgaccacaaccactccatcccaagagagcaactccaggcctttgtgcatgaacattttcaagccaaaggccaagaactgcagccttggacacccgccgactggaaggattcacctcaatttctccaaaagatttcagatgcaaaactgcgagcatgggctggccagttgcatcagctgtggaaaaagcttgggaagaagatgaagcctgaggtcctgtcacatccggagcggttcagtcttatctactctgaacatccattcatagtgcctggcgggagattcgtggagttctactactgctacgggcatgtgcctaatggggggcgcgtgtattacctgcagaggtctcagccccccctcctgacgctcatgatggactgctacctcacacacacaaacgacaccgcttttttacaggagaacatcgagaccctggcgctggaacttgatttttggaccaagaaccggaccgtgagcgtatcactggaagggaagaactacctattgaatcgttactacgtgccctacggcgggcctaggcctgagtcttatagcaaggatgtcgagctggccgatacactaccagagggcgatcgtgaggccctgtgggctgaattgaaagctggcgccgagagcgggtgggatttctcatctaggtggctgatcggaggtccaaatcccaattcactttctggcattaggacctctaagctcgttcctgtggacctgaatgctttcctgtgccaagcagaggaactcatgtcgaacttctatagccgcctcgggaatgattctcaggccaccaagtaccgcatcctgcgctctcagcggttagcggccctgaatacagtgctctgggatgaacagacaggggcttggttcgactacgacctggaaaagaagaagaagaaccgcgagttttatccaagcaacctcacacctctgtgggcaggctgtttttcagacccaggtgttgctgacaaagccctgaaatacctggaagataatcgcatactgacctaccaatatgggatccctacatcactgcagaaaactgggcagcagtgggactttcctaacgcctgggcccctcttcaagatttagttattcgcgggcttgccaaagcacccctgcgaagagcacaagaggtcgcctttcagctggcacagaactggatccgaaccaactttgatgtctactcacagaagagcgccatgtacgaaaagtacgatgtgagtaatggcgggcaacccggcggcgggggcgaatacgaggtgcaggagggcttcggctggactaacggggttgtgttgatgctactggacaggtacggcgaccggctcactagtggacctaaactgccattcctggagccccattgcctgggaccccctttctgcccagcatcctgctag

SEQ ID NO: 113335 - DNA, 1656 bp, Artificial Sequence
  derived and/or modified sequence
atgcctggccgcacctgggagctgtgcctgctgctgctgctgggcctgggcctgggcagccaggaggccctgcccccaccctgtgagagcgagatctactgccacggggagctgctgaaccaggtgcagatggccaagctgtaccaggatgacaagcagtttgtggacatgcccctgagcatcgcccctgagcaggtgctgcagaccttcacagagctgagccgggaccacaaccacagcatcccccgggagcagctgcaggcctttgtgcatgagcacttccaggccaagggccaggagctgcagccctggaccccagctgactggaaggacagcccccagttcctgcagaagatcagtgatgccaagctgcgggcctgggccggccagctgcaccagctgtggaagaagctgggcaagaagatgaagccagaggtgctgagccaccctgagcgcttcagcctcatctacagcgagcaccccttcatcgtgcctgggggccgctttgtggagttctactactgctacggccacgtgcccaatggaggccgggtgtactacctgcagaggagccagccccccctgctgaccctgatgatggactgctacctgacccacaccaatgacacagccttcctgcaggagaacatcgagaccctggccctggagctggacttctggaccaagaacagaacagtgtctgtgtccctggagggcaagaactacctgctgaaccgctactacgtgccctatggaggccccaggcctgagagctacagcaaggatgtggagctggccgacaccctgcctgagggggaccgggaggccctgtgggccgagctgaaggccggggctgagagcggctgggacttcagcagccgctggctgattggaggccccaaccccaacagcctgagcggcatccgcaccagcaagctggtgcctgtggacctgaatgccttcctgtgccaggccgaggagctgatgagcaacttctacagccggctgggcaatgacagccaggccaccaagtaccgcatcctgcggagccagaggctggccgccctgaacacagtgctgtgggatgagcagacaggagcctggtttgattatgacctggagaagaagaagaagaaccgggagttctaccccagcaacctgacccccctgtgggccggctgcttcagtgaccccggggtggccgacaaggccctgaagtacctggaggacaaccgcatcctgacctaccagtatggcatccccaccagcctgcagaagacaggccagcagtgggacttccccaatgcctgggcccccctgcaggacctggtgatccggggcctggccaaggcccccctgcggcgggcccaggaggtggccttccagctggcccagaactggatccgcaccaactttgatgtgtacagccagaagagcgccatgtatgagaagtatgatgtgtccaatggaggccagcccggcggcggcggggagtatgaggtgcaggagggcttcggctggaccaatggagtggtgctgatgctgctggacagatatggagaccggctgaccagcggccccaagctgcccttcctggagccccactgcctggccaccctgctgcccagcctgctgctgagcctgctgccctggtag

SEQ ID NO: 113336 - DNA, 1641 bp, Artificial Sequence
  derived and/or modified sequence
atgcctggccgcacctgggagctgtgcctgctgctgctgctgggcctgggcctgggcagccaggaggccctgcccccaccctgtgagagcgagatctactgccacggggagctgctgaaccaggtgcagatggccaagctgtaccaggatgacaagcagtttgtggacatgcccctgagcatcgcccctgagcaggtgctgcagaccttcacagagctgagccgggaccacaaccacagcatcccccgggagcagctgcaggcctttgtgcatgagcacttccaggccaagggccaggagctgcagccctggaccccagctgactggaaggacagcccccagttcctgcagaagatcagtgatgccaagctgcgggcctgggccggccagctgcaccagctgtggaagaagctgggcaagaagatgaagccagaggtgctgagccaccctgagcgcttcagcctcatctacagcgagcaccccttcatcgtgcctgggggccgctttgtggagttctactactgctacggccacgtgcccaatggaggccgggtgtactacctgcagaggagccagccccccctgctgaccctgatgatggactgctacctgacccacaccaatgacacagccttcctgcaggagaacatcgagaccctggccctggagctggacttctggaccaagaacagaacagtgtctgtgtccctggagggcaagaactacctgctgaaccgctactacgtgccctatggaggccccaggcctgagagctacagcaaggatgtggagctggccgacaccctgcctgagggggaccgggaggccctgtgggccgagctgaaggccggggctgagagcggctgggacttcagcagccgctggctgattggaggccccaaccccaacagcctgagcggcatccgcaccagcaagctggtgcctgtggacctgaatgccttcctgtgccaggccgaggagctgatgagcaacttctacagccggctgggcaatgacagccaggccaccaagtaccgcatcctgcggagccagaggctggccgccctgaacacagtgctgtgggatgagcagacaggagcctggtttgattatgacctggagaagaagaagaagaaccgggagttctaccccagcaacctgacccccctgtgggccggctgcttcagtgaccccggggtggccgacaaggccctgaagtacctggaggacaaccgcatcctgacctaccagtatggcatccccaccagcctgcagaagacaggccagcagtgggacttccccaatgcctgggcccccctgcaggacctggtgatccggggcctggccaaggcccccctgcggcgggcccaggaggtggccttccagctggcccagaactggatccgcaccaactttgatgtgtacagccagaagagcgccatgtatgagaagtatgatgtgtccaatggaggccagcccggcggcggcggggagtatgaggtgcaggagggcttcggctggaccaatggagtggtgctgatgctgctggacagatatggagaccggctgaccagcggccccaagctgcccttcctggagccccactgcctgggcccccccttctgcccagccagctgctag

SEQ ID NO: 113337 - DNA, 1656 bp, Artificial Sequence
  derived and/or modified sequence
atgcccggccggacctgggagctgtgcctgctgctgctgctgggcttggggttggggagccaggaagccctgccacctccctgcgagtcagaaatctactgccacggcgaactgcttaaccaggtgcagatggcgaaactataccaagacgacaagcagttcgtggatatgcctctgagtattgcccctgaacaggtacttcagacctttactgaattgagcagggatcacaaccactccattcctagagagcagctacaggcctttgtacacgaacacttccaggctaaggggcaagaactgcagccatggactccggctgactggaaagattcgccacagttcctgcaaaaaataagcgacgccaagctccgcgcatgggcaggtcagctgcatcaactgtggaagaaactcgggaagaagatgaagccagaggtgctttcacatcctgaaaggttctctcttatttactccgagcacccttttatcgttcctgggggcagattcgttgagttctattattgttacggacatgtgccaaatggcggccgggtgtactatttacaacgaagccagcctcccttactgaccttaatgatggattgctatctcactcacacaaatgacaccgcctttctccaggagaacattgagacactggccctggaactcgatttctggacaaaaaacagaaccgtgagcgtgtcccttgaagggaagaactacctactaaacaggtattacgttccatacggagggccaagaccggagtcttactctaaggacgtggaactcgctgatacactgccggaaggagacagggaagccctctgggccgagctgaaggcaggtgcggagtcgggttgggatttctcttctcgctggctaatcggcggtcctaacccaaactccttatctgggataagaacctcaaaacttgtccctgtggacttgaacgccttcctctgccaggccgaggaacttatgagcaatttctacagtcgccttggaaacgactcacaggctacaaaatacaggattctgcggagtcagaggttggcagcgctgaacacggtgctatgggacgagcagacaggtgcctggtttgattacgatcttgagaaaaaaaagaagaatagggaattctacccttctaacctgacgccgttatgggcgggctgtttcagcgacccaggcgtcgccgataaagccctgaagtatctcgaggacaacaggatactcacataccaatacggtattcctacatcacttcagaagacaggccaacagtgggacttccccaatgcctgggctcccctgcaggacttggtaatccgcgggcttgctaaagcgcccctccggcgggctcaggaagtggcattccagctcgctcagaactggattaggaccaattttgacgtttacagccagaaatcagcaatgtacgagaaatatgatgtctccaatggcgggcagcccggaggaggcggcgagtatgaggtccaggagggtttcggttggacgaatggggttgttttaatgctgctggaccgatacggtgataggcttacttctggacccaaactcccctttttagaaccacattgtcttgccacacttctaccctccctgctgctctcgctcctgccctggtag

SEQ ID NO: 113338 - DNA, 1641 bp, Artificial Sequence
  derived and/or modified sequence
atgcccggccggacctgggagctgtgcctgctgctgctgctgggcctcggtcttgggtctcaggaagccctcccgccaccctgcgaaagcgaaatctactgccatggggaactcctcaatcaggttcagatggcgaagctgtaccaggatgataagcagttcgttgacatgcccctgtccatcgcccctgagcaggtgctgcagacttttacggagctgagtagggaccacaaccactcaatacctcgggagcagctccaagccttcgtacatgaacacttccaggccaagggccaggagctgcagccatggactccagccgactggaaagattccccgcaatttctccagaaaatctccgacgctaagcttagagcatgggcgggccagcttcatcagctttggaagaaactcggcaaaaaaatgaagcccgaggtgctgagtcacccagaaagatttagtctgatatacagtgaacaccccttcatcgtgcccggcggcagatttgttgagttctattactgctacggccatgtcccgaacggggggcgcgtgtactacctgcagcggagccagccacctttactcactttaatgatggactgctacctgacacatacaaacgataccgcttttctccaggaaaacattgaaacgctagccctcgagcttgatttctggactaagaacaggacggtgtctgtgtcccttgagggtaagaactacctccttaatagatactacgtaccctacgggggcccacggcctgagtcctactccaaagacgtagaactcgctgacacccttcccgaaggcgacagggaggccttgtgggctgaactgaaggccggagcagaaagtggatgggattttagttctagatggctcattggtggccctaatcctaactctctgagcgggattaggacttcgaagctcgttcctgtggatctgaacgccttcctctgccaggcagaagagcttatgtcaaatttctacagccgtctgggtaacgactcacaagctacaaagtatcgcatattgcgcagccagcggctggcagcattaaataccgtgctgtgggatgagcagacgggggcttggttcgattatgacctggagaagaaaaagaagaatagagaattttacccctcgaacctcaccccactttgggcaggttgtttttccgacccaggtgtagccgacaaagccctgaagtacctagaggacaatcgaattctcacataccagtatggcatacctacatcactgcagaaaacggggcagcaatgggacttccctaatgcttgggcaccactacaagacctggtcataagaggcttagccaaggccccgttgcgccgtgcgcaggaggtggctttccagctggcccagaactggatcagaacaaacttcgatgtttactctcaaaagagcgcaatgtacgaaaaatatgacgttagcaacgggggacagcccggcggtggaggagaatacgaggtgcaagaagggtttggctggaccaatggcgtggttttgatgctgctcgacagatatggtgataggttaacgtccggaccaaaattaccatttctggagcctcactgccttgggcctcctttttgtccagccagctgttag

SEQ ID NO: 113339 - DNA, 1656 bp, Artificial Sequence
  derived and/or modified sequence
atgcccggaaggacatgggagttgtgcctacttttgctgctggggctgggactagggtcccaggaagccttgccccctccatgcgagtccgagatctactgtcatggtgagctgctgaaccaagtccaaatggccaaattgtaccaggacgacaaacaattcgtggacatgcccctgagcattgcccctgaacaggttttgcaaactttcactgagctgtcaagagaccacaatcacagtattccgagggagcagttacaggccttcgtgcacgagcacttccaggccaaagggcaggagctgcagccttggacccctgctgattggaaggattctccgcaattcctccagaagatctctgatgctaagctacgcgcatgggccggacaactccaccagctctggaaaaagctgggcaagaagatgaaacccgaggtgctgtctcatcctgaaaggttctcccttatttactccgagcaccccttcattgtgcccggaggcagattcgtggaattctactactgttatggccacgtgccaaacggaggaagggtctattacctgcagagatcacagccacctcttctgacccttatgatggactgttacttgactcacaccaacgacactgctttcctccaggaaaatatcgagacattggcacttgagctggatttctggaccaagaatcgcacggtatctgtgagtctcgaggggaagaactatctgttgaatcgctattatgtgccatacggcggtcctcgacctgagtcctattcaaaagatgtagagctagcagacaccctgccagagggagatcgggaagcactgtgggccgagctcaaagccggagccgagtccgggtgggatttctcatctcgatggcttatcggtggcccaaatccgaatagtcttagcggaataagaacctccaagctggtgccagtggacttgaatgctttcctttgtcaggccgaggaactgatgtccaacttttattctcgcctgggaaacgatagtcaggctaccaaataccgaatacttcggtcccaaaggctagccgcactgaacactgtcttgtgggacgagcaaactggcgcatggttcgattacgacttggagaaaaagaaaaagaaccgggaattttatcctagcaatctgactccgctttgggctggctgttttagtgatccgggtgttgctgataaagctctaaaatacctcgaagacaacaggattctgacttatcaatatggcatcccgacatcactccagaagaccgggcagcaatgggacttcccgaacgcctgggcccctcttcaggacttggtcatcagaggtttggcgaaagcgcctctccggcgtgcgcaggaagtggctttccaactcgctcaaaattggattagaacaaattttgacgtttattcccagaagtctgctatgtatgagaagtacgatgtgtctaacggcggacagccaggcggtggcggtgagtacgaggtccaagaagggtttggctggactaacggcgtggtcctgatgctcctcgaccgttacggtgaccgtctcacttctggccctaaattaccattcttggagccccactgcttggctacactgctgccgtcactccttctgtccctcctcccatggtag

SEQ ID NO: 113340 - DNA, 1641 bp, Artificial Sequence
  derived and/or modified sequence
atgccgggtcggacctgggaactatgcctgctgcttctgctggggttgggcctgggatctcaggaggcattgcctcctccttgcgagtctgagatttattgccatggagagctgttgaaccaggtacagatggcaaaactatatcaggacgataaacaatttgtcgacatgcccctttcaattgcccctgaacaagtgttgcaaacgtttaccgagctatctcgcgaccataaccactctattccaagagaacagctgcaggcatttgtgcatgagcacttccaagccaagggacaggagctgcagccatggacacccgctgattggaaagactccccccagtttctccagaagatctctgatgccaagctacgggcatgggctggccagctccaccaattatggaagaaacttggtaaaaaaatgaaacccgaagtgctctcccatccagaacggtttagcctaatttattctgaacatccttttatagttcccggtgggcgtttcgtcgaattttactattgctacggacacgtaccaaatgggggtcgcgtttactacctgcagaggtctcagccgccactgctgacactgatgatggactgctacctcacccatacaaacgataccgcatttcttcaggaaaacatcgaaaccctggctttggagctagacttctggacaaagaaccgtaccgtgtccgtctccctagaggggaaaaactacttgctgaatcgatattacgtcccatacggaggacctagaccggagtcgtacagcaaagacgtagaactggccgatactttacctgaaggagatagggaagcgctttgggccgaactgaaggccggagctgaaagtgggtgggacttttcttctaggtggctgatcggcggacctaaccctaacagcctctctggcatacggacgtcaaaattggtgcccgtggatctcaatgcgttcctgtgccaggcagaagaactcatgtctaatttttactcccgcctggggaacgattcccaggccacgaaatatcgcattctgagatctcagagactcgctgcccttaacacagtgctctgggatgagcagaccggtgcctggttcgactatgacctggagaagaaaaaaaagaaccgcgagttttacccaagcaaccttacccccctctgggccggttgttttagtgatccgggtgtcgccgataaagccttgaagtacctcgaggacaacaggattcttacttaccaatatggcatacccactagcctgcagaagaccggccagcagtgggattttcccaacgcatgggctcccctgcaggatttggtcatcagaggactggcaaaggcgccactcagacgagctcaggaagttgctttccagctcgcccaaaattggattaggacaaattttgatgtttatagtcagaagtccgccatgtacgagaagtacgatgtgagcaatggaggccagccgggaggaggtggggagtatgaagtgcaagaggggttcggatggactaacggtgtcgtactaatgctgctcgatcggtacggcgatcgacttactagcggcccaaagctcccctttctagaacctcattgtcttggcccacccttctgcccggcttcttgttag

SEQ ID NO: 113341 - DNA, 1701 bp, Artificial Sequence
  derived and/or modified sequence
ccgaaggtgcctgggcttgctcattcagtcacagtcacagccaccatgccagggaggacctgggagctgtgcctgctactgctgctggggctgggactggggtcccaggaggccctacccccaccctgtgagagtgagatttactgccacggggagctcctaaaccaagttcaaatggccaagctctaccaggatgacaagcagtttgtggacatgccactgtctatagctccagaacaagtcctgcagaccttcactgagctgtccagggaccacaatcacagcatccccagggagcagctgcaggcgtttgtccacgaacacttccaggccaaggggcaggagctgcagccctggacccctgcagactggaaagacagcccccagttcctgcagaagatttcagatgccaaactgcgtgcctgggcagggcagctgcatcagctctggaagaagctggggaagaagatgaagccagaggttctcagccaccctgagcggttctctctcatctactcagaacatcccttcattgtgcctggcggtcgctttgttgagttctactactgctatgggcatgtccccaatggtgggcgcgtgtactacctgcagcggagccagcccccactcttgaccctcatgatggattgctacttgactcacaccaatgacaccgcctttctacaggaaaacattgaaacactagccttggaattggacttttggaccaagaacaggactgtctctgtgagcttggagggaaagaactacctcctgaatcgctattatgtcccttatgggggacccaggcctgagtcctacagcaaagatgtggagttggctgacaccttgccagaaggagaccgggaggctctgtgggctgagctcaaggctggggctgagtctggctgggacttctcttcacgctggctcattggaggcccaaaccccaactcgcttagcggcatccgaacaagcaaactggtgcctgttgacctgaatgccttcctatgccaagcagaggagctgatgagcaacttctattccaggctggggaacgactcccaggccacgaagtacagaatcctgcggtcgcagcgcttggccgccctgaacacagtcctgtgggatgagcagaccggagcctggttcgattacgaccttgagaagaagaagaaaaaccgggagttttacccatccaacctcactccactctgggccgggtgtttctctgaccctggcgtggcggacaaggctctgaaatacctggaggacaaccggatcctgacttaccagtatgggatcccgacctctctccagaagacaggccagcagtgggatttccccaatgcctgggcccccctgcaggacctggtcatcagaggcctggccaaggcacctttacgtcgggcccaggaagtggctttccagctggctcagaattggatccgaaccaattttgatgtctactcgcagaagtcagccatgtatgagaagtatgacgtcagcaacggtggacagcccggtgggggaggagaatatgaagttcaggagggatttggctggacgaatggcgtggtcctgatgctgctggaccgctatggtgaccggctgacctcagggcccaagctgcctttcctggagccccactgcctggccacccttctgcccagcctcctgctaagcctcctgccatggtga

SEQ ID NO: 113342 - DNA, 1717 bp, Artificial Sequence
  derived and/or modified sequence
gtgcctgggcttgctcattcagtcacagtcacagccaccatgccagggaggacctgggagctgtgcctgctactgctgctggggctgggactggggtcccaggaggccctacccccaccctgtgagagtgagatttactgccacggggagctcctaaaccaagttcaaatggccaagctctaccaggatgacaagcagtttgtggacatgccactgtctatagctccagaacaagtcctgcagaccttcactgagctgtccagggaccacaatcacagcatccccagggagcagctgcaggcgtttgtccacgaacacttccaggccaaggggcaggagctgcagccctggacccctgcagactggaaagacagcccccagttcctgcagaagatttcagatgccaaactgcgtgcctgggcagggcagctgcatcagctctggaagaagctggggaagaagatgaagccagaggttctcagccaccctgagcggttctctctcatctactcagaacatcccttcattgtgcctggcggtcgctttgttgagttctactactgctatgggcatgtccccaatggtgggcgcgtgtactacctgcagcggagccagcccccactcttgaccctcatgatggattgctacttgactcacaccaatgacaccgcctttctacaggaaaacattgaaacactagccttggaattggacttttggaccaagaacaggactgtctctgtgagcttggagggaaagaactacctcctgaatcgctattatgtcccttatgggggacccaggcctgagtcctacagcaaagatgtggagttggctgacaccttgccagaaggagaccgggaggctctgtgggctgagctcaaggctggggctgagtctggctgggacttctcttcacgctggctcattggaggcccaaaccccaactcgcttagcggcatccgaacaagcaaactggtgcctgttgacctgaatgccttcctatgccaagcagaggagctgatgagcaacttctattccaggctggggaacgactcccaggccacgaagtacagaatcctgcggtcgcagcgcttggccgccctgaacacagtcctgtgggatgagcagaccggagcctggttcgattacgaccttgagaagaagaagaaaaaccgggagttttacccatccaacctcactccactctgggccgggtgtttctctgaccctggcgtggcggacaaggctctgaaatacctggaggacaaccggatcctgacttaccagtatgggatcccgacctctctccagaagacaggccagcagtgggatttccccaatgcctgggcccccctgcaggacctggtcatcagaggcctggccaaggcacctttacgtcgggcccaggaagtggctttccagctggctcagaattggatccgaaccaattttgatgtctactcgcagaagtcagccatgtatgagaagtatgacgtcagcaacggtggacagcccggtgggggaggagaatatgaagttcaggagggatttggctggacgaatggcgtggtcctgatgctgctggaccgctatggtgaccggctgacctcagggcccaagctgcctttcctggagccccactgcctggggccacccttctgcccagcctcctgctaagcctcctgccatggtgacagccctcctctcctcacct

SEQ ID NO: 113343 - protein, 135 aa, Artificial Sequence
  derived and/or modified sequence
MAIGFNVETVTYKNLKFQVWDLGGQTSIRPYWRCYYSNTDAVIYVVDSCDRDRIGISKSELVAMLEEEELRKAILVVFANKQDMEQAMTSSEMANSLGLPALKDRKWQIFKTSATKGTGLDEAMEWLVETLKSRQ

SEQ ID NO: 113344 - DNA, 408 bp, Artificial Sequence
  derived and/or modified sequence
atggccatcggcttcaacgtggagaccgtgacctacaagaacctgaagttccaggtgtgggacctgggcggccagaccagcatcagaccctactggagatgctactacagcaacaccgacgccgtgatctacgtggtggacagctgcgacagagacagaatcggcatcagcaagagcgagctggtggccatgctggaggaggaggagctgagaaaggccatcctggtggtgttcgccaacaagcaggacatggagcaggccatgaccagcagcgagatggccaacagcctgggcctgcccgccctgaaggacagaaagtggcagatcttcaagaccagcgccaccaagggcaccggcctggacgaggccatggagtggctggtggagaccctgaagagcagacagtag

SEQ ID NO: 113345 - DNA, 408 bp, Artificial Sequence
  derived and/or modified sequence
atggcaatcggattcaatgtggaaaccgtcacatacaagaaccttaaatttcaggtgtgggatctcggaggccagactagcatcagaccctattggagatgctactactcaaacacggacgccgtgatttacgttgtcgacagctgtgatcgggaccgcatcggcatctcaaaatcggaactggttgccatgttagaagaggaggaactgaggaaagcaatcttagtggtctttgctaataaacaggatatggagcaggcaatgaccagttccgagatggcgaattccctgggactgcctgcactaaaagatcgcaagtggcagatcttcaagactagcgctaccaaagggacaggattggacgaagccatggaatggttagtcgagaccctaaagagcagacagtag

SEQ ID NO: 113346 - DNA, 408 bp, Artificial Sequence
  derived and/or modified sequence
atggccatcggcttcaacgtggagaccgtgacctacaagaacctgaagttccaggtgtgggacctgggcggccagaccagcatccggccctactggcgctgctactacagcaacacagatgctgtgatctacgtggtggacagctgtgaccgggaccgcatcggcatcagcaagtctgagctggtggccatgctggaggaggaggagctgaggaaggccatcctggtggtgtttgccaacaagcaggacatggagcaggccatgaccagcagcgagatggccaacagcctgggcctgcctgccctgaaggacaggaagtggcagatcttcaagaccagcgccaccaagggcaccggcctggatgaggccatggagtggctggtggagaccctgaagagccggcagtag

SEQ ID NO: 113347 - DNA, 408 bp, Artificial Sequence
  derived and/or modified sequence
atggccatcggcttcaacgtggagaccgtgacctacaagaacctgaagtttcaggtgtgggatctgggcggccaaacgtcaatcaggccatattggcggtgctattatagtaacactgatgctgtcatttacgtcgtagatagttgtgacagggaccgcatcggaatcagtaagtcggagctcgtagctatgcttgaggaggaggaactgagaaaggctatcctagtcgtgttcgcgaacaaacaggacatggaacaggccatgacgtcgagcgaaatggcaaattcactggggttgcctgcgctgaaagatcggaagtggcagatctttaaaacgtccgccaccaagggaactggccttgatgaggccatggaatggcttgtcgaaaccctgaagtctaggcagtag

SEQ ID NO: 113348 - DNA, 408 bp, Artificial Sequence
  derived and/or modified sequence
atggccattggttttaatgtggagacagtaacctataagaacctgaagtttcaggtgtgggacctgggcggacagacgtctataaggccttactggcgatgttactatagtaacaccgacgccgtcatttacgtagtggattcctgtgacagagaccgcatcgggatttctaagagtgaactggtcgcaatgctggaagaagaagaactcaggaaggctatcctggtggtgttcgccaacaagcaggacatggaacaggctatgaccagtagcgaaatggctaatagcctaggtctccccgctttgaaagatagaaaatggcagatctttaagacatccgcaactaagggcacaggcctggatgaagccatggagtggttagtcgagaccctgaagagcaggcagtag

SEQ ID NO: 113349 - DNA, 1231 bp, Artificial Sequence
  derived and/or modified sequence
gaagttgctggctgactgggcttgcgaggaaaccgcctcggagctgcagccgaaggccaaggaatcactgaagatcggcgagggaggacagggggttcatcatggccattggatttaatgtagagacggtgacgtacaaaaaccttaaattccaagtctgggatttaggaggacagacaagtatcaggccatactggagatgttactattcaaacacagatgcagtcatttatgtagtagacagttgtgaccgagaccgaattggcatttccaaatcagagttagttgccatgttggaggaagaagagctgagaaaagccattttagtggtgtttgcaaataaacaggacatggaacaggccatgacttcctcagagatggcaaattcacttgggttacctgccttgaaggaccgaaaatggcagatattcaaaacgtcagcaaccaaaggcaccggccttgatgaggcaatggaatggttagttgaaacattaaaaagcagacagtaattcagtccattcttctcccctgaaatgaagactacatcacctctctccctttggaaacagtcaagtgtacttcacactactagatgttaaaactatatgattattggcatatactgactgactgcaatatttgtagtaaatagggaaaataagtatttagttggagggataatttgatcgaatcacctgaatgttctatgtaatgtaaaatattcttttcttgctttcttgtgttaaggtatatattctatttgtatggaattcttattcaaatacagttctattaaagagtatactcctattggatgaaaaaaacctatttttgaatagtagttgcagcttgtttgtataaatactaaaaaatatcttaacagatttttttccccttaaaatgaattatctttccaaagattagactcagtatgagagtaggtgaggaacatagtttgtgtaatataatctttatttgcttacctgaccactttttattaagctgttttgtttaaaagcttttggttataggcatgaatattgttttgatggttaacttcactgacttatctgtaagtgtcattttatagtactttacagttgtcaaaaaaaatcttacatatattgatctagttgatcggtagaggaagcttgtgaagtaggtaggacaggttatgatgtcttcactgtatggacgtgaacccagggttctaataggttggcttgcccaa

SEQ ID NO: 113350 - protein, 166 aa, Artificial Sequence
  derived and/or modified sequence
MTQFLPPNLLALFAPRDPIPYLPPLEKLPHEKHHNQPYCGIAPYIREFEDPRDAPPPTRAETREERMERKRREKIERRQQEVETELKMWDPHNDPNAQGDAFKTLFVARVNYDTTESKLRREFEVYGPIKRIHMVYSKRSGKPRGYAFIEYEHERDMHSTTQLACS

SEQ ID NO: 113351 - DNA, 501 bp, Artificial Sequence
  derived and/or modified sequence
atgacgcaatttctacccccaaatctgctcgccctgtttgcaccccgcgaccctattccgtatctgccccctctggagaagctcccccatgaaaagcaccataaccaaccttattgtgggatcgcaccatatattagagagttcgaggatccgcgtgatgcacctcctcctactcgagcagaaactcgtgaggaaaggatggaacgcaaaaggcgggaaaagattgagagaagacagcaggaagtggagacagagttgaaaatgtgggacccgcataacgatccaaacgctcagggggacgcatttaagacactgttcgtggcacgggtcaactacgacacgacagagagtaagctgcggcgcgaatttgaagtgtacggccctattaaacggatccatatggtctactctaaacgtagcggaaaacccaggggttatgcttttatagagtatgaacacgaacgtgacatgcatagcaccactcagctggcctgtagttag

SEQ ID NO: 113352 - DNA, 501 bp, Artificial Sequence
  derived and/or modified sequence
atgacccagttcctgccccccaacctgctggccctgtttgccccccgggaccccatcccctacctgccccccctggagaagctgccccatgagaagcaccacaaccagccctactgcggcatcgccccctacatccgggagtttgaggaccccagagatgcccccccacccaccagggctgagacccgggaggagaggatggagaggaagagaagagagaagattgaaagacggcagcaggaggtggagacagagctgaagatgtgggacccccacaatgaccccaatgcccagggagatgccttcaagaccctgtttgtggcccgggtgaactatgacaccacagagagcaagctgcggcgggagtttgaggtgtatggccccatcaagaggatccacatggtgtacagcaagaggtctgggaagccccggggctacgccttcattgaatatgaacatgagcgggacatgcacagcaccacccagctggcctgcagctag

SEQ ID NO: 113353 - DNA, 501 bp, Artificial Sequence
  derived and/or modified sequence
atgacccagttcctgccccccaacctgctggccctgttcgcccccagagacccaatcccatatcttccgccgctcgaaaaactgcctcacgagaagcaccacaatcaaccgtactgtgggatcgcaccctatattagggagtttgaggacccgcgcgacgcaccacctcctacccgagccgagacacgggaggagcgcatggagcggaaacgccgggagaagatcgagcgccgccagcaggaagtggaaactgaactcaaaatgtgggacccccacaacgacccaaatgcccaaggggatgccttcaagacgctctttgtggccagagtgaactacgatactaccgaatctaaacttagacgggagtttgaagtgtacgggcctatcaaacgcattcacatggtctattctaaacgttcgggaaaaccacgcggctacgcctttatcgaatacgagcatgagagagacatgcactcaacgacccagctggcgtgcagctag

SEQ ID NO: 113354 - DNA, 3144 bp, Artificial Sequence
  derived and/or modified sequence
agtcgctatcggaggccgcgcgggtggctgagcagcggcctggtgcgctcgcttagcgggcgacggaatcagacggacgtggacgcccccggagtggaagccgaagcaggagttgttgttgctgaggggctgccgcagccgccgcgagcctccggacagacgccagagcgaggagggcgctacgcgacttggcaagatgacccagttcctgccgcccaaccttctggccctctttgccccccgtgaccctattccatacctgccacccctggagaaactgccacatgaaaaacaccacaatcaaccttattgtggcattgcgccgtacattcgagagtttgaggaccctcgagatgcccctcctccaactcgtgctgaaacccgagaggagcgcatggagaggaaaagacgggaaaagattgagcggcgacagcaagaagtggagacagagcttaaaatgtgggaccctcacaatgatcccaatgctcagggggatgccttcaagactctcttcgtggcgagagtgaattatgacacaacagaatccaagctccggagagagtttgaggtgtacggacctatcaaaagaatacacatggtctacagtaagcggtcaggaaagccccgtggctatgccttcatcgagtacgaacacgagcgagacatgcactccaccacgcagctggcttgcagctgatgcttacgctccccttacaacacctcagtgtatggttggtataagggtttgtatcatgggtaagatcactcagcaccgcacaccagcccagcttagccaggcagctcaggagcagcgaggcgcccctcctcccaccccagtcgcccccgtagcctccccgcacccatggccctttccttgtttgggtgccctttgtccctcctgccccgatccgtatgctctctgagaatcttgctgatcccaggaggggaaggatgaacctggtgggaaaggcggcggcctctccgcttgggttccacccagcctctgatgacccggcttcgtgatgtcagcggcgaggtggcaggaacaccgagggcagggctccaggccagggctccactggagcccttcagccttccctccctgcccccgtgctttctatggggctgctactgtgctggccctggagagtctttttggctgctagttttggggtgctctgccccctttctgtcttccttactgtggttgaggcctcccgagggggctggctgtggtgtccagcagctctccagaggtggtcaggagctccctaaagtgcatggaattggggcttggggtgtgggagggaccaaggggtaggctgctagcagctgaaggtgtcgtaggtttttactaaagaaccttccactgtctagagacttgagagagggaaagagagagagaggcctagacgaacacaatcacatgttttctttgctgttcctcccgggatgggcctgttttggggtttgggactctgaacccgagcggggttccttcgcttgactttgatcctggtccttaaatgcctttccccactcccctcccgtgggttcaggggccaagcggcccctcctcagagcacgggcagcaccgtctcctggacccctgtgtgccagcctctgcagacgcagctggtgggagggagcatggatttggaggtggagaagtcactcctggtcctcggagggggtgggctgtgtgcctagttcagtgtgactcggggattggtgagggcggacaggtttctgaggcctccctagccttctttgtaaattcacacgagatagtccagggctttccagcgcccagcttggatgataatcctcgtctcccccactctaaggcctccttgagatttctttggggtctaccacgtcctctgcctgtctccaggtggtacaggagatgtggttcctctccctctcctggctccctagaaccccccacttcccctccctgtagctttagctgaccccgtggtggtgggtgtggggtctgtgcgcgtgctcaggtaagcttgggggctccaggtaagcggtcccgtgtcccccccccgggaagcccgcctcctcgccaggcccccaggagttgccgagccccccccatcccgctcggtttggacacccgcaaggccggcatcgccgcttacaaacacgcagatggcaagaagattgatggcaggagggtccttgtggacgtggagaggggccgaaccgtgaagggctggaggccccggcggctaggaggaggcctcggtggtaccagaagaggaggggctgatgtgaacatccggcattcaggccgcgatgacacctcccgctacgatgagaggcccggcccctccccgcttccgcacagggaccgggaccgggaccgtgagcgggagcgcagagagcggagccgggagcgagacaaggagcgagaacggcgacgctcccgctcccgggaccggcggaggcgctcacggagtcgcgacaaggaggagcggaggcgctccagggagcggagcaaggacaaggaccgggaccggaagcggcgaagcagccggagtcgggagcgggcccggcgggagcgggagcgcaaggaggagctgcgtggcggcggtggcgacatggcggagccctccgaggcgggtgacgcgccccctgatgatgggcctccaggggagctcgggcctgacggccctgacggtccagaggaaaagggccgggatcgtgaccgggagcgacggcggagccaccggagcgagcgcgagcggcgccgggaccgggatcgtgaccgtgaccgtgaccgcgagcacaaacggggggagcggggcagtgagcggggcagggatgaggcccgaggtgggggcggtggccaggacaacgggctggagggtctgggcaacgacagccgagacatgtacatggagtctgagggcggcgacggctacctggctccggagaatgggtatttgatggaggctgcgccggagtgaagaggtcgtcctctccatctgctgtgtttggacgcgttcctgcccagccccttgctgtcatcccctcccccaaccttggccacttgagtttgtcctccaagggtaggtgtctcatttgttctggccccttggatttaaaaataaaattaatttcctgttg

SEQ ID NO: 113355 - DNA, 946 bp, Artificial Sequence
  derived and/or modified sequence
gcgggtggctgagcagcggcctggtgcgctcgcttagcgggcgacggaatcagacggacgtggacgcccccggagtggaagccgaagcaggagttgttgttgctgaggggctgccgcagccgccgcgagcctccggacagacgccagagcgaggaggtacgcgacttggcaagatgacccagttcctgccgcccaaccttctggccctctttgccccccgtgaccctattccatacctgccacccctggagaaactgccacatgaaaaacaccacaatcaaccttattgtggcattgcgccgtacattcgagagtttgaggaccctcgagatgcccctcctccaactcgtgctgaaacccgagaggagcgcatggagaggaaaagacgggaaaagattgagcggcgacagcaagaagtggagacagagcttaaaatgtgggaccctcacaatgatcccaatgctcagggggatgccttcaagactctcttcgtggcgagagtgaattatgacacaacagaatccaagctccggagagagtttgaggtgtacggacctatcaaaagaatacacatggtctacagtaagcggtcaggaaagccccgtggctatgccttcatcgagtacgaacacgagcgagacatgcactccgcttacaaacacgcagatggcaagaagattgatggcaggagggtccttgtggacgtggagaggggccgaaccgtgaagggctggaggccccggcggctaggaggaggcctcggtggtaccagaagaggaggggctgatgtgaacatccggcattcaggccgcgatgacacctcccgctacgatgagagggaccgggaccgggaccgtgagcgggagcgcagagagcggagccgggagcgagacaaggagcgagaacggcgacgctcccgctcccgggaccggcggaggcgctcacg

SEQ ID NO: 113356 - DNA, 501 bp, Artificial Sequence
  derived and/or modified sequence
atgacccagttcttaccccctaaccttctcgctttgtttgccccaagagatcctattccttatttgccacccctggaaaaactcccacacgagaaacaccataaccagccctactgtggcatcgccccttatatcagagaatttgaagatcccagagacgctccccctccgacccgtgcggagactagagaggagcggatggaacgcaagcgcagagaaaaaattgaacgcagacagcaggaggtcgaaaccgaactaaaaatgtgggacccacacaacgaccctaacgcccagggtgatgcatttaagaccctgttcgtggcgagggtgaattatgacaccactgaatccaagcttagacgagaattcgaagtgtatggcccaatcaagaggatccatatggtttacagtaaaaggtcaggcaagccgaggggatatgccttcattgagtatgagcatgaacgagatatgcatagcacaacgcagctcgcctgctcatag

SEQ ID NO: 113357 - DNA, 501 bp, Artificial Sequence
  derived and/or modified sequence
atgacccagttcctgccccccaacctgctggccctgttcgcccccagagaccccatcccctacctgccccccctggagaagctgccccacgagaagcaccacaaccagccctactgcggcatcgccccctacatcagagagttcgaggaccccagagacgcccccccccccaccagagccgagaccagagaggagagaatggagagaaagagaagagagaagatcgagagaagacagcaggaggtggagaccgagctgaagatgtgggacccccacaacgaccccaacgcccagggcgacgccttcaagaccctgttcgtggccagagtgaactacgacaccaccgagagcaagctgagaagagagttcgaggtgtacggccccatcaagagaatccacatggtgtacagcaagagaagcggcaagcccagaggctacgccttcatcgagtacgagcacgagagagacatgcacagcaccacccagctggcctgcagctag

SEQ ID NO: 113358 - protein, 384 aa, Artificial Sequence
  derived and/or modified sequence
MAATASPQPLATEDADSENSSFYYYDYLDEVAFMLCRKDAVVSFGKVFLPVFYSLIFVLGLSGNLLLLMVLLRYVPRRRMVEIYLLNLAISNLLFLVTLPFWGISVAWHWVFGSFLCKMVSTLYTINFYSGIFFISCMSLDKYLEIVHAQPYHRLRTRAKSLLLATIVWAVSLAVSIPDMVFVQTHENPKGVWNCHADFGGHGTIWKLFLRFQQNLLGFLLPLLAMIFFYSRIGCVLVRLRPAGQGRALKIAAALVVAFFVLWFPYNLTLFLHTLLDLQVFGNCEVSQHLDYALQVTESIAFLHCCFSPILYAFSSHRFRQYLKAFLAAVLGWHLAPGTAQASLSSCSESSILTAQEEMTGMNDLGERQSENYPNKEDVGNKSA

SEQ ID NO: 113359 - protein, 608 aa, Artificial Sequence
  derived and/or modified sequence
MTEAALVEGQVKLRDGKKWKSRWLVLRKPSPVADCLLMLVYKDKSERIKGLRERSSLTLEDICGLEPGLPYEGLVHTLAIVCLSQAIMLGFDSHEAMCAWDARIRYALGEVHRFHVTVAPGTKLESGPATLHLCNDVLVLARDIPPAVTGQWKLSDLRRYGAVPSGFIFEGGTRCGYWAGVFFLSSAEGEQISFLFDCIVRGISPTKGPFGLRPVLPDPSPPGPSTVEERVAQEALETLQLEKRLSLLSHAGRPGSGGDDRSLSSSSSEASHLDVSASSRLTAWPEQSSSSASTSQEGPRPAAAQAAGEAMVGASRPPPKPLRPRQLQEVGRQSSSDSGIATGSHSSYSSSLSSYAGSSLDVWRATDELGSLLSLPAAGAPEPSLCTCLPGTVEYQVPTSLRAHYDTPRSLCLAPRDHSPPSQGSPGNSAARDSGGQTSAGCPSGWLGTRRRGLVMEAPQGSEATLPGPAPGEPWEAGGPHAGPPPAFFSACPVCGGLKGAAASAPGPATAHSGSPGPVAVDSPGPERPRGESPTYVNIPVSPSSRKQLHYMGLELQEASEGVRGAGASLYAQIDIMATETAHRVGVRHARAREEQLSELEQRKAAPQ

SEQ ID NO: 113360 - DNA, 1827 bp, Artificial Sequence
  derived and/or modified sequence
atgacagaggcggccctcgtggaaggacaggtcaagctaagggacggcaaaaagtggaagagccggtggctggttctccgcaagccctctccagtggcggattgcttacttatgctggtctataaagataaatccgagcgcattaagggtttgcgtgagcgcagttctctcacgcttgaggacatttgtgggcttgagccagggctgccatacgagggtttagtccacactctcgcaatcgtctgcctgagccaggccataatgctgggctttgactcccatgaggcgatgtgtgcttgggatgccaggattcgatacgccttgggagaagtgcacagattccacgtcaccgtggctcccggaaccaaactggagtccggcccagcaactctccacttgtgcaacgatgtattggtgctcgcaagagatatcccacccgctgtgacgggccaatggaaactgtcagacctgcggagatatggggccgtcccttcaggattcatcttcgagggaggcacacggtgcggctactgggccggggtctttttcctaagtagtgcagaaggagagcagatctcatttcttttcgattgcattgttaggggcatttctcccaccaagggaccattcggtcttcggcccgttctgcctgaccccagcccccccgggccatccacagttgaggaaagagtagcgcaggaagctctggagacacttcagctggagaagaggctgtcccttctatctcacgccggccggcccgggagtggtggagatgacaggagccttagctcatcatcatcagaggccagccacctagatgtatctgcatcctcccgtctcactgcctggccagagcagtcatcctcctccgcatccaccagccaagaaggccccaggcctgccgctgctcaagctgcgggcgaggccatggttggtgcctctaggcccccacctaagccgcttagaccccgtcaactccaagaagtaggtagacagagtagcagcgatagtggcattgcgacagggtcccattcatcatacagctcttcactgtcctcatacgccgggtcctcgctcgacgtgtggcgagctactgacgaactcggctctctgctatctctcccagccgctggagcacctgaaccatctctgtgcacgtgtctgccaggaaccgtagaataccaggtgcccacttctctgagggctcactacgatactccaaggagtttgtgtctcgcaccccgggaccactctcccccaagccaaggatcacctggaaacagtgccgccagagacagcggtgggcagacgtcagccggatgtccaagtggctggttagggaccaggaggaggggcctggtaatggaagccccccagggatccgaggccaccttaccagggccagcccccggggaaccctgggaggcaggcgggccccacgctggcccgccaccagctttcttcagcgcctgccccgtctgtggcggtctgaaaggcgcagccgcaagcgcccctggacccgccactgcacatagcggctctcctgggcccgttgccgtggacagccctggccccgagaggccccgcggcgagagtcccacatatgtcaacatacccgttagtccctcttctaggaaacagcttcactatatggggctcgagctgcaggaggcgtcagagggcgtgcgaggtgcaggcgctagtctatatgcccagatcgatattatggcaactgaaacggcccatcgggtaggtgtccggcacgctagggccagggaagaacagctgagcgagcttgagcagagaaaagctgccccacagtag

SEQ ID NO: 113361 - DNA, 1827 bp, Artificial Sequence
  derived and/or modified sequence
atgacagaggccgccctggtggagggccaggtgaagctgagagatggcaagaagtggaagagccgctggctggtgctgaggaagcccagccctgtggccgactgcctgctgatgctggtgtacaaggacaagtctgagcgcatcaagggcctgcgggagaggagcagcctgaccctggaggacatctgtggcctggagcccggcctgccctatgagggcctggtgcacaccctggccatcgtgtgcctgagccaggccatcatgctgggctttgacagccatgaggccatgtgtgcctgggatgcccgcatccgctatgccctgggggaggtgcaccgcttccacgtgacagtggcccctggcaccaagctggagagcggccctgccaccctgcacctgtgcaatgatgtgctggtgctggcccgggacatccccccagctgtgacaggccagtggaagctgagtgacctgcggcgctacggggctgtgcccagcggcttcatctttgaaggaggcacccgctgtggctactgggccggggtcttcttcctgagcagcgctgagggggagcagatctccttcctgtttgactgcatcgtgcggggcatcagccccaccaagggccccttcggcctgcggcctgtgctgcctgaccccagccccccaggccccagcacagtggaggagcgggtggcccaggaggccctggagaccctgcagctggagaagaggctgagcctgctgagccatgctggccggcccggcagcggaggagatgacaggagcctgagcagcagcagcagcgaggccagccacctggatgtgtctgccagcagccggctgacagcctggccagagcagagcagcagcagcgccagcaccagccaggagggccccaggcctgctgctgcccaggccgccggggaggccatggtgggcgccagccggcccccacccaagcccctgcggccccggcagctgcaggaggtgggccggcagagcagcagtgacagcggcatcgccaccggcagccacagcagctacagcagcagcctgagcagctatgccggcagcagcctggatgtgtggagggccacagatgagctgggcagcctgctgagcctgcctgctgctggggcccctgagcccagcctgtgcacctgcctgcccggcaccgtggagtaccaggtgcccaccagcctgcgggcccactatgacacccccaggagcctgtgcctggccccccgggaccacagcccccccagccagggcagccctggcaacagcgctgcccgggacagcggcggccagaccagcgctggctgccccagcggctggctgggcaccaggagaagaggcctggtgatggaggccccccagggcagcgaggccaccctgcccggccctgcccctggagagccctgggaggccggcggcccccacgccggccccccaccagccttcttcagcgcctgccctgtgtgtggcggcctgaagggagctgctgccagcgcccctggccctgccacagcccacagcggcagccctggccctgtggccgtggacagccctggccctgagcggcccagaggagagagccccacctacgtgaacatccctgtgagccccagcagcaggaagcagctgcactacatgggcctggagctgcaggaggccagcgagggcgtgcggggggccggggccagcctgtatgcccagattgacatcatggccacagaaacagcccaccgggtgggcgtgagacatgcccgggcccgggaggagcagctgtctgagctggagcagaggaaggccgccccccagtag

SEQ ID NO: 113362 - DNA, 1827 bp, Artificial Sequence
  derived and/or modified sequence
atgaccgaggccgccctggtggagggccaggtgaagctgcgggacggcaagaagtggaaatcgcgatggcttgtgctgagaaagcctagtccagttgccgattgcctgctgatgttggtttacaaagacaagagtgagaggattaagggcctgagggagcggtcttccttaacactagaagacatctgtggcctggaacccggtcttccatatgaagggctcgtacataccttggcaatcgtctgtctctcccaagccatcatgctgggttttgactcacacgaggctatgtgtgcatgggatgcacgcatcagatatgcactgggtgaagtccatcgcttccacgtcaccgttgcgcctgggacaaaacttgagtctggtcccgccactctgcacctgtgtaacgacgtgctcgtgctcgcacgcgacataccgcccgctgtgactggccagtggaagctctctgacttgcgtagatacggagccgtgccatcaggctttatcttcgagggaggaacacggtgtgggtactgggctggggtcttcttcttgagcagtgccgagggagagcaaatttcttttctcttcgattgcatcgttcggggaatttctcccacgaaggggccatttggactgcgaccggtactccccgacccgagtcccccaggaccaagtaccgtggaggagagagttgcgcaggaggccctggagaccctccagttggagaaacggcttagcctgctttcacatgcaggccgccctggctcaggaggtgacgaccgaagcctctcgtcatcctcatcagaggcctcacacttggatgtgagtgcctcttcccgcctgactgcctggcctgaacagtcctcttcatccgcatccacgagccaggaggggccaaggccagccgccgcccaggcggcaggggaggctatggtgggcgcttctcgaccaccccctaagcccttgcgacctaggcaactccaggaggtgggacgtcaatcaagttccgatagtgggattgccacagggtctcacagcagctattcttcctccctcagctcctacgctggaagtagtctcgatgtgtggcgggctaccgacgagctagggagcctcctgagcctgccagccgccggagccccggagccttcactgtgcacctgcctgccaggcactgttgagtatcaggtgccaaccagcctgagggcacattatgatacacccaggtctctctgtctcgctccccgggatcacagcccaccttctcaggggagtcctggcaattcagctgcacgggacagcggcggccaaaccagcgcaggatgtccttctggttggctcggcactcgccgtcggggcctggtaatggaggcgccgcaggggtccgaggcgacacttcctggtcctgcccctggagagccatgggaagccgggggtccccacgccggcccgccacctgcattctttagtgcgtgccctgtttgcggaggactgaaaggcgctgcagccagcgccccaggaccagccacagcccactccggatccccaggccctgtggcagtggattcgcctggaccagaacggcccagaggcgagtcacctacttacgttaacatacccgtcagtcctagcagcagaaagcagctgcactacatggggttggaactgcaggaagcgtccgagggagtcagaggtgccggggcttctctctatgctcagatcgatataatggccaccgaaactgcccatcgggtgggggtcaggcacgcacgagcaagggaggaacagctttctgaactagagcagcgcaaagcagctccacagtag

SEQ ID NO: 113363 - DNA, 1827 bp, Artificial Sequence
  derived and/or modified sequence
atgacagaggccgcactggtggagggccaggttaagctcagagatggaaaaaaatggaaatcccgctggttggtccttaggaaaccgtcacctgtagctgactgtctgcttatgcttgtgtacaaagacaagtccgagagaattaaagggctgagggagcggtcatccttgacactcgaagatatttgtgggctggaacccggactgccgtatgagggtctagtgcacaccctggctattgtttgcctaagccaggcaattatgctgggcttcgatagccacgaagccatgtgcgcatgggacgcccgaattcggtacgcccttggtgaggtgcatagattccacgtcaccgtggcaccgggaacgaagctggagagcggcccagccaccctgcatctctgtaacgatgtgcttgtgttagctcgtgatataccacctgccgtgactggccagtggaagcttagcgacctaagacgatatggagctgtgccttctggatttattttcgaagggggaacgcgatgcggctactgggccggagtatttttcctgagctcagcagagggagagcagatcagcttcctttttgattgcatcgtgcgagggatatcacccaccaaagggccttttggtctgaggccggtgctccctgacccctctcctccaggaccgtcaaccgtggaagaaagagtcgcccaagaggcacttgaaactctacagctggagaagaggcttagcttgctgtcccacgctggacgcccaggatcaggaggtgacgatagatcactgtccagcagtagcagcgaagcgagccacctggacgtttccgcatcttctcggctgacggcgtggccagagcagtcgtcatcctcagcgtccacctcgcaggaaggccctagaccagccgcagctcaggctgcaggcgaggcaatggtcggcgcttctcggccaccgcctaaacctctgcggcctcggcagctgcaggaagtgggtagacaaagcagctccgattccggcatcgccactggaagccattcatcttattcctcaagtctgtccagttacgctggatcgtctctggacgtatggcgggcaaccgatgagttaggaagcttactatctcttccagccgctggagcgccagagcctagcttgtgcacatgcctacccggaacagttgaatatcaagtgccaacatctcttagagcccattatgacacaccacgcagcctttgtctagcacctcgcgaccattcacccccatcccagggaagccccggaaattccgctgcacgggactccggtggtcagacctctgccggatgtccatcggggtggctggggacccggagaaggggtctggttatggaggccccacaggggtcggaggccacactacctggcccagcgcctggcgaaccctgggaggccggtggtcctcatgctgggcctccacccgcttttttctccgcctgtcctgtgtgtggcggtctcaagggcgctgctgcctccgcgcctggacctgccacggcacattcgggcagccctgggccagtcgctgtcgactcacctggacccgaacgtcccagaggcgaatctcctacttacgtgaatatacctgtctcaccatcctcccgcaagcaactgcactatatgggcctagagctgcaggaggcttccgaaggcgtgaggggcgctggcgcaagcctgtacgcccaaattgacatcatggcgacagagaccgcccaccgcgttggggtgcgccacgcgcgtgcgcgtgaggagcagctcagcgaattggagcagcgaaaagccgcaccgcagtag

SEQ ID NO: 113364 - DNA, 1827 bp, Artificial Sequence
  derived and/or modified sequence
atgaccgaggccgccctggtggagggccaggtgaagctgagagacggcaagaagtggaagagcagatggctggtgctgagaaagcccagccccgtggccgactgcctgctgatgctggtgtacaaggacaagagcgagagaatcaagggcctgagagagagaagcagcctgaccctggaggacatctgcggcctggagcccggcctgccctacgagggcctggtgcacaccctggccatcgtgtgcctgagccaggccatcatgctgggcttcgacagccacgaggccatgtgcgcctgggacgccagaatcagatacgccctgggcgaggtgcacagattccacgtgaccgtggcccccggcaccaagctggagagcggccccgccaccctgcacctgtgcaacgacgtgctggtgctggccagagacatcccccccgccgtgaccggccagtggaagctgagcgacctgagaagatacggcgccgtgcccagcggcttcatcttcgagggcggcaccagatgcggctactgggccggcgtgttcttcctgagcagcgccgagggcgagcagatcagcttcctgttcgactgcatcgtgagaggcatcagccccaccaagggccccttcggcctgagacccgtgctgcccgaccccagcccccccggccccagcaccgtggaggagagagtggcccaggaggccctggagaccctgcagctggagaagagactgagcctgctgagccacgccggcagacccggcagcggcggcgacgacagaagcctgagcagcagcagcagcgaggccagccacctggacgtgagcgccagcagcagactgaccgcctggcccgagcagagcagcagcagcgccagcaccagccaggagggccccagacccgccgccgcccaggccgccggcgaggccatggtgggcgccagcagacccccccccaagcccctgagacccagacagctgcaggaggtgggcagacagagcagcagcgacagcggcatcgccaccggcagccacagcagctacagcagcagcctgagcagctacgccggcagcagcctggacgtgtggagagccaccgacgagctgggcagcctgctgagcctgcccgccgccggcgcccccgagcccagcctgtgcacctgcctgcccggcaccgtggagtaccaggtgcccaccagcctgagagcccactacgacacccccagaagcctgtgcctggcccccagagaccacagcccccccagccagggcagccccggcaacagcgccgccagagacagcggcggccagaccagcgccggctgccccagcggctggctgggcaccagaagaagaggcctggtgatggaggccccccagggcagcgaggccaccctgcccggccccgcccccggcgagccctgggaggccggcggcccccacgccggccccccccccgccttcttcagcgcctgccccgtgtgcggcggcctgaagggcgccgccgccagcgcccccggccccgccaccgcccacagcggcagccccggccccgtggccgtggacagccccggccccgagagacccagaggcgagagccccacctacgtgaacatccccgtgagccccagcagcagaaagcagctgcactacatgggcctggagctgcaggaggccagcgagggcgtgagaggcgccggcgccagcctgtacgcccagatcgacatcatggccaccgagaccgcccacagagtgggcgtgagacacgccagagccagagaggagcagctgagcgagctggagcagagaaaggccgccccccagtag

SEQ ID NO: 113365 - DNA, 1897 bp, Artificial Sequence
  derived and/or modified sequence
gagctattttgaaagtgaccctgggctggggcgccggggcgagcgcggcggcgcggaaccatgacagaagatgaccgaggcggcgctggtggagggccaggtcaagctgcgggacggcaagaagtggaagagtaggtggctggtgctgcggaagccgtcgcccgtggcagactgcctgctgatgctggtctacaaggacaagtcggagcgtatcaagggcctgcgggagcgcagcagcctgacgctagaggacatctgcgggctggagcccggcctgccctacgagggcttggtccacacgctggccattgtctgcctgtcccaggccatcatgctgggctttgacagccacgaggccatgtgtgcgtgggatgcccggatccgctatgcgctcggcgaggtgcataggttccatgtgacagtggctccaggcaccaagttggagagcggcccggctaccctgcacctctgcaatgatgtcctcgtcttggccagggacatccccccggctgtcacggggcagtggaagctgtctgacctccggcgctacggggccgtgccaagcggattcatctttgaaggcgggaccaggtgtgggtactgggctggcgtcttcttcctgtcctcggccgagggggagcagatcagcttcctgttcgactgcatcgtccgaggcatctcccccaccaagggcccctttgggctgcggccggttctaccagacccaagtcccccgggaccctcgactgtggaggagcgtgtggcccaggaagccctggaaaccctacagctggagaagcggctgagcctcctctcacatgcgggcaggccgggcagtggaggggatgaccgcagcctgtccagctcatcctcagaggccagtcacttggacgtcagcgccagcagccggctcaccgcatggccagagcaatcctcgtcgtcagccagcacgtcacaggaggggcctagaccagcagctgcccaggccgccggggaagccatggtgggtgcctcaaggccaccccccaagccgctgcgtccgcggcagctgcaggaggttggccgccagagctcctcggacagcggcatcgccactggcagccactcctcttactccagcagcctctcgtcctacgcgggcagcagcctggacgtgtggcgggccacagatgaactgggctcactgctcagcctgccagcagcgggggcccccgagcccagcctgtgcacctgcctgcccgggacagtcgagtaccaggtgcccacctccctgcgggcccactatgacacaccacgcagcctttgcctggctcctagagaccacagccccccctcacagggcagccccggcaacagtgcggccagggactcaggcggccagacgtccgccgggtgtccctctggctggctgggcacgagacggcggggcctggtgatggaggccccccagggcagcgaggccacactgcctggccctgcccctggcgagccctgggaagcaggcggcccccacgcggggccacccccggctttcttttcggcatgtccagtctgtggaggactcaagggagcggcagcctcagccccaggacctgcgacagcacattcaggatccccaggacccgtggctgtggacagcccaggaccagagaggccgcgcggcgagtcgcccacttacgtgaacatccccgtcagcccatcctccagaaagcagctgcactacatgggcctggagctccaggaggccagcgagggtgtccgaggggctggcgcctccctctacgcccagatcgacatcatggccaccgagacggcgcacagagtgggggtgcggcacgcacgggcccgggaggagcagctgtcggagctggagcagaggaaggcagccccgcagtga

SEQ ID NO: 113366 - protein, 225 aa, Artificial Sequence
  derived and/or modified sequence
MPAALVENSQVICEVWASNLEEEMRKIREIVLSYSYIAMDTEFPGVVVRPIGEFRSSIDYQYQLLRCNVDLLKIIQLGLTFTNEKGEYPSGINTWQFNFKFNLTGYDFGYMVKLLTDSRLPEEEHEFFHILNLFFPSIYDVKYLMKSCKNLKGGLQEVADQLDLQRIGRQHQAGSDSLLTGMAFFRMKELFFEDSIDDAKYCGRLYGLGTGVAQKQNEDVDSAQE

SEQ ID NO: 113367 - protein, 238 aa, Artificial Sequence
  derived and/or modified sequence
MPAALVENSQVICEVWASNLEEEMRKIREIVLSYSYIAMDTEFPGVVVRPIGEFRSSIDYQYQLLRCNVDLLKIIQLGLTFTNEKGEYPSGINTWQFNFKFNLTGYDFGYMVKLLTDSRLPEEEHEFFHILNLFFPSIYDVKYLMKSCKNLKGGLQEVADQLDLQRIGRQHQAGSDSLLTGMAFFRMKELFFEDSIDDAKYCGRLYGLGTGVAQKQNEDVDSAQEKMSILAIINNMQQ

SEQ ID NO: 113368 - protein, 121 aa, Artificial Sequence
  derived and/or modified sequence
MPAALVENSQVICEVWASNLEEEMRKIREIVLSYSYIAMDTEFPGVVVRPIGEFRSSIDYQYQLLRCNVDLLKIIQLGLTFTNEKGEYPSGINTWQFNFKFNLTGYDFGYMVKLLTDSRLP

SEQ ID NO: 113369 - DNA, 168 bp, Artificial Sequence
  derived and/or modified sequence
atgccagcggctctggtcgagaatagtcaggtgatttgtgaggtctgggccagtaacctggaggaggagatgaggaaaataagagagatcgtgctgagctatagttatatagccatggatactgaattccccggggtcgtggttagaccaattggggagtttcggtag

SEQ ID NO: 113370 - DNA, 678 bp, Artificial Sequence
  derived and/or modified sequence
atgcccgccgctttggtggagaatagccaggtgatctgtgaggtgtgggccagcaacctggaggaagagatgagaaagatccgggaaatagtcctctcctattcgtacattgcaatggatactgaatttcctggggtagtggttcggcccattggagagttcagatcttcaatcgattaccagtaccagctgctccgctgtaacgtcgaccttttaaaaatcatacagctcgggttgacctttaccaatgaaaaaggagaatatccatctggaataaatacatggcaatttaactttaaattcaaccttactggctacgatttcgggtacatggtaaagttactcacagattcacgcttgccggaagaagaacacgagttctttcacatcctgaatttgttcttcccctctatttatgacgtgaagtatcttatgaagtcctgtaagaacctgaagggcggcctgcaggaggtagcggatcagttagacctccagaggattggcaggcagcaccaagcgggaagtgattctcttttgacagggatggcctttttccgaatgaaggaactcttttttgaggattcaatcgatgatgccaaatactgtggacggctgtatggattaggaactggcgtggctcagaagcagaacgaagatgttgactcagcccaggagtag

SEQ ID NO: 113371 - DNA, 717 bp, Artificial Sequence
  derived and/or modified sequence
atgcccgccgcccttgtcgaaaattcccaggtcatttgcgaagtgtgggcatccaatctggaggaggagatgcgaaaaatcagggaaatcgtgctctcctactcgtatattgccatggataccgaattcccaggagtggtggtcaggcctatcggggagttcagatcgagtatagactaccaatatcagctattacggtgtaacgtggaccttctgaaaattattcaactgggcctcacattcacaaacgagaagggtgaatatccaagcggtattaacacatggcagttcaacttcaagttcaacctgaccggctacgatttcggctatatggttaaattactgacagattcaagactccccgaggaggaacacgaattcttccatatattgaacctttttttcccctcaatttatgacgtgaaatatctaatgaagagctgcaaaaatctaaagggaggtctgcaagaagtagctgaccagctcgacctgcaaagaattggaagacagcaccaggcaggctccgattctctcctcacaggcatggccttttttagaatgaaggagctcttctttgaggatagcatcgacgacgcaaagtactgtgggcgcctttacgggctcgggaccggggtggcccagaaacagaacgaggatgtggattctgcccaagagaagatgtcgatattggctatcattaacaacatgcagcagtag

SEQ ID NO: 113372 - DNA, 168 bp, Artificial Sequence
  derived and/or modified sequence
atgcctgctgccctggtcgaaaactcccaagtgatctgtgaagtatgggcatccaacttggaagaggagatgcgtaaaattagggaaatagtcctgtcatactcttacattgctatggataccgagtttcccggagtggtggtaagacccattggcgagtttagatag

SEQ ID NO: 113373 - DNA, 366 bp, Artificial Sequence
  derived and/or modified sequence
atgccagccgcactggttgagaattctcaggttatatgcgaggtctgggcgagcaatttagaggaggagatgaggaaaattagggaaatcgtgctgtcttattcttatatcgccatggatactgaatttcctggggtggtagttcggcccataggcgaattccggagctccattgactaccagtaccaactcctgagatgcaatgttgacctgctgaaaatcatccagctggggttgaccttcaccaacgaaaaaggcgagtatccatctggtattaacacatggcagtttaacttcaagttcaatctcacagggtatgacttcggttatatggtgaagctgctgactgactctaggctgccttag

SEQ ID NO: 113374 - DNA, 168 bp, Artificial Sequence
  derived and/or modified sequence
atgcctgctgccctggtggagaacagccaggtgatctgtgaggtgtgggccagcaacctggaggaggagatgaggaagatccgggagatcgtgctgagctacagctacatcgccatggacacagagttccctggggtggtggtgcggcccatcggggagttcagatag

SEQ ID NO: 113375 - DNA, 678 bp, Artificial Sequence
  derived and/or modified sequence
atgcctgctgccctggtggagaacagccaggtgatctgtgaggtgtgggccagcaacctggaggaggagatgaggaagatccgggagatcgtgctgagctacagctacatcgccatggacacagagttccctggggtggtggtgcggcccatcggggagttccgcagcagcattgactaccagtaccagctgctgcgctgcaatgtggacctgctgaagatcatccagctgggcctgaccttcaccaatgaaaaaggagagtaccccagcggcatcaacacctggcagttcaacttcaagttcaacctgaccggctatgactttggctacatggtgaagctgctgacagacagccggctgcctgaggaggagcacgagttcttccacatcctgaacctcttcttccccagcatctatgatgtgaagtacctgatgaagagctgcaagaacctgaagggcggcctgcaggaggtggccgaccagctggacctgcagagaattggccggcagcaccaggccggcagtgacagcctgctgaccggcatggccttcttcaggatgaaggagctgttctttgaagattccattgatgatgccaagtactgcggccgcctgtatggcctgggcaccggggtggcccagaagcagaatgaagatgtggacagcgcccaggagtag

SEQ ID NO: 113376 - DNA, 717 bp, Artificial Sequence
  derived and/or modified sequence
atgcctgctgccctggtggagaacagccaggtgatctgtgaggtgtgggccagcaacctggaggaggagatgaggaagatccgggagatcgtgctgagctacagctacatcgccatggacacagagttccctggggtggtggtgcggcccatcggggagttccgcagcagcattgactaccagtaccagctgctgcgctgcaatgtggacctgctgaagatcatccagctgggcctgaccttcaccaatgaaaaaggagagtaccccagcggcatcaacacctggcagttcaacttcaagttcaacctgaccggctatgactttggctacatggtgaagctgctgacagacagccggctgcctgaggaggagcacgagttcttccacatcctgaacctcttcttccccagcatctatgatgtgaagtacctgatgaagagctgcaagaacctgaagggcggcctgcaggaggtggccgaccagctggacctgcagagaattggccggcagcaccaggccggcagtgacagcctgctgaccggcatggccttcttcaggatgaaggagctgttctttgaagattccattgatgatgccaagtactgcggccgcctgtatggcctgggcaccggggtggcccagaagcagaatgaagatgtggacagcgcccaggagaagatgagcatcctggccatcatcaacaacatgcagcagtag

SEQ ID NO: 113377 - DNA, 366 bp, Artificial Sequence
  derived and/or modified sequence
atgcctgctgccctggtggagaacagccaggtgatctgtgaggtgtgggccagcaacctggaggaggagatgaggaagatccgggagatcgtgctgagctacagctacatcgccatggacacagagttccctggggtggtggtgcggcccatcggggagttccgcagcagcattgactaccagtaccagctgctgcgctgcaatgtggacctgctgaagatcatccagctgggcctgaccttcaccaatgaaaaaggagagtaccccagcggcatcaacacctggcagttcaacttcaagttcaacctgaccggctatgactttggctacatggtgaagctgctgacagacagccggctgccctag

SEQ ID NO: 113378 - DNA, 168 bp, Artificial Sequence
  derived and/or modified sequence
atgcccgccgccctggtggagaacagccaggtgatctgcgaggtgtgggcctcaaacctcgaagaagaaatgcggaaaattcgggagattgtgctgtcctatagttacattgctatggacacggaattccccggtgtggtggtgcgacctatcggcgaatttcgctag

SEQ ID NO: 113379 - DNA, 678 bp, Artificial Sequence
  derived and/or modified sequence
atgcccgccgccctggtggagaacagccaggtgatctgcgaggtgtgggcatccaatcttgaggaagagatgaggaagatccgggagattgtcctgtcttacagttatattgcaatggacacagagtttcccggagtggtcgtgcggcccatcggggagttcagaagcagcattgactatcagtatcagcttcttcgatgcaatgtggacctgctgaagatcattcagttggggctgacgttcactaatgagaaaggagagtacccctccggcatcaatacctggcagtttaactttaaattcaacttgacaggatacgatttcggctacatggtgaagctgctgactgatagtcgactgccggaggaagagcatgaattcttccatattctcaatctcttcttcccctccatttatgacgtgaagtatctcatgaaatcctgtaagaacttgaaaggcggcctgcaggaggtcgcagatcagctggacctccaacggattggaagacagcatcaggctgggagcgactcgctcctgactgggatggctttcttcagaatgaaagagttattttttgaagacagtatcgacgatgcaaagtactgcggccgcctttatggcctgggcaccggcgtcgctcagaaacagaacgaggacgtagactctgcccaagagtag

SEQ ID NO: 113380 - DNA, 717 bp, Artificial Sequence
  derived and/or modified sequence
atgcccgccgccctggtggagaacagccaggtgatctgcgaggtgtgggccagtaacctggaggaggagatgcgtaaaatcagggaaatcgttctgagctactcatacatcgccatggacactgagttcccgggagtggtggtgcgcccaatcggggaattccggtcttcaattgattaccaataccagctattaagatgcaacgtggacctcctgaagatcatacaactggggttgacattcacaaacgagaagggtgagtatccctctggtataaatacctggcagtttaactttaagtttaatttgactgggtatgattttggatatatggtaaagctattaaccgatagtagactgcctgaggaagaacatgaattcttccacattcttaacctgttttttccatccatttacgatgtgaaatacttgatgaaaagttgtaagaacctcaagggaggtctgcaggaggtggcggaccagcttgatctgcagcgcatcgggcggcaacatcaagccgggtctgactcgctgcttaccggaatggcgtttttccgtatgaaggagctctttttcgaggactcaatcgatgacgctaaatattgcggaaggctgtatggcctggggactggcgtcgcccagaagcagaatgaagacgtagacagcgcccaggaaaagatgagtatcctggccatcatcaacaatatgcaacagtag

SEQ ID NO: 113381 - DNA, 168 bp, Artificial Sequence
  derived and/or modified sequence
atgcccgccgccctggtggagaacagccaggtgatctgcgaggtgtgggcctcaaatctcgaggaggagatgagaaagatacgcgagattgtgctgagctacagctatattgccatggataccgagttccccggtgttgttgtgcggccgattggggaattccgttag

SEQ ID NO: 113382 - DNA, 366 bp, Artificial Sequence
  derived and/or modified sequence
atgcccgccgccctggtggagaacagccaggtgatctgcgaggtgtgggcttctaacttggaagaagagatgagaaagatcagggagattgtgctcagctacagctacattgccatggatacagaattccctggcgtcgtggtcaggcctattggagagttccgttcttcaatagattatcagtatcagcttcttcggtgcaatgtcgatttactgaagattattcaactcggcctcacctttaccaatgaaaaaggcgaatatccatcaggaattaacacttggcagttcaatttcaaattcaatctcaccggatacgacttcggctacatggtaaaactgctgaccgactcgagacttccctag

SEQ ID NO: 113383 - DNA, 168 bp, Artificial Sequence
  derived and/or modified sequence
atgcccgcagccttagttgagaacagccaggtgatttgtgaggtgtgggcctcgaatcttgaagaagaaatgcggaagattcgggagatagtcctttcatatagttatatcgctatggatactgagttccctggggtagtggttagaccaatcggcgagtttagatag

SEQ ID NO: 113384 - DNA, 678 bp, Artificial Sequence
  derived and/or modified sequence
atgccagccgctctggttgaaaactcacaggtcatttgtgaggtatgggccagcaacctcgaggaagaaatgcgcaagattagagaaatcgtgctcagctacagctatatcgccatggacacagagtttcccggagtcgtcgtgagacctattggcgagttccggagtagcatcgactatcagtaccaactgttacgatgtaatgttgatctgctgaagatcattcagctgggccttactttcacaaacgaaaaaggggagtatccaagtgggatcaatacctggcagtttaactttaaatttaacctgaccgggtacgacttcggatacatggtgaagttattgacagactcccgcctacccgaggaagaacacgaattttttcacattctgaacctcttctttccttctatttacgatgtcaaatatttgatgaagagttgtaagaatctgaaggggggactacaagaagtcgccgatcaactggacctgcagaggattggtcgccagcatcaggctgggtcagatagcctgttgacaggtatggcctttttcaggatgaaggagttgttttttgaggattccatagacgacgctaaatactgcggcagactttatgggttggggacgggcgtggctcagaaacagaatgaagatgtcgattccgcccaggaatag

SEQ ID NO: 113385 - DNA, 717 bp, Artificial Sequence
  derived and/or modified sequence
atgccagcagcattagtggagaactctcaggtgatttgcgaggtgtgggcaagcaacctggaagaagaaatgaggaaaatcagggaaatcgtactctcatattcctatatagccatggacacagagttccctggcgtggtcgtaagacctatcggcgaatttaggtccagcatcgactaccagtaccagctactcagatgtaatgtggacctgttgaaaattatccaactggggctcactttcacgaacgaaaagggtgaataccctagcggcattaacacctggcagttcaactttaaatttaacctgactgggtacgactttggttatatggtgaagctgttgacagattccagattacccgaagaggaacacgagtttttccatatcctgaatttgttctttccatcgatttacgatgtgaagtatcttatgaagagctgcaagaatctgaagggcggactccaagaagtggcagaccaattagacctgcaaagaatagggcgtcagcaccaggccggttccgactccctgctgacgggaatggctttctttcggatgaaagaattgttctttgaggactccatcgacgacgctaagtactgtgggaggctgtacggcctcggcactggggtagcccaaaaacagaacgaagacgttgactctgcccaagagaagatgtcaattctcgccatcataaataacatgcagcagtag

SEQ ID NO: 113386 - DNA, 168 bp, Artificial Sequence
  derived and/or modified sequence
atgccagcagcactggtagagaattcgcaggtcatctgtgaggtgtgggcatctaaccttgaagaagagatgaggaagattcgggaaatcgtcctttcttactcttatatagctatggacacagagttcccaggtgtcgtcgtacggccaattggcgagtttcgttag

SEQ ID NO: 113387 - DNA, 366 bp, Artificial Sequence
  derived and/or modified sequence
atgcccgcagctttggtggagaattctcaagttatatgcgaagtgtgggcgtcaaacctcgaggaggagatgcggaagattagagagattgtgttatcctatagctacatagctatggatacagagtttcctggagtggtggtgagacccatcggcgagtttcgatcatcaattgattaccagtaccagctgcttaggtgcaatgtcgacctgctgaaaatcattcagctgggcttgacatttacgaacgaaaagggcgaataccctagcggcatcaacacctggcagttcaattttaaattcaacttgaccggttatgacttcgggtatatggtaaaattgctgacagatagtcgattgccatag

SEQ ID NO: 113388 - DNA, 516 bp, Artificial Sequence
  derived and/or modified sequence
ctaggagcagatccggggtagagggaaaagagctccgggccaggggctgccgtcgccgccgtcggggagtcagcccgccagcccgccagctcgtcagcccgccagccagcgcttcgcgggccctgtcggtcccgttcttgcggccccataactttttcttggtgttctatggctttatgaatggaggagccaactcacagacctgggccattcgggtggttttaagaagtttgaactgcggttcaatccagggcagtgccttgagacactgtttggagatcagaccaaacattgtctggcttgcactgtaaaactagttagctgaagacgacttctcaggtttcttcaggatgcctgcagcacttgtggagaatagccaggttatctgtgaagtgtgggccagtaatctagaagaagagatgaggaagatccgagaaatcgtgctcagttacagttatattgccatggacacagaatttccaggtgttgtggtgcgaccaattggtgaatttcgta

SEQ ID NO: 113389 - DNA, 920 bp, Artificial Sequence
  derived and/or modified sequence
aagagctccgggccaggggctgccgtcgccgccgtcggggagtcagcccgccagcccgccagctcgtcagcccgccagccagcgcttcgcgggccctgtcggtcccggtaagcgggcctgcgcttaccggaaagaggagcgtaagatgaaagagtgtgagagaccattggggatcagaccaaacattgtctggcttgcactgtaaaactagttagctgaagacgacttctcaggtttcttcaggatgcctgcagcacttgtggagaatagccaggttatctgtgaagtgtgggccagtaatctagaagaagagatgaggaagatccgagaaatcgtgctcagttacagttatattgccatggacacagaatttccaggtgttgtggtgcgaccaattggtgaatttcgtagttccatagattaccaatatcagcttctgcggtgcaatgttgaccttttaaaaattatccagctgggccttacattcacaaatgagaagggagagtatccttctggaatcaatacttggcagttcaatttcaaatttaaccttactggctatgattttggctatatggtaaagttgcttacagattctcgtttgccagaagaggaacatgaattctttcatattctgaaccttttcttcccatccatttatgatgtgaaatacctgatgaagagctgcaaaaatcttaagggaggtcttcaggaagttgctgatcagttggatttgcagaggattggaaggcagcaccaggcaggctcagactcactgctgacaggaatggctttctttaggatgaaagagttgttttttgaggacagcattgatgatgccaagtactgtgggcggctctatggcttaggcacaggagtggcccagaagcagaatgaggatgtggactctgcccaggaga

SEQ ID NO: 113390 - DNA, 945 bp, Artificial Sequence
  derived and/or modified sequence
gtagagggaaaagagctccgggccaggggctgccgtcgccgccgtcggggagtcagcccgccagcccgccagctcgtcagcccgccagccagcgcttcgcgggccctgtcggtcccgatcagaccaaacattgtctggcttgcactgtaaaactagttagctgaagacgacttctcaggtttcttcaggatgcctgcagcacttgtggagaatagccaggttatctgtgaagtgtgggccagtaatctagaagaagagatgaggaagatccgagaaatcgtgctcagttacagttatattgccatggacacagaatttccaggtgttgtggtgcgaccaattggtgaatttcgtagttccatagattaccaatatcagcttctgcggtgcaatgttgaccttttaaaaattatccagctgggccttacattcacaaatgagaagggagagtatccttctggaatcaatacttggcagttcaatttcaaatttaaccttactggctatgattttggctatatggtaaagttgcttacagattctcgtttgccagaagaggaacatgaattctttcatattctgaaccttttcttcccatccatttatgatgtgaaatacctgatgaagagctgcaaaaatcttaagggaggtcttcaggaagttgctgatcagttggatttgcagaggattggaaggcagcaccaggcaggctcagactcactgctgacaggaatggctttctttaggatgaaagagttgttttttgaggacagcattgatgatgccaagtactgtgggcggctctatggcttaggcacaggagtggcccagaagcagaatgaggatgtggactctgcccaggagaagatgagcatcctggcgattatcaacaacatgcagcagtgatggcgccaggctctgcagggtgggcctgatcccagagtg

SEQ ID NO: 113391 - DNA, 562 bp, Artificial Sequence
  derived and/or modified sequence
tcgttcggttctaggagcagatccggggtagagggaaaagagctccgggccaggggctgccgtcgccgccgtcggggagtcagcccgccagcccgccagctcgtcagcccgccagccagcgcttcgcgggccctgtcggtcccggccttgattgcttgcagagaaaactttcctgtggctttatcattagttgcccttcagagctttcctgtgtaaataagaagctatgttttggagaagtttacaccgtagatgaacgggagcgatctgaacatactgcactgcaggtcaacacagagcagggacttcagtaattcataggtatcagaccaaacattgtctggcttgcactgtaaaactagttagctgaagacgacttctcaggtttcttcaggatgcctgcagcacttgtggagaatagccaggttatctgtgaagtgtgggccagtaatctagaagaagagatgaggaagatccgagaaatcgtgctcagttacagttatattgccatggacacagaatttccaggtgttgtggtgcgaccaattggtgaatttcgtag

SEQ ID NO: 113392 - DNA, 623 bp, Artificial Sequence
  derived and/or modified sequence
ctagagagcaggcgagtcgggcggatcgggagcagatccggggtagagggaaaagagctccgggccaggggctgccgtcgccgccgtcggggagtcagcccgccagcccgccagctcgtcagcccgccagccagcgcttcgcgggccctgtcggtcccggtaagcgggcctgcgcttaccggaaagagatcagaccaaacattgtctggcttgcactgtaaaactagttagctgaagacgacttctcaggtttcttcaggatgcctgcagcacttgtggagaatagccaggttatctgtgaagtgtgggccagtaatctagaagaagagatgaggaagatccgagaaatcgtgctcagttacagttatattgccatggacacagaatttccaggtgttgtggtgcgaccaattggtgaatttcgtagttccatagattaccaatatcagcttctgcggtgcaatgttgaccttttaaaaattatccagctgggccttacattcacaaatgagaagggagagtatccttctggaatcaatacttggcagttcaatttcaaatttaaccttactggctatgattttggctatatggtaaagttgcttacagattctcgtttgcca

SEQ ID NO: 113393 - DNA, 904 bp, Artificial Sequence
  derived and/or modified sequence
atcgggtgggtagagtggtgccgtccggttgtttggtgggaggcacgtaagaccgctctgggcacgggggcgctcacctcactggctcgttcggttctaggagcagatccggggtagagggaaaagagctccgggccaggggctgccgtcgccgccgtcggggagtcagcccgccagcccgccagctcgtcagcccgccagccagcgcttcgcgggccctgtcggtcccggacacagaatttccaggtgttgtggtgcgaccaattggtgaatttcgtagttccatagattaccaatatcagcttctgcggtgcaatgttgaccttttaaaaattatccagctgggccttacattcacaaatgagaagggagagtatccttctggaatcaatacttggcagttcaatttcaaatttaaccttactggctatgattttggctatatggtaaagttgcttacagattctcgtttgccagaagaggaacatgaattctttcatattctgaaccttttcttcccatccatttatgatgtgaaatacctgatgaagagctgcaaaaatcttaagggaggtcttcaggaagttgctgatcagttggatttgcagaggattggaaggcagcaccaggcaggctcagactcactgctgacaggaatggctttctttaggatgaaagagttgttttttgaggacagcattgatgatgccaagtactgtgggcggctctatggcttaggcacaggagtggcccagaagcagaatgaggatgtggactctgcccaggagaagatgagcatcctggcgattatcaacaacatgcagcagtgatggcgccaggctctgcagggtgggcctgatcccagagtggtgcttactgtgctgactgtgtacttatcttcccc

SEQ ID NO: 113394 - DNA, 168 bp, Artificial Sequence
  derived and/or modified sequence
atgcccgccgccctggtggagaacagccaggtgatctgcgaggtgtgggccagcaacctggaggaggagatgagaaagatcagagagatcgtgctgagctacagctacatcgccatggacaccgagttccccggcgtggtggtgagacccatcggcgagttcagatag

SEQ ID NO: 113395 - DNA, 678 bp, Artificial Sequence
  derived and/or modified sequence
atgcccgccgccctggtggagaacagccaggtgatctgcgaggtgtgggccagcaacctggaggaggagatgagaaagatcagagagatcgtgctgagctacagctacatcgccatggacaccgagttccccggcgtggtggtgagacccatcggcgagttcagaagcagcatcgactaccagtaccagctgctgagatgcaacgtggacctgctgaagatcatccagctgggcctgaccttcaccaacgagaagggcgagtaccccagcggcatcaacacctggcagttcaacttcaagttcaacctgaccggctacgacttcggctacatggtgaagctgctgaccgacagcagactgcccgaggaggagcacgagttcttccacatcctgaacctgttcttccccagcatctacgacgtgaagtacctgatgaagagctgcaagaacctgaagggcggcctgcaggaggtggccgaccagctggacctgcagagaatcggcagacagcaccaggccggcagcgacagcctgctgaccggcatggccttcttcagaatgaaggagctgttcttcgaggacagcatcgacgacgccaagtactgcggcagactgtacggcctgggcaccggcgtggcccagaagcagaacgaggacgtggacagcgcccaggagtag

SEQ ID NO: 113396 - DNA, 717 bp, Artificial Sequence
  derived and/or modified sequence
atgcccgccgccctggtggagaacagccaggtgatctgcgaggtgtgggccagcaacctggaggaggagatgagaaagatcagagagatcgtgctgagctacagctacatcgccatggacaccgagttccccggcgtggtggtgagacccatcggcgagttcagaagcagcatcgactaccagtaccagctgctgagatgcaacgtggacctgctgaagatcatccagctgggcctgaccttcaccaacgagaagggcgagtaccccagcggcatcaacacctggcagttcaacttcaagttcaacctgaccggctacgacttcggctacatggtgaagctgctgaccgacagcagactgcccgaggaggagcacgagttcttccacatcctgaacctgttcttccccagcatctacgacgtgaagtacctgatgaagagctgcaagaacctgaagggcggcctgcaggaggtggccgaccagctggacctgcagagaatcggcagacagcaccaggccggcagcgacagcctgctgaccggcatggccttcttcagaatgaaggagctgttcttcgaggacagcatcgacgacgccaagtactgcggcagactgtacggcctgggcaccggcgtggcccagaagcagaacgaggacgtggacagcgcccaggagaagatgagcatcctggccatcatcaacaacatgcagcagtag

SEQ ID NO: 113397 - DNA, 366 bp, Artificial Sequence
  derived and/or modified sequence
atgcccgccgccctggtggagaacagccaggtgatctgcgaggtgtgggccagcaacctggaggaggagatgagaaagatcagagagatcgtgctgagctacagctacatcgccatggacaccgagttccccggcgtggtggtgagacccatcggcgagttcagaagcagcatcgactaccagtaccagctgctgagatgcaacgtggacctgctgaagatcatccagctgggcctgaccttcaccaacgagaagggcgagtaccccagcggcatcaacacctggcagttcaacttcaagttcaacctgaccggctacgacttcggctacatggtgaagctgctgaccgacagcagactgccctag

SEQ ID NO: 113398 - protein, 85 aa, Artificial Sequence
  derived and/or modified sequence
MYSQDSIDLLANSGLQFQKHEEEGIDTLHFAELLMTSGVVLCDNVKWLSFHSGYDFGYMVKLLTDSRLPEEEHEFFHILNLFFPS

SEQ ID NO: 113399 - DNA, 258 bp, Artificial Sequence
  derived and/or modified sequence
atgtatagtcaggacagcatagacctgttggccaattccgggttgcaattccagaagcacgaggaagagggaattgacaccttgcacttcgctgaactgctcatgactagcggagtcgtgctctgcgacaatgttaagtggctcagcttccattccggatacgacttcggctacatggtcaaattgctgaccgactccagattgccagaggaagagcatgaattcttccatatcctcaacctgtttttcccttcgtag

SEQ ID NO: 113400 - DNA, 561 bp, Artificial Sequence
  derived and/or modified sequence
atgtattcacaggattcaatcgacctgctcgccaacagcgggctgcagtttcagaagcacgaagaggagggtattgacactctccacttcgccgagctcttgatgacttctggagtagtattgtgcgacaatgtgaagtggctttcttttcacagtggatatgatttcggctacatggtaaagcttctcaccgatagtcggctccctgaggaggagcatgagttctttcatattttgaatctatttttcccttcaatctatgacgttaagtacctaatgaagagttgtaagaacttgaagggcggactgcaagaagtggcggaccagctcgatcttcagagaatcggacgtcaacatcaggccggatcagattccctgctgaccgggatggcatttttccgcatgaaggagttgttctttgaagactccattgatgacgccaaatactgcgggaggttatatgggctcggcactggcgttgcccagaagcaaaatgaggatgtagactccgctcaggaaaaaatgagtatcctggccattataaacaacatgcaacagtag

SEQ ID NO: 113401 - DNA, 561 bp, Artificial Sequence
  derived and/or modified sequence
atgtattcccaggattcaatagatctgctagctaattctggcctacagtttcagaaacacgaagaggaaggaatagataccctgcactttgctgaactcctgatgactagcggggtggtgttgtgcgacaatgttaaatggctgagtttccattccggatatgatttcggttacatggtaaagctacttactgactcgcgactgccagaggaggagcacgaattttttcatatactcaatcttttcttcccaagcatctatgatgttaaatacctcatgaagtcctgcaagaatttgaaaggggggctccaggaagtggccgatcaactcgatctgcagcggatcgggagacagcaccaggcaggaagtgacagccttctgaccggcatggctttcttccggatgaaggaactattctttgaggacagcatcgacgatgccaaatactgcggaagactgtacggcctgggcaccggcgtagcgcaaaagcagaacgaggacgtcgactccgcccaggagaaaatgtctattctggctattattaacaatatgcagcagtag

SEQ ID NO: 113402 - DNA, 561 bp, Artificial Sequence
  derived and/or modified sequence
atgtatagccaagattctattgacctgcttgctaatagtggcttgcagtttcagaagcacgaagaggaaggcatcgacacactgcactttgcagagctcttgatgacgtctggggtcgtgttgtgcgataacgtcaagtggctgtcctttcactcggggtatgattttggatatatggtgaagctgctcaccgatagccgactgcccgaagaagagcacgaattcttccatatcctgaacttattttttcctagcatctatgatgtaaagtatttaatgaaatcctgtaagaacctcaagggagggctgcaggaagttgctgatcagttagacctgcagcgtattggacgacaacaccaggccggctccgactcattattgacgggaatggcgtttttcagaatgaaagagctattctttgaggacagcatcgatgacgccaagtattgcggtagactttacggcctcggaactggggttgctcagaagcagaacgaagatgtggatagtgcgcaggagaagatgagtattttggcgattattaacaacatgcagcagtag

SEQ ID NO: 113403 - DNA, 561 bp, Artificial Sequence
  derived and/or modified sequence
atgtactcccaggactcgatcgacctactggctaatagtggcctacagtttcagaagcacgaggaggagggaatcgacactcttcacttcgccgaactgctgatgacatccggcgtggtgctgtgcgataatgttaagtggctgagctttcatagcgggtacgactttggctacatggttaagctgctaacggatagcagacttcccgaagaggaacacgagtttttccatatcctcaacttgtttttcccatccatttatgatgttaagtacctgatgaagtcgtgtaagaacctgaaaggtggtctgcaggaagtggccgatcagctggatttacaaaggataggccgccagcatcaggcaggttcagattcactcctgacgggcatggcgtttttcagaatgaaggagctcttcttcgaggacagtattgatgacgcaaaatactgcggccgcttgtatgggctgggtacgggggttgcacagaagcaaaatgaggacgtggactccgcacaggagaagatgtccatcctggccataatcaataacatgcagcagtag

SEQ ID NO: 113404 - DNA, 258 bp, Artificial Sequence
  derived and/or modified sequence
atgtacagccaggacagcattgacctgctggccaacagcggcctgcagttccagaagcatgaggaggagggcatcgacaccctgcactttgctgagctgctgatgaccagcggcgtggtgctgtgtgacaacgtgaagtggctgtccttccacagcggctatgactttggctacatggtgaagctgctgacagacagccggctgcctgaggaggagcacgagttcttccacatcctgaacctcttcttccccagctag

SEQ ID NO: 113405 - DNA, 561 bp, Artificial Sequence
  derived and/or modified sequence
atgtacagccaggacagcattgacctgctggccaacagcggcctgcagttccagaagcatgaggaggagggcatcgacaccctgcactttgctgagctgctgatgaccagcggcgtggtgctgtgtgacaacgtgaagtggctgtccttccacagcggctatgactttggctacatggtgaagctgctgacagacagccggctgcctgaggaggagcacgagttcttccacatcctgaacctcttcttccccagcatctatgatgtgaagtacctgatgaagagctgcaagaacctgaagggcggcctgcaggaggtggccgaccagctggacctgcagagaattggccggcagcaccaggccggcagtgacagcctgctgaccggcatggccttcttcaggatgaaggagctgttctttgaagattccattgatgatgccaagtactgcggccgcctgtatggcctgggcaccggggtggcccagaagcagaatgaagatgtggacagcgcccaggagaagatgagcatcctggccatcatcaacaacatgcagcagtag

SEQ ID NO: 113406 - DNA, 258 bp, Artificial Sequence
  derived and/or modified sequence
atgtacagccaggacagcatcgacctgctggccaacagcggcctgcagttccagaagcacgaggaagagggaatcgacacactgcatttcgcagagcttctgatgaccagcggcgtagtactgtgtgacaacgtgaagtggctctcttttcacagcggttacgacttcggctatatggtcaagctactaactgattcacggctgcccgaagaagaacatgaattctttcatatccttaatctgtttttcccttcgtag

SEQ ID NO: 113407 - DNA, 561 bp, Artificial Sequence
  derived and/or modified sequence
atgtacagccaggacagcatcgacctgctggccaacagcggcctgcagtttcagaagcacgaagaggaagggatcgatactcttcactttgccgaacttttgatgacatcaggagtcgtcttatgtgataacgtcaagtggctgagctttcactccggttatgacttcggatatatggttaagctgctcactgactctagactccctgaggaggaacatgaattcttccacattctcaatttgtttttcccctctatttatgatgtgaaatacctcatgaagagctgtaagaacctcaagggcggcctgcaggaggtggctgaccagttggatctgcagcggattggccgtcaacatcaggcaggatccgattccttgctcacggggatggcttttttccgcatgaaggaattgttttttgaggattcgattgatgacgccaaatattgcggccgcctgtatggtctcgggacaggcgtggcccaaaagcaaaacgaagacgtggactctgcccaggagaaaatgagcatcctggctataattaataatatgcagcagtag

SEQ ID NO: 113408 - DNA, 561 bp, Artificial Sequence
  derived and/or modified sequence
atgtacagccaggacagcatcgacctgctggccaacagcggcctgcaattccagaaacatgaagaggaggggatcgacacgctacactttgcagaacttctcatgacatccggcgtggttctgtgtgataacgtgaaatggctgtcttttcattctggatatgattttggttatatggtcaagctcctcacggacagcaggttacccgaagaagagcacgaattttttcacatcctgaatctgttctttccctctatttacgatgtaaaatacctgatgaagtcttgcaagaaccttaaaggaggcctccaggaagttgcagaccagctagacttacagcggattggaaggcagcatcaggccggctccgactctttactgacgggaatggccttcttcaggatgaaagagctgtttttcgaggatagcatcgatgacgccaaatactgtggacggctctacgggctcggaactggtgtggcccagaagcagaatgaagacgtggactcagcccaagagaagatgagtatattagccatcataaacaacatgcagcagtag

SEQ ID NO: 113409 - DNA, 561 bp, Artificial Sequence
  derived and/or modified sequence
atgtacagccaggacagcatcgacctgctggccaacagcggcctgcagtttcagaagcacgaagaggaagggatcgacactcttcatttcgctgagttgcttatgacatccggtgtggtcttatgtgacaacgttaagtggctgagctttcactccggctacgactttgggtatatggtcaagctactgactgactcccgcctgcctgaagaagagcatgagttttttcatattcttaacctgttttttccgagcatatatgatgttaagtatctcatgaagtcatgtaagaacctgaagggagggctgcaagaagttgccgaccaactggacttgcagcggataggaaggcaacaccaggccggcagcgatagcttactaaccggcatggctttcttccggatgaaagagctttttttcgaagacagtattgatgatgccaaatattgtggaaggttgtatggcctcggtactggggtggcgcaaaagcagaacgaagacgtggacagcgcccaagagaagatgtccattctcgcaattattaataatatgcagcagtag

SEQ ID NO: 113410 - DNA, 561 bp, Artificial Sequence
  derived and/or modified sequence
atgtacagccaggacagcatcgacctgctggccaacagcggcctgcagttccagaagcacgaggaggaggggatagataccctgcacttcgctgaactgctgatgacatccggggtggtactgtgtgacaacgtgaaatggctctcattccattctggctatgatttcggatacatggttaaactgctgacagactctaggctccctgaggaggaacatgagttcttccacattctaaatctgtttttccccagcatctatgatgtaaagtatctgatgaagtcatgcaagaatctgaaagggggcctgcaggaagttgctgatcagctggatttgcaacgaataggccgtcagcatcaagctgggtccgacagcctcttgacgggcatggcattcttccggatgaaagaattatttttcgaagatagcattgatgatgcaaaatactgtgggaggctgtacggcctgggcactggcgtggcgcagaaacagaacgaggacgtagactcagctcaagagaagatgtctatcctagctatcatcaataacatgcagcagtag

SEQ ID NO: 113411 - DNA, 258 bp, Artificial Sequence
  derived and/or modified sequence
atgtattcacaggatagcatcgacctcctggctaacagcgggttacaatttcagaaacacgaagaggaaggtatcgacacattacatttcgcggagttgctcatgacctccggagtcgttctctgtgacaacgtgaaatggcttagctttcactccggctacgatttcggttacatggttaagctccttacagattcaagactacccgaagaggaacacgaattctttcacattctgaacctgttcttcccatcttag

SEQ ID NO: 113412 - DNA, 561 bp, Artificial Sequence
  derived and/or modified sequence
atgtacagtcaggactccatcgacctgttggcaaacagcgggctacaatttcagaagcatgaagaggagggcatcgacacattgcacttcgccgaactgctgatgaccagcggcgtggttttgtgcgacaacgtaaagtggctaagctttcacagtggatatgactttggctatatggttaaactgctcaccgactcccgcctgccagaggaagagcatgaattttttcacattttgaatctcttcttcccgtccatttacgacgttaagtatctgatgaagagctgtaagaatctgaagggcggactacaggaggttgcagaccagctagacctccagcggattggcagacagcaccaggcgggtagcgacagcctccttacaggaatggcattcttccgcatgaaagaattgtttttcgaagactctatagatgatgccaagtactgcggacggttatatgggctgggcacgggcgtggcccagaagcagaatgaggacgttgatagcgcgcaagagaagatgtctatcctggctatcatcaacaacatgcaacagtag

SEQ ID NO: 113413 - DNA, 561 bp, Artificial Sequence
  derived and/or modified sequence
atgtattcacaggactccatcgacctgttagcaaacagcgggttacagtttcaaaaacacgaggaggagggcatagataccctacactttgcagagttgctcatgacttccggtgttgtactctgcgataatgttaaatggttgtcattccatagtgggtatgacttcggctacatggttaaactgctgacagattcgcgcctgccagaagaggagcacgagttctttcacatcctgaacctttttttccctagcatttacgatgttaagtacctcatgaaaagctgcaagaatctcaaagggggattgcaggaagtagccgatcagctggacctgcagagaatcggaagacagcatcaagccggttccgactccctgctgactggtatggccttcttcagaatgaaggaattatttttcgaggattccatagatgacgcaaagtactgcggtcggttatacgggctaggcacgggggtcgcccaaaagcagaatgaagatgtcgattccgcacaggaaaagatgagcatattggcgatcatcaacaacatgcagcagtag

SEQ ID NO: 113414 - DNA, 561 bp, Artificial Sequence
  derived and/or modified sequence
atgtatagccaggactctatcgatctactggcaaactccggacttcaatttcagaagcacgaggaggagggcatcgacactctgcacttcgcagaactcctcatgacatctggcgttgtgctgtgcgacaacgttaaatggctgagcttccactcgggatacgattttgggtatatggtcaaactgctgaccgacagccgacttcctgaagaagagcacgaatttttccatatactgaatctgttttttccaagcatttacgacgtgaagtacctgatgaaatcatgtaaaaatcttaaaggcggactgcaggaggtggccgaccagcttgacctgcaacgcatcggcagacagcaccaagcagggtcagatagtcttttgaccgggatggcgttctttagaatgaaagagctgtttttcgaggatagtattgacgatgcgaagtactgcggacgactctacgggctcggcacaggtgtggcccagaagcaaaatgaagatgtcgactctgcccaagaaaagatgtctattctggccataattaacaacatgcaacagtag

SEQ ID NO: 113415 - DNA, 561 bp, Artificial Sequence
  derived and/or modified sequence
atgtactctcaagactctatcgacctgctggccaacagcggcctgcagttccagaaacacgaggaggagggtatcgacactcttcatttcgccgagctgctgatgacaagtggcgtggtgctctgcgataatgtcaaatggttgagctttcattcgggatatgacttcgggtacatggtgaaactgctcaccgactcaaggctgccggaagaagaacacgagttcttccatattcttaatctgttctttccttcaatctatgatgtcaagtacctgatgaaatcatgtaagaacctgaaggggggtctgcaagaggtggccgatcagctggacctgcagaggattgggaggcagcatcaagccggttctgattccctgctcacagggatggctttttttaggatgaaggagctcttctttgaggattcgattgatgacgccaaatactgtggccgactctatggactcgggacgggagtcgctcagaaacagaatgaagacgtggactctgctcaggagaagatgagcatcctggcaataatcaataacatgcagcagtag

SEQ ID NO: 113416 - DNA, 258 bp, Artificial Sequence
  derived and/or modified sequence
atgtacagccaggacagcatcgacctgctggccaacagcggcctgcagttccagaagcacgaggaggagggcatcgacaccctgcacttcgccgagctgctgatgaccagcggcgtggtgctgtgcgacaacgtgaagtggctgagcttccacagcggctacgacttcggctacatggtgaagctgctgaccgacagcagactgcccgaggaggagcacgagttcttccacatcctgaacctgttcttccccagctag

SEQ ID NO: 113417 - DNA, 561 bp, Artificial Sequence
  derived and/or modified sequence
atgtacagccaggacagcatcgacctgctggccaacagcggcctgcagttccagaagcacgaggaggagggcatcgacaccctgcacttcgccgagctgctgatgaccagcggcgtggtgctgtgcgacaacgtgaagtggctgagcttccacagcggctacgacttcggctacatggtgaagctgctgaccgacagcagactgcccgaggaggagcacgagttcttccacatcctgaacctgttcttccccagcatctacgacgtgaagtacctgatgaagagctgcaagaacctgaagggcggcctgcaggaggtggccgaccagctggacctgcagagaatcggcagacagcaccaggccggcagcgacagcctgctgaccggcatggccttcttcagaatgaaggagctgttcttcgaggacagcatcgacgacgccaagtactgcggcagactgtacggcctgggcaccggcgtggcccagaagcagaacgaggacgtggacagcgcccaggagaagatgagcatcctggccatcatcaacaacatgcagcagtag

SEQ ID NO: 113418 - protein, 333 aa, Artificial Sequence
  derived and/or modified sequence
MVGEMETKEKPKPTPDYLMQLMNDKKLMSSLPNFCGIFNHLERLLDEEISRVRKDMYNDTLNGSTEKRSAELPDAVGPIVQLQEKLYVPVKEYPDFNFVGRILGPRGLTAKQLEAETGCKIMVRGKGSMRDKKKEEQNRGKPNWEHLNEDLHVLITVEDAQNRAEIKLKRAVEEVKKLLVPAAEGEDSLKKMQLMELAILNGTYRDANIKSPTAQAAPRIITGPAPVLPPAALRTPTPAGPTIMPLIRQIQTAVMPNGTPHPTAAIVPPGPEAGLIYTPYEYPYTLAPATSILEYPIEPSGVLGAVATKVRRHDMRVHPYQRIVTADRAATGN

SEQ ID NO: 113419 - DNA, 1002 bp, Artificial Sequence
  derived and/or modified sequence
atggtgggcgagatggagaccaaggagaagcccaagcccacccccgactacctgatgcagctgatgaacgacaagaagctgatgagcagcctgcccaacttctgcggcatcttcaaccacctggagagactgctggacgaggagatcagcagagtgagaaaggacatgtacaacgacaccctgaacggcagcaccgagaagagaagcgccgagctgcccgacgccgtgggccccatcgtgcagctgcaggagaagctgtacgtgcccgtgaaggagtaccccgacttcaacttcgtgggcagaatcctgggccccagaggcctgaccgccaagcagctggaggccgagaccggctgcaagatcatggtgagaggcaagggcagcatgagagacaagaagaaggaggagcagaacagaggcaagcccaactgggagcacctgaacgaggacctgcacgtgctgatcaccgtggaggacgcccagaacagagccgagatcaagctgaagagagccgtggaggaggtgaagaagctgctggtgcccgccgccgagggcgaggacagcctgaagaagatgcagctgatggagctggccatcctgaacggcacctacagagacgccaacatcaagagccccaccgcccaggccgcccccagaatcatcaccggccccgcccccgtgctgccccccgccgccctgagaacccccacccccgccggccccaccatcatgcccctgatcagacagatccagaccgccgtgatgcccaacggcaccccccaccccaccgccgccatcgtgccccccggccccgaggccggcctgatctacaccccctacgagtacccctacaccctggcccccgccaccagcatcctggagtaccccatcgagcccagcggcgtgctgggcgccgtggccaccaaggtgagaagacacgacatgagagtgcacccctaccagagaatcgtgaccgccgacagagccgccaccggcaactag

SEQ ID NO: 113420 - DNA, 1002 bp, Artificial Sequence
  derived and/or modified sequence
atggtgggtgaaatggaaaccaaagagaaacccaaacccacccctgactatctcatgcaactcatgaacgacaagaagcttatgtcatctcttccaaatttctgtggtatattcaatcatctcgagagactcttagacgaagagatctccagggtgaggaaggacatgtataacgatactctcaatggatccacagaaaagagatccgctgagttgcctgatgccgtgggacccattgttcaactgcaggaaaaattatacgtaccggtgaaggagtatcccgatttcaacttcgttggaaggattctcgggccaagaggcctcacagcaaagcagctggaggctgagaccgggtgcaagatcatggtgcgtggtaaggggagtatgagggacaaaaaaaaagaggaacagaacaggggcaaacctaactgggaacatttgaatgaggacctgcatgtccttatcactgtggaggacgcgcagaacagagcggagataaaactcaaacgggccgtggaggaagtgaagaaattgctcgtccccgcggccgaaggcgaggacagtcttaagaagatgcaactcatggagctggctatcctgaacggcacgtaccgcgatgccaacattaagtcaccgactgctcaagccgccccacgtattattactggcccagcacctgtcttgcccccagccgcattgcgtactcccacacctgctggccctaccataatgcccctgatccggcagattcagacggctgttatgcccaacggcacaccacatcctacagcagccattgtgccacccggccccgaggcgggactgatctataccccctacgaatacccatacacactggctccagccacctccatactggagtatcccatcgaaccctccggcgtcctgggcgcagtggccactaaagtccgccgccacgatatgagggtgcacccataccagcggattgtgacagctgatagggccgctactgggaattag

SEQ ID NO: 113421 - DNA, 1002 bp, Artificial Sequence
  derived and/or modified sequence
atggtgggggagatggagaccaaggagaagcccaagcccaccccagactacctgatgcagctgatgaatgacaagaagctgatgagcagcctgcccaacttctgtggcatcttcaaccacctggagcggctgctggatgaggagatcagccgggtgaggaaggacatgtacaatgacaccctgaatggcagcacagagaagaggtctgctgagctgcctgatgctgtgggccccatcgtgcagctgcaggagaagctgtatgtgcctgtgaaggagtacccagacttcaactttgtgggccgcatcctgggcccccggggcctgacagccaagcagctggaggccgagaccggctgcaagatcatggtgcggggcaagggctccatgagggacaagaagaaggaggagcagaacagaggcaagcccaactgggagcacctgaatgaagacctgcacgtgctgatcaccgtggaggatgcccagaacagagctgagatcaagctgaagagagctgtggaggaggtgaagaagctgctggtgcctgctgctgagggggaggacagcctgaagaagatgcagctgatggagctggccatcctgaatggcacctacagagatgccaacatcaagagccccacagcccaggccgccccccgcatcatcaccggccctgcccctgtgctgcccccagctgccctgcggacccccaccccagctggccccaccatcatgcccctcatccggcagatccagacagctgtgatgcccaacggcaccccccaccccacagctgccatcgtgcccccaggccctgaggccggcctcatctacaccccctatgagtacccctacaccctggccccagccaccagcatcctggagtaccccatcgagcccagcggcgtgctgggcgctgtggccaccaaggtgagaagacatgacatgagggtgcacccctaccagagaattgtgacagctgacagagctgccactggaaattag

SEQ ID NO: 113422 - DNA, 1002 bp, Artificial Sequence
  derived and/or modified sequence
atggtgggcgagatggagaccaaggagaagcccaagcccacccccgattacttgatgcagctgatgaatgacaagaagctgatgtcttctctcccgaacttttgtggaatcttcaaccaccttgagagacttttggacgaggagatcagcagggtgcgtaaggacatgtataacgacactctcaatggcagcaccgaaaaaagatccgccgagctgccagacgccgtggggcccatagtacagttacaagaaaaattatatgtgccagtcaaagagtatcccgacttcaactttgtgggtcggattctcgggccacgaggactaaccgctaaacagctggaggcggagacaggatgcaagataatggtgcggggcaagggctccatgcgggataagaagaaggaggagcagaaccggggaaagcccaattgggaacacctcaatgaggacctgcacgtgcttatcactgtggaagacgctcagaatagagccgaaattaagctgaagagggccgtcgaggaggtgaagaaactcttagtgcctgccgcagaaggcgaggattctttgaaaaagatgcaattaatggaactggccatactcaacgggacctaccgagacgccaatataaagtcacctactgctcaggccgcccccaggatcatcacggggcctgcgcctgtcctgccgcctgctgccctccgaacgcccacccctgcagggcccactattatgcctctgatccgccagatccagactgccgtgatgcctaatggcacccctcatcccaccgccgccatcgtcccccctggccctgaggccgggctgatatacaccccatacgagtacccctataccctggctcctgctacgtccatcctggaatatccaattgaaccatctggcgttcttggcgccgttgctactaaagtacgtcggcatgatatgagagtccacccttatcagagaatcgtaacggcagatcgggcagctaccggaaattag

SEQ ID NO: 113423 - DNA, 1002 bp, Artificial Sequence
  derived and/or modified sequence
atggtcggcgagatggaaaccaaggagaagcccaagccaacccccgactacctgatgcagcttatgaacgataaaaagctcatgagtagtcttcctaacttctgtgggatcttcaaccatctggagcggttgctagacgaagagatttcccgtgtcaggaaagacatgtataatgatactttgaacgggagtacagaaaaaagaagcgccgagttgcccgacgccgtgggacctattgtgcagttacaggaaaaactctacgttccagtgaaagagtatccagacttcaacttcgttgggcgaattctgggcccacgcggtctgacggccaaacagctggaagccgagactggctgtaagatcatggtgagaggaaaggggagtatgagggacaagaagaaggaagaacagaacaggggcaaaccaaactgggaacatctcaatgaagacctgcatgtgttgattacagtcgaagatgcccaaaaccgggcagagattaaactcaaaagagctgtggaagaggtcaaaaagctcctggttcctgccgcagaaggagaggatagtcttaagaagatgcagctgatggagctggcgattcttaatgggacgtaccgtgacgccaacattaaaagtcccaccgctcaggcagcgccacggataattactgggcctgccccagttctgcctcctgccgctttgcggacacctacgcccgctggacccacaattatgccactcataaggcagatacaaaccgctgtgatgcctaatggaacccctcaccccacagcagcgatcgtgccaccaggacctgaggccggactcatttatacgccctatgaatacccatataccctggcccctgccacgagcatccttgaatatccaatcgagcctagtggggtgcttggggctgtggccacaaaggtgagaagacatgacatgcgcgtacacccttaccagcggatcgtgacagctgatcgcgctgccactggaaattag

SEQ ID NO: 113424 - DNA, 1063 bp, Artificial Sequence
  derived and/or modified sequence
ggagtgagctgcggagcctggaatatggtcggggaaatggaaacgaaggagaagccgaagcccaccccagattacctgatgcagctgatgaacgacaagaagctcatgagcagcctgcccaacttctgcgggatcttcaaccacctcgagcggctgctggacgaagaaattagcagagtacggaaagacatgtacaatgacacattaaatggcagtacagagaaaaggagtgcagaattgcctgatgctgtgggacctattgttcagttacaagagaaactttatgtgcctgtaaaagaatacccagattttaattttgttgggagaatccttggacctagaggacttacagccaaacaacttgaagcagaaaccggatgtaaaatcatggtccgaggcaaaggctcaatgagggataaaaaaaaggaggagcaaaatagaggcaagcccaattgggagcatctaaatgaagatttacatgtactaatcactgtggaagatgctcagaacagagcagaaatcaaattgaagagagcagttgaagaagtgaagaaattattggtacctgcagcagaaggagaagacagcctgaagaagatgcagctgatggagcttgcgattctgaatggcacctacagagatgccaacattaaatcaccaacagcccaggctgctccaaggatcattactgggcctgcgccggttctcccaccagctgccctgcgtactcctacgccagctggccctaccataatgcctttgatcagacaaatacagaccgctgtcatgccaaacggaactcctcacccaactgctgcaatagttcctccagggcccgaagctggtttaatctatacaccctatgagtacccctacacattggcaccagctacatcaatccttgagtatcctattgaacctagtggtgtattaggtgcggtggctactaaagttcgaaggcacgatatgcgtgtccatccttaccaaaggattgtgaccgcagaccgagccgccaccggcaactaacctatgaccttctgacctctgaactcttcacccaatg

SEQ ID NO: 113425 - DNA, 387 bp, Artificial Sequence
  derived and/or modified sequence
atggttaaacttttgacagactccaggctgcccgaggaggagcacgagtttttccatatactgaacctgtttttcccgagtatttacgacgtgaagtacctgatgaagagttgtaaaaatttgaaggggggattgcaggaggttgccgatcagctcgatctacagcgcattggacgccaacaccaagccggttctgattcactactgactggtatggcattttttcggatgaaggaattgtttttcgaggattcaatcgatgacgctaagtactgtggccggctttatggactgggaacaggcgtcgcccagaaacagaacgaagacgttgacagtgctcaagagaaaatgagcattttggcaattattaataatatgcagcagtag

SEQ ID NO: 113426 - DNA, 387 bp, Artificial Sequence
  derived and/or modified sequence
atggtgaagctgctgacagacagccggctgcctgaggaggagcacgagttcttccacatcctgaacctcttcttccccagcatctatgatgtgaagtacctgatgaagagctgcaagaacctgaagggcggcctgcaggaggtggccgaccagctggacctgcagagaattggccggcagcaccaggccggcagtgacagcctgctgaccggcatggccttcttcaggatgaaggagctgttctttgaagattccattgatgatgccaagtactgcggccgcctgtatggcctgggcaccggggtggcccagaagcagaatgaagatgtggacagcgcccaggagaagatgagcatcctggccatcatcaacaacatgcagcagtag

SEQ ID NO: 113427 - DNA, 387 bp, Artificial Sequence
  derived and/or modified sequence
atggtgaagctgctgaccgacagccggctgcccgaggaggagcacgaattttttcacatactaaacctgttcttccccagcatttacgacgtgaagtacctaatgaagtcctgcaagaacttgaaagggggcctgcaggaagtggccgaccagctcgatctacagcggatcggccggcagcatcaggccggaagcgatagcctgctcactggaatggcgttcttcaggatgaaggagcttttcttcgaagattctattgacgacgccaagtactgtggtaggctgtacggactcgggaccggcgttgcacagaagcagaacgaagacgtggatagcgcccaagagaagatgtccatcctggcaataatcaataatatgcaacaatag

SEQ ID NO: 113428 - DNA, 387 bp, Artificial Sequence
  derived and/or modified sequence
atggtgaaactgctcaccgatagtagattacccgaggaggaacatgagttcttccatattctgaacctgtttttcccctccatatatgacgtgaagtacttgatgaaaagttgtaaaaacttaaaaggtggactgcaggaggttgcagatcagctcgaccttcagaggataggcagacagcaccaagctggtagcgactctctcttaacagggatggccttcttccgaatgaaggaactgttttttgaggacagtatcgatgacgctaagtactgcgggaggttatacggacttgggactggagtcgctcagaaacaaaacgaggacgttgacagtgcgcaggaaaaaatgtcgatactagccattatcaataacatgcaacagtag

SEQ ID NO: 113429 - DNA, 387 bp, Artificial Sequence
  derived and/or modified sequence
atggtgaagctgctgaccgacagcagactgcccgaggaggagcacgagttcttccacatcctgaacctgttcttccccagcatctacgacgtgaagtacctgatgaagagctgcaagaacctgaagggcggcctgcaggaggtggccgaccagctggacctgcagagaatcggcagacagcaccaggccggcagcgacagcctgctgaccggcatggccttcttcagaatgaaggagctgttcttcgaggacagcatcgacgacgccaagtactgcggcagactgtacggcctgggcaccggcgtggcccagaagcagaacgaggacgtggacagcgcccaggagaagatgagcatcctggccatcatcaacaacatgcagcagtag

SEQ ID NO: 113430 - protein, 701 aa, Artificial Sequence
  derived and/or modified sequence
MGSGGDSLLGGRGSLPLLLLLIMVLREDFQIQPRDMVAVVGEQFTLECGPPWGHPEPTVSWWKDGKPLALQPGRHTVSGGSLLMARAEKSDEGTYMCVATNSAGHRESRAARVSIQEPQDYTEPVELLAVRIQLENVTLLNPDPAEGPKPRPAVWLSWKVSGPAAPAQSYTALFRTQTAPGGQGAPWAEELLAGWQSAELGGLHWGQDYEFKVRPSSGRARGPDSNVLLLRLPEKVPSAPPQEVTLKPGNGTVFVSWVPPPAENHNGIIRGYQVWSLGNTSLPPANWTVVGEQTQLEIATHMPGSYCVQVAAVTGAGAGEPSRPVCLLLEQAMERATQEPSEHGPWTLEQLRATLKRPEVIATCGVALWLLLLGTAVCIHRRRRARVHLGPGLYRYTSEDAILKHRMDHSDSQWLADTWRSTSGSRDLSSSSSLSSRLGADARDPLDCRRSLLSWDSRSPGVPLLPDTSTFYGSLIAELPSSTPARPSPQVPAVRRLPPQLAQLSSPCSSSDSLCSRRGLSSPRLSLAPAEAWKAKKKQELQHANSSPLLRGSHSLELRACELGNRGSKNLSQSPGAVPQALVAWRALGPKLLSSSNELVTRHLPPAPLFPHETPPTQSQQTQPPVAPQAPSSILLPAAPIPILSPCSPPSPQASSLSGPSPASSRLSSSSLSSLGEDQDSVLTPEEVALCLELSEGEETP

SEQ ID NO: 113431 - protein, 862 aa, Artificial Sequence
  derived and/or modified sequence
MVAVVGEQFTLECGPPWGHPEPTVSWWKDGKPLALQPGRHTVSGGSLLMARAEKSDEGTYMCVATNSAGHRESRAARVSIQEPQDYTEPVELLAVRIQLENVTLLNPDPAEGPKPRPAVWLSWKVSGPAAPAQSYTALFRTQTAPGGQGAPWAEELLAGWQSAELGGLHWGQDYEFKVRPSSGRARGPDSNVLLLRLPEKVPSAPPQEVTLKPGNGTVFVSWVPPPAENHNGIIRGYQVWSLGNTSLPPANWTVVGEQTQLEIATHMPGSYCVQVAAVTGAGAGEPSRPVCLLLEQAMERATQEPSEHGPWTLEQLRATLKRPEVIATCGVALWLLLLGTAVCIHRRRRARVHLGPGLYRYTSEDAILKHRMDHSDSQWLADTWRSTSGSRDLSSSSSLSSRLGADARDPLDCRRSLLSWDSRSPGVPLLPDTSTFYGSLIAELPSSTPARPSPQVPAVRRLPPQLAQLSSPCSSSDSLCSRRGLSSPRLSLAPAEAWKAKKKQELQHANSSPLLRGSHSLELRACELGNRGSKNLSQSPGAVPQALVAWRALGPKLLSSSNELVTRHLPPAPLFPHETPPTQSQQTQPPVAPQAPSSILLPAAPIPILSPCSPPSPQASSLSGPSPASSRLSSSSLSSLGEDQDSVLTPEEVALCLELSEGEETPRNSVSPMPRAPSPPTTYGYISVPTASEFTDMGRTGGGVGPKGGVLLCPPRPCLTPTPSEGSLANGWGSASEDNAASARASLVSSSDGSFLADAHFARALAVAVDSFGFGLEPREADCVFIDASSPPSPRDEIFLTPNLSLPLWEWRPDWLEDMEVSHTQRLGRGMPPWPPDSQISSQRSQLHCRMPKAGASPVDYS

SEQ ID NO: 113432 - protein, 232 aa, Artificial Sequence
  derived and/or modified sequence
MSAMESFIEKQTKLLEMQPTKAPEKDPEQPPKGRVDSCVSDAAVPAQDPSNSDPGTETELADTALDLLLLLLTEQWKWLCTENMQKFLRLIFGTLVQRWLEVQVANLTSPQRWVQYLLLLQESIWPGGVLPKFPRPVRTQEQKLAAEKQALQSLMGVLPDLVVEILGVNKCRLSWGLVLESLQQPLINRHLIYCLGDIILEFLDLSASVEESAATTSASDTPGNSKRMGVSS

SEQ ID NO: 113433 - DNA, 699 bp, Artificial Sequence
  derived and/or modified sequence
atgagcgccatggagagcttcatcgagaagcagaccaagctgctggagatgcagcccaccaaggcccccgagaaggaccccgagcagccccccaagggcagagtggacagctgcgtgagcgacgccgccgtgcccgcccaggaccccagcaacagcgaccccggcaccgagaccgagctggccgacaccgccctggacctgctgctgctgctgctgaccgagcagtggaagtggctgtgcaccgagaacatgcagaagttcctgagactgatcttcggcaccctggtgcagagatggctggaggtgcaggtggccaacctgaccagcccccagagatgggtgcagtacctgctgctgctgcaggagagcatctggcccggcggcgtgctgcccaagttccccagacccgtgagaacccaggagcagaagctggccgccgagaagcaggccctgcagagcctgatgggcgtgctgcccgacctggtggtggagatcctgggcgtgaacaagtgcagactgagctggggcctggtgctggagagcctgcagcagcccctgatcaacagacacctgatctactgcctgggcgacatcatcctggagttcctggacctgagcgccagcgtggaggagagcgccgccaccaccagcgccagcgacacccccggcaacagcaagagaatgggcgtgagcagctag

SEQ ID NO: 113434 - DNA, 699 bp, Artificial Sequence
  derived and/or modified sequence
atgtctgccatggaatctttcatcgagaagcagacaaaactgctggaaatgcaaccgaccaaagccccagaaaaagacccagagcaaccccccaagggacgggtggattcctgcgtgagcgatgcggctgtgcccgctcaggacccctctaatagcgaccctgggacggagaccgaactcgccgacacggcattggacctcctgctgctgttgctaaccgagcagtggaaatggctgtgcaccgagaatatgcagaaatttctccggctaattttcggcaccctcgttcagcgctggctggaggttcaggttgcgaacttgacatcacctcagcgttgggtccagtacctcctgttgctccaggagagcatttggccaggtggggtactgcctaagtttcccaggcctgtgcggacgcaggaacagaaactggctgctgaaaaacaggcccttcagtcactgatgggagttctgcccgacctggtcgtggaaattctgggcgtgaataagtgcagactgtcatggggtctggtcttggaatccctgcagcagccgctcataaacaggcacttgatttattgcttaggagacatcatcttggagttcctggacttatcagcctcggtcgaggaaagcgcggccactaccagcgcctctgacacaccaggaaactctaagagaatgggagtatcctcatag

SEQ ID NO: 113435 - DNA, 699 bp, Artificial Sequence
  derived and/or modified sequence
atgtctgccatggagagcttcatcgagaagcagaccaagctgctggagatgcagcccaccaaggcccctgagaaggaccctgagcagccccccaagggccgggtggacagctgtgtgtctgatgctgctgtgcctgcccaggaccccagcaacagcgaccccggcacagaaacagagctggccgacacagccctggacctgctgctgctgctgctgacagagcagtggaagtggctgtgcacagagaacatgcagaagttcctgcggctcatcttcggcaccctggtgcagcgctggctggaggtgcaggtggccaacctgaccagcccccagcgctgggtgcagtacctgctgctgctgcaggagagcatctggccaggcggcgtgctgcccaagttccccaggcctgtgaggacccaggagcagaagctggccgctgagaagcaggccctgcagagcctgatgggcgtgctgcctgacctggtggtggagatcctgggcgtgaacaagtgccgcctgtcctggggcctggtgctggagagcctgcagcagcccctcatcaacagacacctgatctactgcctgggggacatcatcctggagttcctggacctgagcgcctctgtggaggagagcgctgccaccaccagcgccagtgacaccccaggcaacagcaagaggatgggcgtgagcagctag

SEQ ID NO: 113436 - DNA, 699 bp, Artificial Sequence
  derived and/or modified sequence
atgagcgccatggagagcttcatcgagaagcagaccaagctgctggaaatgcagcccactaaggcgccagagaaagatcccgagcagcctcccaaaggacgggtcgatagctgcgtgtctgatgccgccgtccccgctcaggacccgagcaattctgatcccggaacggagactgaactggcggataccgcgctggatctgctgctgctgcttttaacggagcaatggaaatggctgtgcacagagaacatgcaaaagtttctgcggttgatattcggcacgctcgtgcaacgctggctcgaggttcaggtggcgaatctgacatccccccagaggtgggttcagtacctgctactactacaggaaagtatatggcccggcggggtactccccaaatttcctcggccggttcgcacgcaggagcagaaactggccgccgaaaagcaggccttacagtccctgatgggcgtactgccagaccttgttgttgaaatcctgggcgtgaacaaatgtagactgtcctggggcctggtactggagagtctgcagcaaccactgatcaatagacatcttatttactgtctcggagacattattcttgagttccttgacctgagtgcatctgttgaggagagtgccgccaccacgtccgcgtcagatacccccggtaacagtaagaggatgggagtttcgtcatag

SEQ ID NO: 113437 - DNA, 699 bp, Artificial Sequence
  derived and/or modified sequence
atgtcggccatggagagcttcatcgaaaagcagacaaaacttttggagatgcagccaaccaaggctcccgagaaagatcccgaacagccccctaagggcagagtggatagctgcgtgtccgatgcagccgtccccgctcaagaccccagcaattcggatccaggcaccgaaacagaactcgcggacacggccctggatttattgctcttactcctgaccgagcagtggaagtggctgtgcactgagaatatgcagaaatttttgagactgatctttgggacgctggtgcaaagatggttggaggtgcaggttgccaatctgacttccccccaaagatgggtgcagtacctactcctgttgcaggaatccatctggcctggaggcgtactcccgaagtttcccaggccggttcggacacaggaacaaaaactggcagctgagaaacaagctctgcagtcactgatgggggttctgccagacctggttgtggagatcctgggggttaacaagtgtcgattgtcatggggactcgtgttagagtcactgcagcagccactgattaacaggcatctgatctattgcttgggcgatatcatcctcgagtttctggacctgtcagcgtctgtcgaagagagtgccgcaaccacatctgctagcgatacaccaggaaacagtaagagaatgggcgttagctcatag

SEQ ID NO: 113438 - DNA, 79 bp, Artificial Sequence
  derived and/or modified sequence
aaaaatgaccagagcaatagaatgcattgaccagataaagaccttcacgtatgttgaactaaaatgtgtggtgcaggtg

SEQ ID NO: 113439 - protein, 355 aa, Artificial Sequence
  derived and/or modified sequence
MDGIFAGIICNQANRCLTWTSQQLFSEKISGAEGTKLDDEFLDMERKIDVTNKVVAEILSKTTEYLQPNPAYRAKLGMLNTVSKIRGQVKTTGYPQTEGLLGDCMLKYGKELGEDSTFGNALIEVGESMKLMAEVKDSLDINVKQTFIDPLQLLQDKDLKEIGHHLKKLEGRRLDYDYKKKRVGKIPDEEVRQAVEKFEESKELAERSMFNFLENDVEQVSQLAVFIEAALDYHRQSTEILQELQSKLQMRISAASSVPRREYKPRPVKRSSSELNGVSTTSVVKTTGSNIPMDQPCCRGLYDFEPENQGELGFKEGDIITLTNQIDENWYEGMIHGESGFFPINYVEVIVPLPQ

SEQ ID NO: 113440 - DNA, 1068 bp, Artificial Sequence
  derived and/or modified sequence
atggacggtattttcgccggaattatctgcaaccaggcgaatcgctgtctgacttggacatctcagcagctgttcagcgagaaaataagtggggcagagggaaccaagctggacgacgagtttttagatatggagcggaagatagatgtgaccaacaaagtagtggctgagatcctctctaaaactaccgagtatcttcaacctaatcctgcctacagagccaagctcggcatgctcaatacagttagtaaaattcgaggtcaggttaagacaaccgggtatcctcagacagagggactgctcggggattgcatgctgaagtacggcaaggaacttggagaggatagcacctttgggaacgcactgatcgaagttggggagagcatgaaactgatggcagaggtgaaggatagcttagatataaacgtcaagcagaccttcatagatccccttcagctgttgcaggataaggacctaaaagagattgggcaccacctgaaaaagctcgaaggcagaagactggactatgactacaaaaaaaagcgagtcggcaagatccccgatgaagaggtgcgtcaggcggtcgagaagttcgaggaatccaaagaattggccgagcgctcaatgttcaacttcctcgagaatgacgtggaacaagtgagccagcttgccgtcttcatcgaggccgccctagattaccacagacagtcaacagagattttacaggagctgcagagcaaactgcaaatgcggatttctgccgccagcagcgtgcctagaagggagtataagcctaggcccgtgaaaaggagttcgagtgaacttaatggcgtttcaacaacctctgttgtgaagacaaccggttctaacattcctatggaccagccgtgttgtcgaggcttgtacgacttcgagccagaaaaccagggcgagctggggttcaaggaaggggacattatcacgctgactaaccagatcgacgagaactggtacgagggcatgatccacggggaaagcgggttttttccaataaattacgttgaggtgatcgtgcctctgccacagtag

SEQ ID NO: 113441 - DNA, 1068 bp, Artificial Sequence
  derived and/or modified sequence
atggacggcatctttgcagggatcatctgcaatcaggcaaacagatgtcttacctggacttcccagcagttgttttctgagaaaattagcggtgctgagggcaccaaattagacgacgagttcttagatatggaaagaaagattgacgtcaccaacaaggtcgtcgcggagattctgtcaaagacaacagagtatctgcagccgaatccagcataccgggctaagcttgggatgttgaacacagtctcgaaaatccgagggcaggtgaagactactggctaccctcaaaccgagggtttgcttggagactgcatgctgaagtatggtaaagagcttggtgaggattccacatttggcaacgccctgattgaagtgggggagagtatgaagcttatggctgaggtcaaagactcactggatatcaatgttaagcagacttttattgatcctctgcagctattgcaggacaaagacttgaaggaaataggccatcacctaaagaagttggaggggcggcggttggactatgactacaaaaagaaacgcgtgggaaagatcccagatgaggaggtcaggcaggccgtcgaaaagttcgaggaaagcaaggagctcgccgaaagatccatgttcaactttctggagaatgatgtcgaacaggtaagccagctggctgtgtttatcgaagcagcactggactaccatcgtcagtccactgagatcttacaggagctacagtccaagctgcagatgcgaatcagtgccgcttcctcagtacctagaagggaatacaagcctcgcccggtcaagagaagttcgtccgaactgaacggggttagcacaacatctgtggtgaaaactacaggaagtaacatcccgatggaccagccctgttgcaggggcctttatgattttgagcccgaaaaccagggcgaactgggcttcaaagagggtgatattatcactctcaccaaccagatagacgaaaactggtatgaggggatgattcacggcgagtctggattcttccccattaattacgtcgaagtcatcgttcccctgcctcagtag

SEQ ID NO: 113442 - DNA, 1068 bp, Artificial Sequence
  derived and/or modified sequence
atggatggcatctttgctggcatcatctgcaaccaggccaaccgctgcctgacctggaccagccagcagctgttcagcgagaagatcagcggggctgagggcaccaagctggatgatgagttcctggacatggagaggaagattgatgtgaccaacaaggtggtggccgagatcctgagcaagaccacagagtacctgcagcccaacccagcctaccgggccaagctgggcatgctgaacacagtgtccaagatccggggccaggtgaagaccaccggctacccccagacagagggcctgctgggggactgcatgctgaagtatggcaaggagctgggggaggacagcacctttggaaatgccctgattgaggtgggggagagcatgaagctgatggccgaggtgaaggacagcctggacatcaacgtgaagcagaccttcatcgaccccctgcagctgctgcaggacaaggacctgaaggagatcggccaccacctgaagaagctggagggccggcggctggactatgactacaagaagaagagggtgggcaagatcccagatgaggaggtgcggcaggccgtggagaagtttgaggagagcaaggagctggccgagaggtccatgttcaacttcctggagaatgatgtggagcaggtgtcccagctggccgtgttcattgaagctgccctggactaccaccggcagagcacagagatcctgcaggagctgcagagcaagctgcagatgaggatctctgctgccagctctgtgccccggcgggagtacaagcccaggcctgtgaagaggagcagcagcgagctgaatggagtgtccaccacctctgtggtgaagaccaccggcagcaacatccccatggaccagccctgctgccggggcctgtatgactttgagcctgagaaccagggcgagctgggcttcaaggagggggacatcatcaccctgaccaaccagattgatgagaactggtatgagggcatgatccacggggagagcggcttcttccccatcaactacgtggaggtgattgtgcccctgccccagtag

SEQ ID NO: 113443 - DNA, 1068 bp, Artificial Sequence
  derived and/or modified sequence
atggacggcatcttcgccggcatcatctgcaaccaggccaaccggtgcttaacatggaccagccagcagttgttcagtgagaagatcagtggcgcagagggtacaaaactcgacgatgagttcttggatatggagcgcaagattgacgtcaccaacaaggtggtggctgagattctgtcaaagacaaccgagtacctccaacccaatcccgcatatagggcaaaactcgggatgttgaatacagtaagcaaaatccgcggccaggtgaaaaccacgggctacccacaaaccgagggtctgttaggcgattgcatgctcaaatacgggaaggaactcggggaagatagcactttcggaaacgctttgattgaggtgggagaaagcatgaagctgatggccgaggtgaaagactctctcgacatcaacgtgaaacagaccttcatcgatcccctccagcttctgcaagataaagacttgaaggaaatcggccaccacctcaagaagctggaagggcgacgtctggattacgattataagaagaaacgcgtgggaaagattcccgacgaagaggtgaggcaggcagttgagaagtttgaggagtctaaagagctggctgaaaggtctatgtttaattttctcgagaatgacgtggagcaagtgtcacagctcgctgtctttatcgaggccgccctcgactaccacaggcagtccacagagatcctccaggaactgcagagcaagttgcaaatgagaatctcagccgcatcttcggtccctcgccgcgaatacaaacccaggcccgtaaagcggtcttcctccgagctgaacggagttagcacgaccagcgtcgtcaagaccaccggctccaacattccaatggatcagccctgctgtagagggctttacgattttgaacccgagaatcagggggaactcggtttcaaagagggcgatattattacactcaccaatcagatcgatgagaattggtacgaaggtatgattcatggcgaatccgggtttttccccattaactacgtggaggtcatcgtgcccctcccccagtag

SEQ ID NO: 113444 - DNA, 1068 bp, Artificial Sequence
  derived and/or modified sequence
atggacggcatcttcgccggcatcatctgcaaccaggccaaccggtgtttgacgtggacatcccaacaactgttctccgaaaagatcagtggtgccgaaggaaccaagctggacgatgagttcctggatatggaaagaaagattgacgtgaccaataaggtggtggcggaaatcctgagcaagacaaccgagtacctgcagcctaatcctgcttatagggctaagctgggcatgctgaatacggtctccaaaataaggggccaagtgaagaccacaggctacccacagactgaggggctgcttggcgattgcatgctgaagtacgggaaagagctcggcgaagattcaacgttcggcaatgcacttattgaggtgggagaaagcatgaaattgatggctgaagtgaaagacagcctggatatcaacgtgaaacagacatttatcgatcccctgcagttgctgcaggataaggatttgaaggagatcggacatcacctgaagaaactcgaggggagaaggctcgactatgattataaaaagaagagggtgggcaagatccccgacgaggaagtgcggcaagcagtcgaaaagtttgaggaaagcaaagagctcgctgagaggtcgatgtttaacttcctggagaatgacgttgagcaggtgtctcaactcgccgtgtttattgaagccgcactagactatcaccgacagtctaccgagattcttcaggagctacagtcgaagctgcagatgcgcattagcgctgctagctccgtccctaggcgcgagtacaagccacgacccgtgaagcgcagtagctcggagttaaacggagtttccacaacctctgtggtaaagacaacggggagtaacatccccatggaccagccatgttgcagaggactttatgacttcgagcccgagaatcagggcgagttgggcttcaaagaaggcgatattatcaccctcacaaaccagatcgacgagaattggtatgaggggatgattcatggtgaaagcggatttttcccgattaattacgtcgaggtgatcgtcccattaccccagtag

SEQ ID NO: 113445 - DNA, 1068 bp, Artificial Sequence
  derived and/or modified sequence
atggatggaatttttgccggtatcatctgtaatcaggcgaatcggtgcctgacatggacaagccagcagctatttagcgaaaagatcagtggtgccgaagggacaaagctggacgatgaattcctcgatatggaacggaagatagacgtcaccaacaaggtcgtcgccgagatcctctcaaagactaccgagtatctgcagcccaatccagcttacagggcgaagttaggcatgctcaatacagtgagcaagatcagaggtcaggtgaagaccacaggatatccccagactgagggcttgttgggagattgcatgctgaagtacggcaaggagcttggcgaggactcaacgttcggcaacgcccttattgaggtgggcgaaagcatgaaactcatggcagaggtgaaagacagcctggatattaatgtgaaacaaacctttatcgatcccctgcaactgctgcaagataaggatctgaaagaaatcggacatcacttgaagaagctggaggggaggaggttggattacgactacaaaaaaaaacgtgtcggtaagattccagatgaagaagtcagacaagctgtagaaaagttcgaagagtctaaggagctggccgaacggtctatgtttaattttcttgagaacgacgtcgagcaagtttcgcaactggcagtgttcattgaagccgctctggattatcatcgacagagcactgagattctccaggaactgcaatcaaaattacagatgaggatctcagcagcttcttccgtgcctagaagagagtacaaaccacggcctgtgaaacggagtagttctgagcttaatggggtctccactacttcagtggtgaagacaaccggcagtaacatccccatggatcagccatgctgtaggggcttatatgattttgagcccgagaatcagggtgagctgggtttcaaagaaggggacatcataactcttacaaaccagatcgacgagaactggtacgaggggatgatccatggggagtcagggttttttcctatcaattatgtggaggtcattgttcctttaccacagtag

SEQ ID NO: 113446 - DNA, 1068 bp, Artificial Sequence
  derived and/or modified sequence
atggacggcattttcgccggaatcatctgcaaccaggcaaacagatgcctcacatggacatcacagcagctgttttccgagaaaatcagtggcgcagagggtacaaaactggatgatgagttcctggatatggaaagaaagatagacgtcaccaacaaagttgttgcagagatcctgtctaagactaccgaatatctacagcctaaccccgcttaccgggctaaactggggatgttgaacacagtatctaagattcgagggcaggtgaaaaccacgggttatccccagaccgaaggactcctgggagactgcatgctcaagtatggcaaagagttgggggaagattccacattcggaaatgccctaatagaggtgggcgagagtatgaaattaatggccgaggtgaaggactccctcgacatcaatgtgaagcagacctttatagaccccctacaactgctgcaggacaaagatctcaaagagatcggacaccatctgaagaaacttgagggacggagactggactacgactataagaaaaaaagggtgggcaaaatcccagacgaggaggtgagacaggccgtggagaagtttgaggagtccaaggagctggcggagcgctctatgttcaatttcttagagaacgatgtcgaacaggtcagtcagctcgctgtcttcatcgaagccgcattggactatcaccgccagtctactgagattcttcaagagctgcagagcaaattgcaaatgcggatttcggcagcttccagcgttccacgaagggagtacaagccgcgtcccgttaagagatctagctccgagcttaatggagtgtccacaacctctgtcgtaaaaaccactggcagcaacatccctatggaccaaccctgttgtcgcggtctttacgattttgaacctgagaatcagggagagcttgggttcaaggagggcgacatcattaccttgactaaccagatagacgagaactggtacgagggcatgatccacggtgagagtgggttcttccctatcaactatgtggaggtcatcgtcccactgcctcagtag

SEQ ID NO: 113447 - DNA, 2012 bp, Artificial Sequence
  derived and/or modified sequence
gcgatgtcggtggccgggctgaagaagcagttccacaaagccagccagtagagatgggtttcaccatgttggccaatatggtctcgatctcctgacctcgtgatccgcctgcctcggcctcccagagtgctgggattacaggtgtgagccactgtgcccagcctcttctctcactatccgtttctgacaaatgaaaaaaatggatgtgggtcctgcagaacctgaggccagctctaaccagtctttcatggatgcatacacctgcctgcaggcgctgctcccaggttatgaggctggttcttgggtttgactctgggaatcatgctcattgatctgcttttcctaatcatgtcagtgaatacctacacgtgaagaaaactcaagctgcaccataaagctaaaggaagaaggagcttttaagtgaataagaccattttcccaatgagcagtgtcataaacattgaggactctcttaaatcagaagatgaatgaatggatggaatctttgctgggataatatgcaatcaagctaataggtgccttacctggacctcccaacagctatttagtgaaaaaataagtggtgctgaaggaactaaactagacgatgaatttcttgacatggaaaggaaaatagatgttaccaataaagttgttgcagaaattctttcaaaaaccactgaatatcttcagccaaatccagcatacagagctaagctaggaatgctgaacactgtgtcgaagatccgagggcaggtgaagaccacaggatacccgcagacggaaggcttgctgggggactgtatgctgaaatacgggaaggagctcggggaagactccacctttggcaatgcattgatagaagttggtgaatccatgaagctaatggctgaggtgaaagactctcttgatattaatgtaaagcaaacttttattgatccacttcagttactacaagataaagatttaaaagagatcgggcatcacctgaaaaagctggaaggccgccgcctggattacgattataaaaagaaacgagtaggtaagataccagacgaagaagtcagacaagcggtagaaaaatttgaagagtcaaaggagttggctgaaagaagcatgtttaactttttagaaaatgatgtagaacaagtcagccagttggctgtgttcatagaggcagcattagactatcacagacagtccacagagattctgcaggagctgcagagcaagctacagatgcgaatatcagctgcatccagtgtccccagacgagaatacaagccaaggcctgtgaaaaggagttctagtgagctcaatggagtttccaccacctctgtagtgaagacgacaggttctaacattcccatggaccagccctgctgtcgtggtctctatgactttgagccagaaaaccaaggagaattaggatttaaagaaggggacatcattacattaaccaatcaaatagatgaaaactggtatgaaggaatgatacacggagaatcgggattcttccccattaattacgtggaagtgatcgtgcctttacctcagtaaatgtgtaacacaaactctggacatactttcgtaactgaaatgaattcacaccagtgtgctctcagtgcggtgttctgtgacatcctttgctctctgaccaacttaatgacttttgtatgtgtgctctctttataatgtattttatatcactttaatttgtataaatgattttcttgtccttgctacatgaaaatattttcttttttgcttcctgtcctaaaagtcattggttaaatgtatttgcttcctgtggctaaaaataagtctcacccattgcagttatgtcaacgaatggcctatattcctcagctgcaatgaaatggtaacatttgaaactaagaaatgctaaatattttgtttctcgacattcctgatgacgtctggtcttttcttttcattgtattttaagcttacctgtgaatagcccaataaacatgacacactgtgttggc

SEQ ID NO: 113448 - DNA, 1520 bp, Artificial Sequence
  derived and/or modified sequence
atggatggaatctttgctgggataatatgcaatcaagctaataggtgccttacctggacctcccaacagctatttagtgaaaaaataagtggtgctgaaggaactaaactagacgatgaatttcttgacatggaaaggaaaatagatgttaccaataaagttgttgcagaaattctttcaaaaaccactgaatatcttcagccaaatccagcatacagagctaagctaggaatgctgaacactgtgtcgaagatccgagggcaggtgaagaccacaggatacccgcagacggaaggcttgctgggggactgtatgctgaaatacgggaaggagctcggggaagactccacctttggcaatgcattgatagaagttggtgaatccatgaagctaatggctgaggtgaaagactctcttgatattaatgtaaagcaaacttttattgatccacttcagttactacaagataaagatttaaaagagatcgggcatcacctgaaaaagctggaaggccgccgcctggattacgattataaaaagaaacgagtaggtaagataccagacgaagaagtcagacaagcggtagaaaaatttgaagagtcaaaggagttggctgaaagaagcatgtttaactttttagaaaatgatgtagaacaagtcagccagttggctgtgttcatagaggcagcattagactatcacagacagtccacagagattctgcaggagctgcagagcaagctacagatgcgaatatcagctgcatccagtgtccccagacgagaatacaagccaaggcctgtgaaaaggagttctagtgagctcaatggagtttccaccacctctgtagtgaagacgacaggttctaacattcccatggaccagccctgctgtcgtggtctctatgactttgagccagaaaaccaaggagaattaggatttaaagaaggggacatcattacattaaccaatcaaatagatgaaaactggtatgaaggaatgatacacggagaatcgggattcttccccattaattacgtggaagtgatcgtgcctttacctcagtaaatgtgtaacacaaactctggacatactttcgtaactgaaatgaattcacaccagtgtgctctcagtgcggtgttctgtgacatcctttgctctctgaccaacttaatgacttttgtatgtgtgctctctttataatgtattttatatcactttaatttgtataaatgattttcttgtccttgctacatgaaaatattttcttttttgcttcctgtcctaaaagtcattggttaaatgtatttgcttcctgtggctaaaaataagtctcacccattgcagttatgtcaacgaatggcctatattcctcagctgcaatgaaatggtaacatttgaaactaagaaatgctaaatattttgtttctcgacattcctgatgacgtctggtcttttcttttcattgtattttaagcttacctgtgaatagcccaataaacatgacacactgtgttggc

SEQ ID NO: 113449 - DNA, 1068 bp, Artificial Sequence
  derived and/or modified sequence
atggacggcatcttcgccggcatcatctgcaaccaggccaacagatgcctgacctggaccagccagcagctgttcagcgagaagatcagcggcgccgagggcaccaagctggacgacgagttcctggacatggagagaaagatcgacgtgaccaacaaggtggtggccgagatcctgagcaagaccaccgagtacctgcagcccaaccccgcctacagagccaagctgggcatgctgaacaccgtgagcaagatcagaggccaggtgaagaccaccggctacccccagaccgagggcctgctgggcgactgcatgctgaagtacggcaaggagctgggcgaggacagcaccttcggcaacgccctgatcgaggtgggcgagagcatgaagctgatggccgaggtgaaggacagcctggacatcaacgtgaagcagaccttcatcgaccccctgcagctgctgcaggacaaggacctgaaggagatcggccaccacctgaagaagctggagggcagaagactggactacgactacaagaagaagagagtgggcaagatccccgacgaggaggtgagacaggccgtggagaagttcgaggagagcaaggagctggccgagagaagcatgttcaacttcctggagaacgacgtggagcaggtgagccagctggccgtgttcatcgaggccgccctggactaccacagacagagcaccgagatcctgcaggagctgcagagcaagctgcagatgagaatcagcgccgccagcagcgtgcccagaagagagtacaagcccagacccgtgaagagaagcagcagcgagctgaacggcgtgagcaccaccagcgtggtgaagaccaccggcagcaacatccccatggaccagccctgctgcagaggcctgtacgacttcgagcccgagaaccagggcgagctgggcttcaaggagggcgacatcatcaccctgaccaaccagatcgacgagaactggtacgagggcatgatccacggcgagagcggcttcttccccatcaactacgtggaggtgatcgtgcccctgccccagtag

SEQ ID NO: 113450 - protein, 1441 aa, Artificial Sequence
  derived and/or modified sequence
MSKSLKKKSHWTSKVHESVIGRNPEGQLGFELKGGAENGQFPYLGEVKPGKVAYESGSKLVSEELLLEVNETPVAGLTIRDVLAVIKHCKDPLRLKCVKQGGIVDKDLRHYLNLRFQKGSVDHELQQIIRDNLYLRTVPCTTRPHKEGEVPGVDYIFITVEDFMELEKSGALLESGTYEDNYYGTPKPPAEPAPLLLNVTDQILPGATPSAEGKRKRNKSVSNMEKASIEPPEEEEEERPVVNGNGVVVTPESSEHEDKSAGASGEMPSQPYPAPVYSQPEELKEQMDDTKPTKPEDNEEPDPLPDNWEMAYTEKGEVYFIDHNTKTTSWLDPRLAKKAKPPEECKENELPYGWEKIDDPIYGTYYVDHINRRTQFENPVLEAKRKLQQHNMPHTELGTKPLQAPGFREKPLFTRDASQLKGTFLSTTLKKSNMGFGFTIIGGDEPDEFLQVKSVIPDGPAAQDGKMETGDVIVYINEVCVLGHTHADVVKLFQSVPIGQSVNLVLCRGYPLPFDPEDPANSMVPPLAIMERPPPVMVNGRHNYETYLEYISRTSQSVPDITDRPPHSLHSMPTDGQLDGTYPPPVHDDNVSMASSGATQAELMTLTIVKGAQGFGFTIADSPTGQRVKQILDIQGCPGLCEGDLIVEINQQNVQNLSHTEVVDILKDCPIGSETSLIIHRGGFFSPWKTPKPIMDRWENQGSPQTSLSAPAIPQNLPFPPALHRSSFPDSTEAFDPRKPDPYELYEKSRAIYESRRPDYKELDVHLRRMESGFGFRILGGDEPGQPILIGAVIAMGSADRDGRLHPGDELVYVDGIPVAGKTHRYVIDLMHHAARNGQVNLTVRRKVLCGGEPCPENGRSPGSVSTHHSSPRSDYATYTNSNHAAPSSNASPPEGFASHSLQTSDVVIHRKENEGFGFVIISSLNRPESGSTITVPHKIGRIIDGSPADRCAKLKVGDRILAVNGQSIINMPHADIVKLIKDAGLSVTLRIIPQEELNSPTSAPSSEKQSPMAQQSPLAQQSPLAQPSPATPNSPIAQPAPPQPLQLQGHENSYRSEVKARQDVKPDIRQPPFTDYRQPPLDYRQPPGGDYQQPPPLDYRQPPLLDYRQHSPDTRQYPLSDYRQPQDFDYFTVDMEKGAKGFGFSIRGGREYKMDLYVLRLAEDGPAIRNGRMRVGDQIIEINGESTRDMTHARAIELIKSGGRRVRLLLKRGTGQVPEYDEPAPWSSPAAAAPGLPEVGVSLDDGLAPFSPSHPAPPSDPSHQISPGPTWDIKREHDVRKPKELSACGQKKQRLGEQRERSASPQRAARPRLEEAPGGQGRPEAGRPASEARAPGLAAADAADAARAGGKEAPRAAAGSELCRREGPGAAPAFAGPGGGGSGALEAEGRAGARAGPRPGPRPPGGAPARKAAVAPGPWKVPGSDKLPSVLKPGASAASR

SEQ ID NO: 113451 - protein, 555 aa, Artificial Sequence
  derived and/or modified sequence
MELEKSGALLESGTYEDNYYGTPKPPAEPAPLLLNVTDQILPGATPSAEGKRKRNKSVSNMEKASIEPPEEEEEERPVVNGNGVVVTPESSEHEDKSAGASGEMPSQPYPAPVYSQPEELKEQMDDTKPTKPEDNEEPDPLPDNWEMAYTEKGEVYFIDHNTKTTSWLDPRLAKKAKPPEECKENELPYGWEKIDDPIYGTYYVDHINRRTQFENPVLEAKRKLQQHNMPHTELGTKPLQAPGFREKPLFTRDASQLKGTFLSTTLKKSNMGFGFTIIGGDEPDEFLQVKSVIPDGPAAQDGKMETGDVIVYINEVCVLGHTHADVVKLFQSVPIGQSVNLVLCRGYPLPFDPEDPANSMVPPLAIMERPPPVMVNGRHNYETYLEYISRTSQSVPDITDRPPHSLHSMPTDGQLDGTYPPPVHDDNVSMASSGATQAELMTLTIVKGAQGFGFTIADSPTGQRVKQILDIQGCPGLCEGDLIVEINQQNVQNLSHTEVVDILKDCPIGSETSLIIHRGGKTNTGSAIKYVGKIVGSFNNIVKMQISLELNEIIL

SEQ ID NO: 113452 - DNA, 4326 bp, Artificial Sequence
  derived and/or modified sequence
atgagcaagagcctgaagaagaagagccactggaccagcaaggtgcacgagagcgtgatcggcagaaaccccgagggccagctgggcttcgagctgaagggcggcgccgagaacggccagttcccctacctgggcgaggtgaagcccggcaaggtggcctacgagagcggcagcaagctggtgagcgaggagctgctgctggaggtgaacgagacccccgtggccggcctgaccatcagagacgtgctggccgtgatcaagcactgcaaggaccccctgagactgaagtgcgtgaagcagggcggcatcgtggacaaggacctgagacactacctgaacctgagattccagaagggcagcgtggaccacgagctgcagcagatcatcagagacaacctgtacctgagaaccgtgccctgcaccaccagaccccacaaggagggcgaggtgcccggcgtggactacatcttcatcaccgtggaggacttcatggagctggagaagagcggcgccctgctggagagcggcacctacgaggacaactactacggcacccccaagccccccgccgagcccgcccccctgctgctgaacgtgaccgaccagatcctgcccggcgccacccccagcgccgagggcaagagaaagagaaacaagagcgtgagcaacatggagaaggccagcatcgagccccccgaggaggaggaggaggagagacccgtggtgaacggcaacggcgtggtggtgacccccgagagcagcgagcacgaggacaagagcgccggcgccagcggcgagatgcccagccagccctaccccgcccccgtgtacagccagcccgaggagctgaaggagcagatggacgacaccaagcccaccaagcccgaggacaacgaggagcccgaccccctgcccgacaactgggagatggcctacaccgagaagggcgaggtgtacttcatcgaccacaacaccaagaccaccagctggctggaccccagactggccaagaaggccaagccccccgaggagtgcaaggagaacgagctgccctacggctgggagaagatcgacgaccccatctacggcacctactacgtggaccacatcaacagaagaacccagttcgagaaccccgtgctggaggccaagagaaagctgcagcagcacaacatgccccacaccgagctgggcaccaagcccctgcaggcccccggcttcagagagaagcccctgttcaccagagacgccagccagctgaagggcaccttcctgagcaccaccctgaagaagagcaacatgggcttcggcttcaccatcatcggcggcgacgagcccgacgagttcctgcaggtgaagagcgtgatccccgacggccccgccgcccaggacggcaagatggagaccggcgacgtgatcgtgtacatcaacgaggtgtgcgtgctgggccacacccacgccgacgtggtgaagctgttccagagcgtgcccatcggccagagcgtgaacctggtgctgtgcagaggctaccccctgcccttcgaccccgaggaccccgccaacagcatggtgccccccctggccatcatggagagacccccccccgtgatggtgaacggcagacacaactacgagacctacctggagtacatcagcagaaccagccagagcgtgcccgacatcaccgacagacccccccacagcctgcacagcatgcccaccgacggccagctggacggcacctaccccccccccgtgcacgacgacaacgtgagcatggccagcagcggcgccacccaggccgagctgatgaccctgaccatcgtgaagggcgcccagggcttcggcttcaccatcgccgacagccccaccggccagagagtgaagcagatcctggacatccagggctgccccggcctgtgcgagggcgacctgatcgtggagatcaaccagcagaacgtgcagaacctgagccacaccgaggtggtggacatcctgaaggactgccccatcggcagcgagaccagcctgatcatccacagaggcggcttcttcagcccctggaagacccccaagcccatcatggacagatgggagaaccagggcagcccccagaccagcctgagcgcccccgccatcccccagaacctgcccttcccccccgccctgcacagaagcagcttccccgacagcaccgaggccttcgaccccagaaagcccgacccctacgagctgtacgagaagagcagagccatctacgagagcagaagacccgactacaaggagctggacgtgcacctgagaagaatggagagcggcttcggcttcagaatcctgggcggcgacgagcccggccagcccatcctgatcggcgccgtgatcgccatgggcagcgccgacagagacggcagactgcaccccggcgacgagctggtgtacgtggacggcatccccgtggccggcaagacccacagatacgtgatcgacctgatgcaccacgccgccagaaacggccaggtgaacctgaccgtgagaagaaaggtgctgtgcggcggcgagccctgccccgagaacggcagaagccccggcagcgtgagcacccaccacagcagccccagaagcgactacgccacctacaccaacagcaaccacgccgcccccagcagcaacgccagcccccccgagggcttcgccagccacagcctgcagaccagcgacgtggtgatccacagaaaggagaacgagggcttcggcttcgtgatcatcagcagcctgaacagacccgagagcggcagcaccatcaccgtgccccacaagatcggcagaatcatcgacggcagccccgccgacagatgcgccaagctgaaggtgggcgacagaatcctggccgtgaacggccagagcatcatcaacatgccccacgccgacatcgtgaagctgatcaaggacgccggcctgagcgtgaccctgagaatcatcccccaggaggagctgaacagccccaccagcgcccccagcagcgagaagcagagccccatggcccagcagagccccctggcccagcagagccccctggcccagcccagccccgccacccccaacagccccatcgcccagcccgcccccccccagcccctgcagctgcagggccacgagaacagctacagaagcgaggtgaaggccagacaggacgtgaagcccgacatcagacagccccccttcaccgactacagacagccccccctggactacagacagccccccggcggcgactaccagcagcccccccccctggactacagacagccccccctgctggactacagacagcacagccccgacaccagacagtaccccctgagcgactacagacagccccaggacttcgactacttcaccgtggacatggagaagggcgccaagggcttcggcttcagcatcagaggcggcagagagtacaagatggacctgtacgtgctgagactggccgaggacggccccgccatcagaaacggcagaatgagagtgggcgaccagatcatcgagatcaacggcgagagcaccagagacatgacccacgccagagccatcgagctgatcaagagcggcggcagaagagtgagactgctgctgaagagaggcaccggccaggtgcccgagtacgacgagcccgccccctggagcagccccgccgccgccgcccccggcctgcccgaggtgggcgtgagcctggacgacggcctggcccccttcagccccagccaccccgccccccccagcgaccccagccaccagatcagccccggccccacctgggacatcaagagagagcacgacgtgagaaagcccaaggagctgagcgcctgcggccagaagaagcagagactgggcgagcagagagagagaagcgccagcccccagagagccgccagacccagactggaggaggcccccggcggccagggcagacccgaggccggcagacccgccagcgaggccagagcccccggcctggccgccgccgacgccgccgacgccgccagagccggcggcaaggaggcccccagagccgccgccggcagcgagctgtgcagaagagagggccccggcgccgcccccgccttcgccggccccggcggcggcggcagcggcgccctggaggccgagggcagagccggcgccagagccggccccagacccggccccagaccccccggcggcgcccccgccagaaaggccgccgtggcccccggcccctggaaggtgcccggcagcgacaagctgcccagcgtgctgaagcccggcgccagcgccgccagcagatag

SEQ ID NO: 113453 - DNA, 4326 bp, Artificial Sequence
  derived and/or modified sequence
atgtcaaagagtttgaagaagaagagtcattggacttccaaggtccatgagtcggtgattggaagaaatccggaaggccaactgggttttgaactgaaaggcggggctgagaatggccagtttccctaccttggggaggtgaaaccaggaaaggttgcttatgagtctggttctaaactggtgagtgaggaactccttctcgaagtcaacgaaacccccgtagccggcctcaccattcgagacgtgttagccgtaatcaagcactgcaaggatccgctgagacttaagtgtgtcaagcagggaggtattgtggacaaagacttgcggcactaccttaacttacgatttcaaaagggctcagttgaccacgaactgcaacaaattatcagagataacttatatttgagaacagttccttgcactacacggcctcataaagaaggcgaggtgccaggcgtggactacatcttcataacagtggaggatttcatggagttggagaagtccggcgccctgctggagagcggaacttatgaggataattattacggaacccccaagcctcccgcggagccagctcccctcctgctgaacgttaccgaccaaatccttccgggggctaccccatctgctgagggcaagcgtaaacggaataaatctgtctccaacatggagaaagcctcgatagaacctccagaagaggaggaggaggaaaggccggtggtgaacggtaacggggtggtcgtcacccccgagagctctgagcatgaggacaaaagcgccggcgcatctggagagatgccgagccagccctacccagcaccagtctactctcagccggaggaactcaaggagcagatggacgataccaagccgactaaaccagaggataacgaagagccagatcccttacccgacaattgggaaatggcttatactgaaaagggcgaggtctatttcatcgaccacaacaccaaaacgacatcttggctggaccccagactcgcaaagaaggccaaacctcctgaagagtgtaaggagaacgagctgccctacggatgggaaaagatcgatgacccgatctacggaacctactatgtggaccacattaatagacgcacccagttcgagaacccagtgcttgaagctaagcgaaaactgcaacagcacaacatgccacacacagaactgggcacgaaacccttacaggctcctggattccgcgagaaacctctgttcacccgcgacgcctcacaacttaaggggacatttctatcgacgacactgaaaaagagcaatatgggattcggattcacgattattggtggagatgagcccgacgagttcctacaggtgaaatccgttatacctgacggtcccgccgcacaagacggtaagatggagactggagatgttatcgtttacattaatgaagtgtgcgttctcgggcacacccatgccgatgtcgtgaagctgtttcagtcagtgccaataggccagagtgtaaaccttgttttatgtcgagggtatccccttccattcgacccagaagatcccgccaactctatggtgccaccactggcgatcatggagcgtccacctcccgtcatggtgaacggaagacacaactatgagacataccttgagtacatctccagaacatctcagagcgtgcctgacattacggacagacccccgcatagcttgcatagtatgcctactgatggacaacttgacggtacctatcccccccctgtccatgacgacaacgtgagcatggctagctctggcgccactcaggccgagttgatgacccttactatagtcaaaggtgctcaggggttcggcttcacaattgctgattcaccaactggacaacgagtcaagcaaatccttgatatccagggttgtccaggcctatgcgagggggacctgatcgtcgaaatcaaccagcaaaacgtgcagaacctcagtcacacagaagtggtcgatatcctgaaggattgccccataggaagcgaaactagtctaattattcacaggggtggctttttcagtccgtggaagacgcctaaacccatcatggatagatgggagaatcaaggcagtccacaaacctctctgagcgcacccgcaataccgcagaatctaccatttccacccgcactacatcgctcctccttcccagattccacagaggcttttgacccacggaaaccagatccttacgaactttacgagaagtcaagggcgatatatgaaagcagaaggcctgattacaaggaactggatgtgcacctgaggcggatggagtcaggctttggatttaggatcttggggggggatgagccgggccagccaatcttaattggagcagtcattgcaatgggcagcgcagaccgggatggtagattgcatcccggcgatgagttagtttacgtggacgggattccagtagccggaaagacacacagatatgttatcgacctgatgcaccacgcagcaagaaacgggcaagtgaatctaaccgtgagacgcaaggtgctgtgtggtggggaaccctgccctgagaacggccgttctcccgggtctgtgtccacacaccactcttcaccgcgttcagactacgccacttacaccaattccaatcatgccgccccatcctccaatgcaagtccccctgaaggcttcgccagccacagcttgcagacaagcgatgtcgtgatacatcgaaaagaaaacgaagggttcggctttgtgataatttcctctcttaatagacccgagtccgggagcacaataaccgtgccacacaagatcgggaggatcatagacggaagccctgccgaccggtgcgccaagcttaaagtgggcgaccgcatccttgcagtgaatggccagtctataattaatatgccacacgcagacatcgtgaagctcatcaaggacgcaggcctgtcagtgaccttgcgaatcattccacaagaggaactgaactccccaacctccgccccgagttctgagaaacaatcccccatggcccaacagtctcccctcgctcagcagtcgccactggcccaaccatctcccgccacacctaactcccccatcgctcaaccagctcccccgcagcctcttcaactgcagggccacgaaaattcctacaggtctgaagtgaaagcgcgccaggacgttaaacccgacattcgtcagccgccttttaccgattacaggcagccaccactggattaccggcagccccccggaggagattatcagcagcccccgcctctggactacagacagcctcccttactggattataggcagcacagtccagacacacgacagtaccccctctctgactacaggcagcctcaagacttcgactacttcacggtcgatatggagaagggagccaaaggattcggtttttctatcagggggggccgcgagtacaagatggatttgtacgtgttgcggctcgccgaggacggacctgccatccgcaatggcagaatgcgagtgggcgaccagattattgaaatcaacggcgagagtacacgcgatatgactcacgccagagcgattgagctgattaaatctgggggaaggcgggtccgcctgctactgaagcgagggaccggtcaggtgcccgaatatgacgaacccgccccttggagctctcctgctgccgcggctccaggactccctgaagttggcgtttctctcgatgatggcctggcaccctttagcccctcccatcctgctccaccctccgatccatcccaccagatatcccctggcccaacctgggatattaaacgtgagcacgacgtgcgcaaaccaaaagagttatcagcgtgcgggcagaaaaagcagcggttgggagaacagagagagcgaagcgcctctccgcagcgggcagctagaccgcgcctagaagaggctccaggcggtcagggtcgtcctgaggccggacgccctgcaagcgaggcccgggctcctgggctcgccgcagccgacgccgcggacgccgctagagctggcggcaaagaagcccctcgagcggcggctggatctgagctgtgccgtcgagagggtcctggggctgcccctgccttcgcgggcccaggagggggggggtcgggggccctggaagccgaggggcgggccggcgcacgggcgggccccagacctgggcctcgccctcctggcggcgctcccgctcggaaggccgcagtggctcccggaccctggaaggtgcctggaagcgacaaactgccaagtgtgctcaaaccaggggcaagtgcagccagccgctag

SEQ ID NO: 113454 - DNA, 4326 bp, Artificial Sequence
  derived and/or modified sequence
atgagcaagagcctgaagaagaagagccactggaccagcaaggtgcatgagagcgtcatcggcaggaaccctgagggccagctgggctttgagctgaagggcggcgcagaaaatggccagttcccctacctgggggaggtgaagccaggcaaggtggcctatgagagcggcagcaagctggtgtctgaggagctgctgctggaggtgaatgagacccctgtggccggcctgaccatcagagatgtgctggccgtcatcaagcactgcaaggaccccctgcggctgaagtgtgtgaagcagggcggcatcgtggacaaggacctgcggcactacctgaacctgcgcttccagaagggctctgtggaccacgagctgcagcagatcatccgggacaacctgtacctgaggacagtgccctgcaccacccggccccacaaggagggggaggtgcctggggtggactacatcttcatcaccgtggaggacttcatggagctggagaagagcggggccctgctggagagcggcacctatgaggacaactactacggcacccccaagcccccagctgagcccgcccccctgctgctgaatgtgacagaccagatcctgcccggggccacccccagcgctgagggcaagaggaagaggaacaagtctgtgagcaacatggagaaggccagcattgagcccccagaggaggaggaggaggagaggcctgtggtgaatggaaatggagtggtggtgaccccagagagcagcgagcacgaggacaagtctgctggggccagcggggagatgcccagccagccctacccagcccctgtgtacagccagcctgaggagctgaaggagcagatggatgacaccaagcccaccaagccagaggacaatgaggagccagaccccctgcctgacaactgggagatggcctacacagagaagggggaggtgtacttcatcgaccacaacaccaagaccacctcctggctggacccccggctggccaagaaggccaagcccccagaggagtgcaaggaaaatgagctgccctacggctgggagaagattgatgaccccatctacggcacctactacgtggaccacatcaacagaaggacccagtttgaaaatcctgtgctggaggccaagaggaagctgcagcagcacaacatgccccacacagagctgggcaccaagcccctgcaggcccctggcttccgggagaagcccctcttcaccagagatgccagccagctgaagggcaccttcctgagcaccaccctgaagaagagcaacatgggcttcggcttcaccatcattggaggagatgagccagatgagttcctgcaggtgaagagcgtcatcccagatggccctgctgcccaggacggcaagatggagactggagatgtgattgtgtacatcaatgaggtgtgtgtgctgggccacacccatgctgatgtggtgaagctgttccagagcgtgcccatcggccagagcgtgaacctggtgctgtgccggggctaccccctgccctttgatcctgaagatcctgccaacagcatggtgccccccctggccatcatggagaggcctcctcctgtgatggtgaatggccgccacaactatgagacctacctggagtacatcagcaggaccagccagagcgtgcctgacatcacagacaggcctccccacagcctgcacagcatgcccacagatggccagctggatggcacctacccacctcctgtgcatgatgacaacgtgtccatggccagcagcggggccacccaggccgagctgatgaccctgaccatcgtgaagggggcccagggcttcggcttcaccatcgctgacagccccaccggccagagggtgaagcagatcctggacatccagggctgccccggcctgtgtgagggggacctgattgtggagatcaaccagcagaatgtgcagaacctgagccacacagaggtggtggacatcctgaaggactgccccatcggcagcgagaccagcctcatcatccaccggggcggcttcttcagcccctggaagacccccaagcccatcatggaccgctgggagaaccagggcagcccccagaccagcctgagcgccccagccatcccccagaacctgcccttccccccagccctgcacaggagcagcttcccagacagcacagaggcctttgaccccaggaagccagacccctatgagctgtatgagaagagccgggccatctatgagagccggcggccagactacaaggagctggatgtgcacctgcggaggatggagagcggcttcggcttccgcatcctgggcggagatgagcccggccagcccatcctgattggagctgtgattgccatgggcagcgctgacagagatggccgcctgcaccctggagatgagctggtgtatgtggatggcatccctgtggccggcaagacccaccgctacgtgattgacctgatgcaccacgccgccagaaatggccaggtgaacctgactgtgcggaggaaggtgctgtgtggcggggagccctgcccagaaaatggccgcagccctggctctgtgtccacccaccacagcagccccaggagtgactatgccacctacaccaacagcaaccacgccgcccccagcagcaatgccagccccccagagggctttgccagccacagcctgcagaccagtgatgtggtgatccacaggaaagaaaatgaaggatttggatttgtgatcatcagcagcctgaacagacctgagagcggcagcaccatcaccgtgccccacaagattggccgcatcattgatggcagccctgctgacagatgtgccaagctgaaggtgggggaccgcatcctggccgtgaatggccagagcatcatcaacatgcctcatgctgacatcgtgaagctgatcaaggatgctggcctgtctgtgaccctgcgcatcatcccccaggaggagctgaacagccccaccagcgcccccagcagcgagaagcagagccccatggcccagcagagccccctggcccagcagagccccctggcccagcccagccctgccacccccaacagccccatcgcccagcctgccccaccccagcccctgcagctgcagggccacgagaacagctacagaagtgaggtgaaggcccggcaggatgtgaagccagacatccggcagccccccttcacagactaccggcagccccccctggactaccggcagcccccaggaggagactaccagcagcccccacccctggactaccggcagccccccctgctggactaccggcagcacagcccagacacccggcagtaccccctgagtgactaccggcagccccaggactttgactacttcaccgtggacatggagaagggggccaagggcttcggcttcagcatccggggcggccgggagtacaagatggacctgtatgtgctgcggctggccgaggatggccctgccatcagaaatggaaggatgagggtgggggaccagatcatcgagatcaacggggagagcacccgggacatgacccacgcccgggccatcgagctgatcaagagcggcggcagaagagtgcggctgctgctgaagaggggcaccggccaggtgcctgaatatgatgagcccgccccctggagcagccctgctgctgctgcccctggcctgcctgaggtgggcgtgtccctggatgatggcctggcccccttcagccccagccacccagccccacccagcgaccccagccaccagatcagccctggccccacctgggacatcaagcgggagcatgatgtgaggaagcccaaggagctgagcgcctgtggccagaagaagcagaggctgggggagcagcgggagaggtctgccagcccccagagagctgcccggccccggctggaggaggcccctgggggccagggccggcctgaggccggccgcccagccagcgaggcccgggcccctggcctggccgctgctgatgctgctgatgctgcccgggccggcggcaaggaggcccccagggctgctgctggcagcgagctgtgcagaagagagggccctggagctgccccagcctttgctggccctgggggcggcggcagcggggccctggaggccgagggccgggccggggcccgggccggcccccggcccggcccccggcccccaggaggagccccagccaggaaggctgctgtggcccctggcccctggaaggtgcccggcagtgacaagctgcccagcgtgctgaagccaggggccagcgctgccagcaggtag

SEQ ID NO: 113455 - DNA, 6800 bp, Artificial Sequence
  derived and/or modified sequence
gggacagcacaacctcatccaagctctcctacctctgcccagccgtccctctcatcctccccattcctcgtccacactccatccaaagaagagggaaagcaccgaatagaggggggcgaaggcaaagtctgctgttcttccccctgggcccccttgctcctccatcctcattctctcaccaccagcccccctaaccccaaggagcccaggaactgaggcgactcgccccactgccatgtccaaaagcttgaaaaagaaaagccactggactagcaaagtccatgagagtgtcattggcaggaacccggagggccagctgggctttgaactgaaggggggcgccgagaatggacagttcccctacctgggggaggtgaagcccggcaaggtggcctatgagagcggcagcaaattggtgtcggaggagctgctgctggaggtgaacgagacccccgtggcggggctcaccatcagggacgtgctggccgtgatcaaacactgcaaggaccccctccggctcaagtgtgtcaagcaaggaggaattgttgataaagaccttcgtcactacctcaacttacgatttcaaaagggttctgtggaccatgagcttcagcaaatcattcgtgacaacctctacctccgcacggtgccatgcaccacaaggccacataaggagggtgaggtccctggagtggattatattttcatcactgttgaagattttatggaattggagaaaagtggtgctctcctagaaagtgggacttatgaagacaattactacggtaccccaaagccgccagcagaaccagcaccattattgttaaatgtaacagaccagatacttccaggagccactccaagtgctgaaggaaaacggaagaggaataaatcagtgagcaacatggagaaagccagtatagagcctcctgaggaggaagaggaagagaggcctgtggtcaatggaaatggagtagtagtaacaccagaatccagtgaacatgaagacaaaagtgcaggtgcctcaggggagatgccctcccagccttatcctgcaccagtgtacagtcagcctgaggagctgaaggagcagatggatgacacaaagccaactaaacctgaagacaatgaggaaccagacccattgcctgataactgggaaatggcctatacagagaagggcgaagtctacttcattgaccataacacaaagacaacatcatggctggatccacgacttgcgaaaaaggctaaacctccagaagagtgcaaagaaaatgagcttccatatggctgggaaaaaatcgatgatcccatttatggcacttattatgttgaccacataaatagaagaacacagtttgaaaatcctgtcctggaagcaaaaaggaagctacagcaacataacatgccccacacagaacttggaacaaagcccctgcaggccccaggtttccgagaaaaaccactcttcacccgggatgcatcccagttgaagggaacattcctcagcaccaccctaaaaaagagcaacatgggctttggatttaccatcattggtggagacgagcctgatgagtttctgcaggtgaaaagtgtgattccggatgggcctgcagcacaggatggaaaaatggaaacaggtgatgtcattgtctatattaatgaagtttgtgtccttggacacactcatgcagatgttgtcaaacttttccagtctgttcctattggtcagagtgtcaacctggtgttgtgtcgtggctaccctttgccctttgatcctgaagaccctgctaacagcatggtgccaccccttgcaataatggagaggccacctccagtgatggtcaatggaagacacaactatgaaacatatttggagtacatttctcggacctcacagtcagttccagatataacagatcggccgcctcattctctgcactccatgccaactgatggtcagctagacggcacgtatccaccgcccgtccatgatgacaatgtgtctatggcttcatctggggccacccaagctgaacttatgaccttaaccattgtgaaaggtgcccagggcttcggcttcactattgccgacagtcctacaggacagcgggtgaaacaaatacttgacattcagggatgccctggcctgtgtgaaggcgacctcattgttgagatcaaccagcagaatgtacagaacctgagccatacagaagtagtggatatacttaaggactgtcccattggaagtgaaacttctttgattatccatcgaggaggtttcttttctccatggaaaactccaaagcctataatggaccgatgggagaatcaaggcagtcctcaaacgagtttatctgctccggccataccgcagaacctgcccttcccacctgcccttcacaggagctcctttcctgactcaacagaggcctttgacccacggaagcctgatccatatgagctctacgagaaatctagggccatttatgaaagtaggcgtccagattataaggaattggatgttcatcttcggaggatggagtctggatttggcttcagaatcctcgggggagatgagcctggacagcctattttgattggagctgtcattgccatgggctcagccgacagagatggccgccttcacccaggagatgagcttgtgtatgttgatgggattccagtagccggcaaaacccaccgctatgtcatcgacctcatgcaccacgcagcccgcaatgggcaggtcaacctcactgtgagaagaaaggtgctatgtggaggggagccctgcccagagaacgggagaagtccaggctctgtatccacccaccacagctctccacgcagtgactacgcaacctacaccaacagcaaccacgctgcccccagtagcaatgcctctccccctgaaggcttcgcctcccacagcctgcagaccagtgatgtggtcattcaccgcaaagagaatgagggcttcggctttgtcatcatcagctccctgaacaggcctgagtctggatccactataactgtgccccataaaatcggacgcatcattgatgggagtcctgcagatcgctgtgcaaaactaaaagtgggagaccggatcctagcagtgaatggccagtctatcatcaacatgcctcacgctgacatcgtgaagctcatcaaggatgcaggtcttagtgtcacccttcgcatcattcctcaggaggagctcaacagccccacctcggcacccagctcagagaagcagagtcccatggcgcagcagagtcccctggcacagcagagtcccctggcccagccaagcccagccacccccaacagccccatcgcccagccagcaccacctcaaccacttcagctgcaaggacacgaaaatagttacaggtcggaagtgaaagcaaggcaagatgtgaaaccagacatccgacagcctccattcacagactacaggcagcccccgctggattacaggcaacccccaggaggggactaccagcagcccccacccttggactacaggcagcctcccctactggactacaggcagcactcccccgacaccaggcagtaccctctgtcggactacagacaaccccaggattttgattatttcactgtggacatggagaaaggagccaaaggatttggattcagcattcgtggaggaagggaatacaaaatggatttgtatgtgttgagactggcagaagatggaccagcaataaggaatgggaggatgagggtaggagatcaaatcattgaaatcaatggggaaagcacaagggacatgacacatgccagagcaatagaactcatcaaatctggaggaagacgagtgaggctgctgctcaagagaggcacgggacaggtcccagaatatgacgaacccgccccctggagttctcccgctgccgccgccccaggtctgccggaagtaggcgtctccctggacgacggcctcgctccattctctccatcacatccagccccaccctccgacccttcccaccagataagcccaggcccaacttgggatatcaaacgggaacacgacgttaggaaaccaaaggagctttcagcctgcggccagaagaagcagcgcctcggggagcagagggagcgctcggcgagtccgcagagggccgcgcggccgaggctcgaggaggcgcccggcggccaggggcggcccgaggccggcaggcccgcctcggaggccagggcgcccgggctcgcggcggcagacgcggcggacgcggcgcgggcgggcgggaaggaggcgccccgtgcggcggcgggctccgagctctgccggcgcgaaggcccgggggctgcgccggcgtttgccggcccgggcggcggcggcagcggcgcgctggaggccgagggcagggcgggtgcgcgcgcgggtccccggccgggcccgcgacccccggggggcgccccggcgcgcaaggccgccgtcgcgccggggccctggaaggtgccgggttctgacaagctgcccagcgtcctcaaacccggcgcctcggccgccagcagatgagccgcgcggccacggccaacccgcccgccccggcgcaggcagttcttcttaggttccgtctcacggcgttttaatttattttcactgtcacacgcatagatccacgaggcaccaaggcctgggagcatcgacgtgaagtcccacgtgtccggtgtgcttgggcggcatcgcatcaacgcgcagacctaaactgatcctaaagcccccggttcccttgtgggggctttggcagctatggaagaaccaaaataacgtgaagaacatcacagagagacagtgcagtgtagctttagtttaagaaaaaaaaatattcctccccactgcatgaaggacttggatgtcatccaaactttatatcaagaaacaggacaaagttaagagcaatcacaaactggaatatcgccttaaaaatcaaactgcacggagcaagctgaaactgagacaagattatatcttttaattgatctaaagcgttgtaaataaattgttctcgacatatctagacaggggttaaagggtttctttgacacattcggaaccgttcacccatgacatgtttccatggctcacccttggcatccatcctcggtgttagcagcagcgttccctgcctcctgcaggatgacttagaaatctagtgagtttcttggtgtgatgccatttttattgccctttctgtgatcaaatcatatttctgtacattttcagtggtagaaaaaaaaggttttaaaaattgtatcctagggaacagtttgccataagtcagaattttgcagtttagctcatagatcttaattggtttttctctaaaatatgaattttataattgaaggaccacaatttgtttaatcaagataggcaacgctgcagttcctttatgaagaggcttttctgtcgtcccaggctagcagagatggatagcttctttgtcagcaatgtgatttcacttattttattgtcttattttaaaccctgtctccatgacttcatttgcactttgacagagcagaggcagagtatttgtcttatatttctcagattataatattaaaaaattacaatcaatttattttcattaaagaacgtgagtctttttagcattcctttctgcttatccttctttccttaccctttgtccttttgtttccattagttttctttcgtcttgtattccttgccactttattttgttagcaacttctagatgtttatcttcatggatctatgattgacctcctagtaaaattctaagtcttgcctttcttccctgctgttttagcatttctttgtaaaatgttagcttcaattaattagccattggtacttactgtagctacacatattaaaaggcaaagtgtttctgaaggcaatttctttttaatatgcccgaatgaatgaggcttcatcctttccatattcttactctttacaggagttcaaatgcaaataagctccacctccctgcacttgtagtctaaaaagtaaaaggggcgatcaggtccatctcaaaggtcacacgtaatagcctccctgggctgatcattccctctccttgtaattgcagtatcctgagtagcagtttaattttcatcaaacatcggagtagtttagttgtttgacaggaggagaataaggctgaaagcctcaagtgaaggatcttgcagcttgtaaaagcaatttccaaaaatgaaacccattcatcgtaaacaaaagcacaaacacttgtagcagtttataatgcttttggtttaatctcaattagtctttctcccctggactagaaatccagtatagtttgccattaatttattgaatctggttttggacaatgcttctgtagtgtagctgcacgtcctggtactgtatcctctgactttattttccatgtattacaaaaggaaaaaaaaattgagattacactggcataaactctagtttgcacagttcacagctactacttgtgcagtaattgctttatgcggctgtaatccataacctgtgaagacagcacatcatctaaatcccattccaaataatatttgtgtagtgttagctgtgaatttaccctgtacagctgtatctctataaatataattccatgtattaatagtcacagaaagactgtaagtgagcaactatttttatgaaacgtaccactatggataaattaacttttacagaaatcttgtttactgtatgatattctaaaacactgtcaaataaaatatatatccaaaaa

SEQ ID NO: 113456 - DNA, 4326 bp, Artificial Sequence
  derived and/or modified sequence
atgagcaagagcctgaagaagaagagccactggaccagcaaggtgcatgagagtgtgatagggcgcaaccctgaaggccaactgggctttgagctcaaaggtggggcagaaaacggacagttcccgtatctgggcgaagtcaagccaggcaaggtagcttacgagagtggaagcaaacttgtgtctgaggaattgttgttagaagtcaatgagacaccagtggcaggcctcaccatcagggatgtactcgccgtgatcaagcattgcaaagacccattgcggttgaaatgtgtgaagcagggtggaatcgtggacaaggacctacgccactatcttaaccttagatttcaaaaggggtccgtagatcacgaactacagcagattattagagacaacttgtatctacggaccgtcccgtgtacaacccgccctcataaagagggagaagtgccgggcgtggactatatctttattacagttgaggattttatggaactcgagaagagcggcgcactcctggagtccggaacttacgaagacaattattacggcacacccaaacccccggccgaacccgctcctctgcttctgaatgtgacggatcagattttgccgggagcaacccctagcgccgagggcaagcgaaaaagaaacaaaagcgtgagcaacatggagaaggcttcaatcgagcctcctgaagaggaagaggaagagcggccggtcgtcaatggaaatggagtagtagttacaccagaatcgagcgagcacgaggataagtctgcgggagcctctggtgagatgccttcccaaccttatcccgctcccgtgtactcacagcccgaagagctcaaagagcagatggacgatactaagcctactaaacctgaggataatgaggaacccgatccgctgccagataactgggagatggcatatactgaaaagggcgaagtctacttcatcgaccataataccaagactacgtcttggctggatcccaggttggcaaagaaggctaaacccccagaagagtgcaaggaaaacgaactgccatatggctgggaaaaaattgacgaccccatatacggcacctattatgtcgatcacatcaacagacggacccagtttgaaaatcccgtgctggaggctaagaggaaactccagcagcataatatgcctcacaccgagctgggtactaaacccctgcaggcacccgggttccgagagaagcccttgttcaccagggatgcatctcaactcaagggcacatttctgagtaccacactgaagaagagcaacatgggcttcggcttcacaatcataggcggagacgaacctgatgagttcctccaggtgaaaagcgtgattccggacgggccggccgcacaggatggcaaaatggagacaggcgacgtgatcgtttacattaatgaggtatgcgttctggggcacacccacgcagacgtggtcaaattgttccaaagcgtgcctattggacaatctgtgaacctcgtgctatgcagggggtatcccctgccctttgaccctgaggacccagcaaatagcatggtccccccccttgccatcatggagcgcccacctccagtaatggttaatggacggcacaactacgagacttatctggagtacatttcccgtacatctcagtctgtgcccgacataactgaccggccaccacatagcctgcattccatgcccaccgacgggcaactggatggcacctatccgccccccgttcatgatgacaatgtgtctatggcatcttctggtgcaacacaggccgaattgatgaccctgactattgtgaaaggagctcaaggcttcggatttacaatcgccgactccccgaccgggcagcgagtgaaacagattcttgatattcagggatgcccgggtctgtgtgagggcgatctgatcgtggaaatcaaccagcagaatgttcagaatctgagccatacagaagtggtggacatcctgaaagattgtcccatcggatctgaaacttctttgattatccatcggggaggtttcttcagcccttggaaaacgcccaaaccaatcatggatcgctgggagaaccagggatcccctcagacttctttatctgccccagctatcccacagaatctgcctttccctcctgccctgcatcgatcctcatttcctgactctaccgaggcttttgatcctcgcaagcccgatccctacgaattgtacgaaaagtcaagggctatctacgagtcacgcagaccagattacaaggaattggatgtacacttacgaaggatggagtccggattcggcttccgaatattaggcggggacgaaccggggcaacctatcttaatcggtgcagtgatcgctatggggtccgcagatagagacggcagactccacccaggagatgagctcgtctatgtggatggcatacccgtagctggaaaaacgcaccgttacgttatagatttaatgcaccacgcagcccgcaatggtcaagtgaatctgactgtgcggagaaaagtattatgcggcggtgagccgtgtccggagaatggtcgtagccctggaagcgtttccactcaccactctagccccagatcagattatgcaacctacaccaattccaaccacgcagctccttctagtaatgcaagtcccccggagggctttgccagtcactcactgcagacaagcgacgtagtgatccatcggaaggagaacgagggatttggcttcgtcattataagctccttgaataggcccgagtccggaagcaccattactgtcccccataagatcgggagaataatcgacggcagtcccgctgacaggtgtgctaaacttaaggtgggtgaccgtatactggccgtgaatggacagtctattataaatatgccccacgctgatatcgtcaagttgattaaagatgctgggttaagcgtgacactccgcatcatccctcaagaggagctaaactcacccacaagcgcaccaagctcagagaaacaaagtccgatggcacagcaatctccgctcgctcagcagtccccactagcccagccttccccagctacacccaattcccccatagcgcagccagcacctccacagccccttcagctccaggggcacgagaacagctatagaagcgaggtgaaagccagacaggacgttaagcctgacattcgccagcctccattcaccgattaccgccaaccgcctctggactaccggcagccccccggtggagactatcagcagccacctcctctggactaccgccagccccctttactcgattatcggcaacactctccagatactcgacaataccccctctccgattataggcaaccccaggactttgattacttcactgtcgatatggagaaaggggccaagggttttggattttcaattagaggcggacgcgagtacaaaatggacctctacgtgctacgcctcgctgaggacggacccgctatccggaacggcaggatgcgggttggagatcaaattatcgaaatcaacggggagagtacgagggacatgacccacgcccgggcaatcgaattgatcaaatcaggcggccgtcgagtgaggctcctgctcaaacggggaactggtcaagtccccgaatatgatgaacctgccccctggtcctctccagccgcagcagctcccgggctgcccgaggtgggggtatctctggatgatgggctggcaccttttagcccaagccatcccgcaccaccttccgatccctcccaccagatttccccaggccccacttgggatatcaaaagagagcacgacgttaggaagcctaaggaactgtctgcttgtggtcagaagaagcaacgcctgggagaacaacgggaacgctcagcctctcctcagagagcagctcggccaaggctcgaagaagcccccggtggacaaggacgcccggaggctggcagaccagcctctgaggcgcgtgcccccggcttagctgctgcagacgccgcggatgccgctagggcaggagggaaagaagcaccccgggctgcagccggaagtgaactgtgccggcgggaagggccaggcgccgcacccgcctttgccggccccggcgggggcggctccggggctcttgaggcagagggcagagctggcgctcgggctggacctcgccctggcccacgtcccccgggtggagcaccagcgcggaaggcagcggtggccccagggccatggaaggtccctgggtctgacaagctccccagcgttttaaagccaggtgcatcagcagcctcacgttag

SEQ ID NO: 113457 - DNA, 4326 bp, Artificial Sequence
  derived and/or modified sequence
atgagcaagagcctgaaaaaaaagtcccactggaccagcaaggttcatgaatctgtgatcggccgaaacccggaaggtcagctgggctttgaattaaagggtggggctgaaaacgggcagtttccttatctcggcgaggtaaagccgggtaaagtggcctatgagtccggctctaagctggtgagtgaagaacttttgctggaggtgaacgaaacccccgtggcaggattgacaattagagatgtcctggctgttatcaagcattgcaaggatcctctgcgcctgaaatgtgtaaaacaggggggaatcgtggacaaagacctccgacattaccttaatctgcggtttcaaaaaggttccgtggaccatgagctgcagcagatcatcagagacaacctgtacctgagaacagtgccatgtacaactagaccccacaaagaaggggaagttcctggcgtggattatattttcatcaccgtggaggattttatggagctcgaaaagtcaggcgcattgctggagtccggaacgtacgaggataactattatggtacacctaaaccacctgcagagcccgctcctctgctattaaacgtcactgatcagattttgcccggagctactccttcagccgaaggcaaaagaaagcgcaataaaagcgtgagcaacatggaaaaagctagcatagagccccctgaggaagaagaggaagaacgtccagtggtgaatgggaatggagtcgttgtcaccccagaatccagcgagcacgaagacaaatcagccggagcaagtggagagatgcctagccagccgtaccctgccccagtgtactcccaacccgaagagctcaaagagcaaatggatgataccaaacctacaaagcctgaggataatgaggagcccgatcctctgcccgataattgggaaatggcatacacagaaaaaggagaggtgtacttcattgaccacaacactaagaccacgagctggctggatcccagactggccaagaaggcgaagccacctgaggaatgtaaggaaaatgaactgccctacggatgggagaaaattgacgaccccatttacggtacctattacgtagaccatattaaccgacgcacacagttcgaaaaccctgtgctggaggcgaagcgtaagttgcagcaacacaacatgcctcatactgagcttggaaccaagcccctgcaggctccgggatttcgggagaagcctctctttacaagggacgccagtcagctgaagggcacctttctttctaccacgttaaaaaagtccaatatgggctttggatttacaatcattgggggagacgagccggacgagtttctccaagttaagtctgtgatacctgatggaccagcagcgcaggatggcaaaatggagacgggcgatgttattgtatacataaacgaagtgtgtgtcctaggccacacacacgctgatgtagtgaagctatttcaaagcgtgcccatcggccagagcgtgaacctagtgctgtgcaggggctaccctcttcccttcgaccccgaagaccccgcaaatagtatggttcctcccttggccatcatggagcgcccacccccagtcatggtgaatgggagacacaattatgaaacttacctggaatacataagccggaccagtcagtcagtgccagatataacggataggccccctcattcccttcatagtatgccgacagatggacaactcgacgggacttatcctccacccgtccacgacgacaacgtgagcatggctagttctggcgctactcaggccgaactcatgaccctgactatcgttaaaggtgcacaggggtttggattcactatcgccgactctcctacaggtcagcgggtcaaacaaatcctggacatccaaggttgccctggcctctgcgagggggacctgattgtggagataaatcaacagaatgtccagaatttgtctcacaccgaagttgtggatattttgaaggactgtccaatcggatctgagaccagcctgattatacatcgaggagggttttttagcccatggaagaccccaaaaccgatcatggaccggtgggagaatcagggcagcccacagacatctctgtccgcaccagctatcccccaaaatctgccgtttcccccagcactacacagatctagctttcctgactcaaccgaagcgtttgatcccagaaagccagatccctacgaattatatgagaaatcgcgggctatatacgaaagtcgccgtccagattataaagagctggatgtccacctcagacgaatggaatcaggctttgggtttcgcatcttggggggagatgaacctggccagcctatcctgatcggcgcagtgatagctatggggtcagcagaccgagacggaaggctacatcccggagacgagttggtgtatgtggatggaataccagttgcaggcaagacccatagatatgtgatcgacctgatgcaccatgccgcacgcaacgggcaggtaaaccttactgtccgcagaaaggtcctgtgtggaggcgagccatgtccggagaatggtagatcacctggctccgtctctacacaccactcctcgcctagaagtgattacgccacatatacaaactctaaccacgctgctccaagcagcaacgcaagccctccagagggatttgcttcccacagcctccagacatcagatgtagtaatccatcgtaaggagaacgaaggcttcgggttcgttattatttcaagtctgaaccgtcccgaatctggctctaccatcaccgtccctcacaagatagggcgtattattgacggctcaccggcagaccgttgcgccaaactaaaggtcggagaccgaatcttagccgtcaacggccagtccattatcaacatgcctcacgcggacattgtgaagctaattaaagacgcgggactctcggttactcttaggattatccctcaggaggagttaaatagtcctacttccgccccttccagcgagaagcaatcccccatggctcagcagtctccccttgcacagcaatctccgttggcccagccgagcccggcaacacccaattccccaatcgctcagcctgctcccccacagcctctgcagctacaaggtcacgagaattcttatcggtccgaagttaaggctcggcaggatgtgaagcccgatattcgccagcccccatttacggactaccgtcagcccccactcgattaccgacagccacctggcggtgactatcaacagcctccaccactggattatagacagcctcctctactggactacaggcagcacagccctgatactcgacagtatccactgagtgactaccgtcagccccaggactttgactacttcaccgtggatatggaaaaaggtgcaaagggattcgggttctcaattcggggtggacgggagtacaagatggacttgtacgtgctccggctggctgaagacggtccagctatccggaacggcagaatgagggttggcgaccagattatagaaatcaacggcgaatctactcgggatatgacccacgccagagccatcgaactgattaagagcggagggcgtagagtccggcttcttctgaaacgaggtaccggacaagtgcctgagtacgacgagcctgcaccctggtcatctcctgcggcagccgctccaggattacccgaggttggagtgtccttagacgatggacttgcccctttctcacccagtcaccctgcccctccaagtgatccctctcatcagatctctcctgggccaacctgggatattaaacgtgaacatgatgttaggaaacccaaagaactctctgcctgtggtcaaaagaagcagaggcttggggaacagcgagagaggagcgcaagcccgcagagagcagcgagacctcgcctagaagaggcccctggaggtcaaggacgccctgaagcaggcaggcccgcatctgaagcgagagcccctggtctcgccgctgcagacgccgctgacgccgcaagagccggtggaaaagaagcacccagagctgccgctggctctgagctctgcagacgggaaggtcccggagcagccccagcctttgcgggacccggtggaggcggaagtggagcactcgaggctgagggacgtgccggtgctcgagccggacctagaccgggacccagaccccctggcggagcccctgctcgcaaagctgctgtagcccctgggccatggaaggtgcctggaagcgacaagcttccctccgttttgaagccaggcgctagcgctgccagtaggtag

SEQ ID NO: 113458 - DNA, 384 bp, Artificial Sequence
  derived and/or modified sequence
atgagtgacaatgaggataatttcgatggagacgatttcgatgatgttgaggaagacgagggccttgacgatcttgagaacgcagaagaagagggacaggagaacgtggagattcttcccagtggggagagaccccaagccaatcagaagcggattacaactccctacatgaccaagtacgaacgggccagggtactgggaacccgggctctacagattgcaatgtgtgcccccgtgatggttgaactagaaggcgaaaccgatccactgctgatagctatgaaggagctgaaggcgcggaaaatcccaataatcattcggcggtacctcccagatggcagctacgaggattggggagtagatgaactcataattaccgactag

SEQ ID NO: 113459 - DNA, 384 bp, Artificial Sequence
  derived and/or modified sequence
atgtctgacaatgaagacaactttgatggagatgactttgatgatgtggaggaggatgagggcctggatgacctggagaatgctgaggaggagggccaggagaatgtggagatcctgcccagcggggagcggccccaggccaaccagaagaggatcaccaccccctacatgaccaagtatgaaagagcccgggtgctgggcacccgggccctgcagatcgccatgtgtgcccctgtgatggtggagctggagggggagacagaccccctgctgattgccatgaaggagctgaaggccaggaagatccccatcatcatccgccgctacctgcctgatggcagctatgaggactggggcgtggatgagctgatcatcacagactag

SEQ ID NO: 113460 - DNA, 384 bp, Artificial Sequence
  derived and/or modified sequence
atgagcgacaacgaggacaacttcgacggcgacgacttcgacgacgtcgaagaggatgaaggcctggatgatcttgagaacgctgaggaagagggacaagagaacgtcgagattttaccctctggggagcgccctcaggccaatcagaagagaatcaccaccccttacatgacaaagtatgagcgcgctcgcgtgttaggtacccgggctctacagatcgcaatgtgtgcccctgtgatggtcgagcttgaaggggaaacagatccactgttaattgcaatgaaagaattgaaggcgcggaagatacccatcattattcgccggtacctgcccgacggatcctacgaggactggggtgttgatgagttgatcattacagattag

SEQ ID NO: 113461 - DNA, 2106 bp, Artificial Sequence
  derived and/or modified sequence
agtgatttcctctgggttacggcgcaggcgcaagataagctaggagccgcgcgagtcgtagtgtcgctgtttgcgggtctccgcgcgggaccggggcgcagcggggtcgctgaggcgagggtgtcatgtcagacaacgaggacaattttgatggcgacgactttgatgatgtggaggaggatgaagggctagatgacttggagaatgccgaagaggaaggccaggagaatgtcgagatcctcccctctggggagcgaccgcaggccaaccagaagcgaatcaccacaccatacatgaccaagtacgagcgagcccgcgtgctgggcacccgagcgctccagattgcgatgtgtgcccctgtgatggtggagctggagggggagacagatcctctgctcattgccatgaaggaactcaaggcccgaaagatccccatcatcattcgccgttacctgccagatgggagctatgaagactggggggtggacgagctcatcatcaccgactgagctggagtcatcttcctgcccttgccccatgcccaattttcattctcactttatatgtgtaaataataaaatattcaactttccaacccccttcccctctgcttatctgcaatgtcaccacctgttgcttccccgttaccgccatgctgcgtggagcatgcacctattccagtggccctgtgactgtcagctccttaagaagcaccaggggcccttagcccctttggatcccccacatccttccctccatctccctgttccccagagcaaaggctgctgcaggggagacacctcagctgccttccaagcagacagacaagtctttgtgcccagggagctggttgccacggaaacccccaatttcctttccagtggggactggctgcaggggcttctcccttctcaggagtatcacagagcaggtctcatcaagccacccattgtttcctaaggacctgcttcgagcctcttatcgtgggctcggatcccctttcaggagcagtgccccagcaggaagcgtgggggtgtgctgatctcccaccctccccaggcagagccctgctgggcaagtcagcagctggagcaaggaccgagcacctgcctacccctgcccccatggctctgtccccactcctcctcaggactctgcccacacgctgtcctctgtggcccacctctttggtgtgccacacccatgccttcttcctagcctctataagatatcctttccctcctatttggggctggtgatcccctgaggccttggggacatggtgctggggtggtggtgctcctgggttccaggtgttacattaagtcagagctggagttcccccttcctctgcctgaggttctaatgggtcctcttcctttctccaccctgcttacccaacctgaggtaagaccagtcacactggctcctccctcctagagggggtcagggggagggtgtatattgacatgaacagggatagagggtaaactggctccctgaatatgccagccttaacctccattccactgccagctccccttcaaagaggaggagctgggcttccctaacctctgcaggaggcagggcctccaggcctaggtgcagcctggccctgggatgggatgtggggagtgaatggtgaggatctgcattggtgggaggggtgtccgctgccctggagaagggttaattcagggagcagtggacttcacactcccatccaccctcctccaagcctgtggaatcctttaatcaagttgggtgctgaaatttcagctctgaaatgccgcctttgtgctggcatccaggcagccgccccagagtgcgggggtcactttctcggccccatttctctaaatggtctctttgttccctgctgggctgctcagtatcagatgtgattaaagggagatggggtttgggctggggaggaggggaattgggggttaacccttaggggatagagtgcaagggaaatgggacagaaggggtgtttttcctcctgtcttcctcttcccattctcctcttttggggagtcccctgctattcagctgtctgggcctggcttttgacttctcttgaataaaatgtcccggtcacca

SEQ ID NO: 113462 - DNA, 384 bp, Artificial Sequence
  derived and/or modified sequence
atgtccgacaatgaggacaattttgacggggatgattttgacgatgttgaagaagacgagggattagacgacctggaaaatgccgaggaggaagggcaggagaatgtggagatcctgccatctggagagagaccccaggcaaaccagaaaaggatcaccacgccttatatgactaagtatgagcgcgcaagggtactggggacaagggctctccaaatagcaatgtgcgcgcctgtcatggtggaactggagggagagacagatccattgcttatcgcaatgaaagagctgaaggcacgaaagatcccaattattattagacgctacttaccagatggatcctatgaggactggggtgtggacgagctcattatcactgattag

SEQ ID NO: 113463 - DNA, 384 bp, Artificial Sequence
  derived and/or modified sequence
atgagcgacaacgaggacaacttcgacggcgacgacttcgacgacgtggaggaggacgagggcctggacgacctggagaacgccgaggaggagggccaggagaacgtggagatcctgcccagcggcgagagaccccaggccaaccagaagagaatcaccaccccctacatgaccaagtacgagagagccagagtgctgggcaccagagccctgcagatcgccatgtgcgcccccgtgatggtggagctggagggcgagaccgaccccctgctgatcgccatgaaggagctgaaggccagaaagatccccatcatcatcagaagatacctgcccgacggcagctacgaggactggggcgtggacgagctgatcatcaccgactag

SEQ ID NO: 113464 - protein, 158 aa, Artificial Sequence
  derived and/or modified sequence
MSDNEDNFDGDDFDDVEEDEGLDDLENAEEEGQENVEILPSGERPQANQKRITTPYMTKYERARVLGTRALQIAMCAPVMVELEGETDPLLIAMKELNARSASEPPGEEPPWMDRGTRDEHLPSCPGCPAVASNTRCCPPAACLPGISLSRRRRLREE

SEQ ID NO: 113465 - DNA, 477 bp, Artificial Sequence
  derived and/or modified sequence
atgtctgataatgaggacaatttcgacggcgatgatttcgatgacgtggaggaggatgagggcttagacgatctcgaaaacgcggaagaagaggggcaggaaaacgtggaaattcttccctccggggaacgacctcaggccaaccagaaacgtatcacaacaccatatatgacaaagtatgagagggctagggtattgggcactagagcactccagatcgcaatgtgcgcaccagtgatggttgaacttgagggagagaccgatcccctcctgatcgctatgaaagagttgaacgcacggtccgctagtgagccgccaggtgaggaaccaccatggatggacagggggaccagggacgagcatttgccgagctgccctggttgtcctgcggtcgcatctaacactcgctgctgtccaccggccgcgtgtctgccaggaatctctctttcccgcaggcgccggttgagagaggaatag

SEQ ID NO: 113466 - DNA, 477 bp, Artificial Sequence
  derived and/or modified sequence
atgtctgacaatgaagacaactttgatggagatgactttgatgatgtggaggaggatgagggcctggatgacctggagaatgctgaggaggagggccaggagaatgtggagatcctgcccagcggggagcggccccaggccaaccagaagaggatcaccaccccctacatgaccaagtatgaaagagcccgggtgctgggcacccgggccctgcagatcgccatgtgtgcccctgtgatggtggagctggagggggagacagaccccctgctgattgccatgaaggagctgaatgcccggagcgccagcgagcccccaggagaggagcccccctggatggaccggggcaccagagatgagcacctgcccagctgccccggctgcccagctgtggccagcaacacccgctgctgccccccagctgcctgcctgcccggcatcagcctgagcagaagaagaaggctgcgggaggagtag

SEQ ID NO: 113467 - DNA, 477 bp, Artificial Sequence
  derived and/or modified sequence
atgagcgacaacgaggacaacttcgacggcgacgacttcgacgacgttgaggaagatgagggcctggatgatttagagaatgcagaagaagaaggacaggagaacgtggaaatcttgcctagtggagaacgacctcaggctaatcaaaagcgtatcactacaccctatatgacgaagtatgagagagctagagtgcttggcacacgcgccctccaaatagccatgtgcgcacctgtcatggtcgagttagagggcgagacggacccgctgcttattgccatgaaggagctgaacgcacgctctgcctccgaaccccctggcgaagagccgccatggatggacagaggtacacgagatgagcacctgcccagctgtcccggttgtcctgccgtggcttccaacacccgatgttgtcccccagccgcctgtcttccgggtatctcgctgtccaggcgccgccgcctacgagaagagtag

SEQ ID NO: 113468 - DNA, 582 bp, Artificial Sequence
  derived and/or modified sequence
ataagctaggagccgcgcgagtcgtagtgtcgctgtttgcgggtctccgcgcgggaccggggcgcagcggggtcgctgaggcgagggtgtcatgtcagacaacgaggacaattttgatggcgacgactttgatgatgtggaggaggatgaagggctagatgacttggagaatgccgaagaggaaggccaggagaatgtcgagatcctcccctctggggagcgaccgcaggccaaccagaagcgaatcaccacaccatacatgaccaagtacgagcgagcccgcgtgctgggcacccgagcgctccagattgcgatgtgtgcccctgtgatggtggagctggagggggagacagatcctctgctcattgccatgaaggaactcaacgcccgctcggcctcagaaccgcccggagaggagccgccctggatggacagagggacgagggacgagcatctgccgtcgtgtcccggctgccctgcagtcgcctccaacacccgctgctgcccgcccgctgcctgcctgcctggcatctctctctcccggaggcggcggctcagagaggagtgactcgcctgaagccc

SEQ ID NO: 113469 - DNA, 477 bp, Artificial Sequence
  derived and/or modified sequence
atgagtgacaatgaggacaactttgacggagatgacttcgacgacgtcgaagaagacgagggactggacgatctcgagaacgccgaggaggagggccaggagaatgttgagattcttccttccggagaacgccctcaagccaatcagaagaggataacaacaccttatatgacgaagtacgagagagctagagtattgggcactcgcgctctccagattgctatgtgcgccccagtgatggtcgaactggagggggagaccgaccccctgctaattgctatgaaagagctcaatgctagaagcgcctcagagcctcccggagaggagccaccctggatggacaggggaaccagggacgaacacctgccatcatgcccaggatgtcctgcagtggcctccaacactaggtgttgccccccagccgcatgcctgccaggtatttcactgtcaaggcggcgacggcttcgggaagagtag

SEQ ID NO: 113470 - DNA, 477 bp, Artificial Sequence
  derived and/or modified sequence
atgagcgacaacgaggacaacttcgacggcgacgacttcgacgacgtggaggaggacgagggcctggacgacctggagaacgccgaggaggagggccaggagaacgtggagatcctgcccagcggcgagagaccccaggccaaccagaagagaatcaccaccccctacatgaccaagtacgagagagccagagtgctgggcaccagagccctgcagatcgccatgtgcgcccccgtgatggtggagctggagggcgagaccgaccccctgctgatcgccatgaaggagctgaacgccagaagcgccagcgagccccccggcgaggagcccccctggatggacagaggcaccagagacgagcacctgcccagctgccccggctgccccgccgtggccagcaacaccagatgctgcccccccgccgcctgcctgcccggcatcagcctgagcagaagaagaagactgagagaggagtag

SEQ ID NO: 113471 - DNA, 381 bp, Artificial Sequence
  derived and/or modified sequence
atgagtgacaacgaggataacttcgacggtgatgactttgacgatgtggaggaggatgagggccttgacgacctggagaatgcggaagaggaagggcaagaaaacgttgaaatacttcctagcggcgagaggcctcaagccaatcagaagcgcatcactaccccttatatgacaaagtatgaacgggctagagtcctgggcacaagagccctacagatcgccatgtgcgctcctgtgatggttgagctcgaaggggagaccgatcccctgctgatcgccatgaaggagctcaagctcctgtggggccttgagtacaccgtgctgcggccctcctatgccctcgcccattcactgggcagcttcagcatttcatctcggtag

SEQ ID NO: 113472 - DNA, 381 bp, Artificial Sequence
  derived and/or modified sequence
atgtctgacaatgaagacaactttgatggagatgactttgatgatgtggaggaggatgagggcctggatgacctggagaatgctgaggaggagggccaggagaatgtggagatcctgcccagcggggagcggccccaggccaaccagaagaggatcaccaccccctacatgaccaagtatgaaagagcccgggtgctgggcacccgggccctgcagatcgccatgtgtgcccctgtgatggtggagctggagggggagacagaccccctgctgattgccatgaaggagctgaagctgctgtggggcctggagtacacagtgctgcggcccagctatgccctggcccacagcctgggcagcttcagcatcagcagcaggtag

SEQ ID NO: 113473 - DNA, 381 bp, Artificial Sequence
  derived and/or modified sequence
atgagcgacaacgaggacaacttcgacggcgacgacttcgacgacgtggaagaggacgaagggctggatgatttggagaacgcagaagaggaaggccaggaaaatgtggaaattcttccttcaggcgagaggcctcaagccaaccaaaagcgcattacgacgccatatatgactaaatacgagcgagccagagtgctgggcaccagagccctgcagattgcgatgtgcgcacctgtgatggtcgagctcgagggagaaacggacccgctgctgattgccatgaaagaactgaaactcttgtgggggctcgagtatacagttctccggccttcctatgctcttgctcattcgctcggctccttctccatctccagccgctag

SEQ ID NO: 113474 - DNA, 560 bp, Artificial Sequence
  derived and/or modified sequence
gcgcgagtcgtagtgtcgctgtttgcgggtctccgcgcgggaccggggcgcagcggggtcgctgaggcgagggtgtcatgtcagacaacgaggacaattttgatggcgacgactttgatgatgtggaggaggatgaagggctagatgacttggagaatgccgaagaggaaggccaggagaatgtcgagatcctcccctctggggagcgaccgcaggccaaccagaagcgaatcaccacaccatacatgaccaagtacgagcgagcccgcgtgctgggcacccgagcgctccagattgcgatgtgtgcccctgtgatggtggagctggagggggagacagatcctctgctcattgccatgaaggaactcaaacttctctgggggctggaatacacagtgctgagaccctcctacgcactggcccacagcctaggctctttcagcatctcctcccgctgacttctcccgacagtcctgctgggtggatatcatcaccccattgtacagatgcataaactgagcccaggttgctgatggtctcacccgagctgaacacaggat

SEQ ID NO: 113475 - DNA, 381 bp, Artificial Sequence
  derived and/or modified sequence
atgagcgacaatgaggacaacttcgatggggacgattttgacgacgttgaagaggacgagggcctggacgatcttgaaaatgcagaggaagagggccaagaaaacgtagagatcctgcccagcggagagaggccacaggctaatcagaaaagaatcaccactccctacatgacgaaatacgagcgcgctcgggtgctggggactagagcactgcaaattgctatgtgtgcccctgttatggtagaactcgagggtgagactgaccctctgctgatagcaatgaaagagctgaaactgctctggggacttgaatacaccgtgctgaggcccagttatgctctagcccattctctcggcagcttttcaataagctcccggtag

SEQ ID NO: 113476 - DNA, 381 bp, Artificial Sequence
  derived and/or modified sequence
atgagcgacaacgaggacaacttcgacggcgacgacttcgacgacgtggaggaggacgagggcctggacgacctggagaacgccgaggaggagggccaggagaacgtggagatcctgcccagcggcgagagaccccaggccaaccagaagagaatcaccaccccctacatgaccaagtacgagagagccagagtgctgggcaccagagccctgcagatcgccatgtgcgcccccgtgatggtggagctggagggcgagaccgaccccctgctgatcgccatgaaggagctgaagctgctgtggggcctggagtacaccgtgctgagacccagctacgccctggcccacagcctgggcagcttcagcatcagcagcagatag

SEQ ID NO: 113477 - protein, 440 aa, Artificial Sequence
  derived and/or modified sequence
MIIPSLEELDSLKYSDLQNLAKSLGLRANLRATKLLKALKGYIKHEARKGNENQDESQTSASSCDETEIQISNQEEAERQPLGHVTKTRRRCKTVRVDPDSQNHSEIKISNPTEFQNHEKQESQDLRATAKVPSPPDEHQEAENAVSSGNRDSKVPSEGKKSLYTDESSKPGKNKRTAITTPNFKKLHEAHFKEMESIDQYIERKKKHFEEHNSMNELKQQPINKGGVRTPVPPRGRLSVASTPISQRRSQGRSCGPASQSTLGLKGSLKRSAISAAKTGVRFSAATKDNEHKRSLTKTPARKSAHVTVSGGTPKGEAVLGTHKLKTITGNSAAVITPFKLTTEATQTPVSNKKPVFDLKASLSRPLNYEPHKGKLKPWGQSKENNYLNQHVNRINFYKKTYKQPHLQTKEEQRKKREQERKEKKAKVLGMRRGLILAED

SEQ ID NO: 113478 - DNA, 1323 bp, Artificial Sequence
  derived and/or modified sequence
atgataattccaagcctggaggagctcgacagcttgaagtactccgaccttcagaaccttgctaaatcgctgggcctgagggctaacttgagagccacaaagcttctgaaggcacttaagggatatattaagcacgaggcaagaaaaggaaacgaaaaccaggacgagagtcagacatccgcgtctagttgcgatgagacagagatccagatcagcaatcaagaggaagctgagaggcaaccattaggccacgtgacaaaaacaagacgtcggtgcaagaccgtaagagtggatccagacagccagaatcactcagaaatcaaaatatccaaccctacggaattccaaaaccacgagaagcaggaatcccaggatctccgtgctactgcaaaagttccatctccaccagacgaacatcaggaggcggagaatgcggtctcctctggaaaccgggattctaaggtcccatctgagggcaaaaagtcgttatacacagatgagagttctaaaccagggaagaataaacgcacggccatcaccacccccaacttcaagaaactgcacgaagcacacttcaaagaaatggaatccattgatcagtacattgaaaggaagaagaaacactttgaagaacacaacagcatgaacgagctaaagcaacagcctataaataaaggaggcgtacgaacaccggttccgccacgagggagactgtcagtggccagcaccccaatttcacagcgccggagccagggccgcagctgcggtcccgcatcccaatccactttaggattaaaaggctctctgaagcgatccgcaatctccgctgcaaagacaggagtgcgcttttctgcggccaccaaggacaatgagcataagaggtcccttaccaagacacctgcccgcaaaagcgcgcatgtgactgtgagtggcgggacgcctaagggtgaggcagtgctgggaacccataaacttaagactatcaccggcaacagtgccgccgtgatcacgccattcaaacttaccacagaagctactcagacgccagtgtccaataaaaaacctgtcttcgatttgaaggccagtctgtccaggcctctaaattatgaacctcataaagggaagctcaagccgtggggacagagtaaggagaataactatctgaaccaacacgtgaaccggatcaatttttacaagaagacctacaaacagccacatctgcaaaccaaggaagaacaacgaaagaagagagagcaggaacggaaagaaaaaaaagcgaaagtcctggggatgcggcgcggactgatcctggctgaggattag

SEQ ID NO: 113479 - DNA, 1323 bp, Artificial Sequence
  derived and/or modified sequence
atgatcatccccagcctggaggagctggacagcctgaagtacagcgacctgcagaacctggccaagagcctgggcctgcgggccaacctgcgggccaccaagctgctgaaggccctgaagggctacatcaagcatgaggccaggaaaggaaatgaaaaccaggatgagagccagaccagcgccagcagctgtgatgaaacagagatccagatcagcaaccaggaggaggccgagcggcagcccctgggccacgtgaccaagacccggcggcgctgcaagacagtgcgggtggaccctgacagccagaaccacagcgagatcaagatcagcaaccccacagagttccagaaccacgagaagcaggagagccaggacctgcgggccacagccaaggtgcccagccccccagatgagcaccaggaggctgaaaatgctgtgagcagcggcaacagagacagcaaggtgcccagcgagggcaagaagagcctgtacacagatgagagcagcaagccaggcaagaacaagaggacagccatcaccacccccaacttcaagaagctgcacgaggcccacttcaaggagatggagagcattgaccagtacatcgagaggaagaagaagcactttgaggagcacaacagcatgaatgagctgaagcagcagcccatcaacaagggcggcgtgaggacccctgtgcccccccggggccgcctgtctgtggccagcacccccatcagccagaggaggagccagggccgcagctgtggccctgccagccagagcaccctgggcctgaagggcagcctgaagaggtctgccatctctgctgccaagacaggagtgcgcttctctgctgccaccaaggacaatgagcacaagaggagcctgaccaagaccccagccaggaagagcgcccacgtgacagtgtctgggggcacccccaagggggaggccgtgctgggcacccacaagctgaagaccatcactggaaacagcgctgctgtgatcacccccttcaagctgaccacagaggccacccagacccctgtgagcaacaagaagcctgtgtttgacctgaaggccagcctgagccggcccctgaactatgagccccacaagggcaagctgaagccctggggccagagcaaggagaacaactacctgaaccagcacgtgaaccgcatcaacttctacaagaagacctacaagcagccccacctgcagaccaaggaggagcagaggaagaagcgggagcaggagaggaaggagaagaaggccaaggtgctgggcatgaggcggggcctcatcctggctgaagattag

SEQ ID NO: 113480 - DNA, 1323 bp, Artificial Sequence
  derived and/or modified sequence
atgatcatccccagcctggaggagctggacagcctgaagtacagcgatctccagaatctggctaaatccctcggtttaagagctaacctgagagcaactaaactgttaaaagccctcaagggctatatcaagcacgaggctcgcaaggggaatgaaaaccaggatgagtctcagacttccgcaagctcctgcgatgagacagagatccaaatctcaaatcaggaggaagcggagcggcagccccttggacatgtgacaaaaactaggaggaggtgcaagaccgtccgtgtggacccggattcccagaatcactccgagatcaagatctcaaaccctaccgagtttcagaatcatgaaaaacaggaaagtcaggaccttagagcgaccgctaaggttccttcccccccagacgaacaccaggaggctgagaacgccgtgagcagcgggaatcgggacagcaaggttcccagtgaagggaagaaatctctgtacacggatgaatcatctaagcctggtaaaaataagaggacagctattacgaccccgaactttaaaaagctgcatgaagcacatttcaaggaaatggagtcaatcgaccagtatattgagagaaagaaaaagcatttcgaagagcataattctatgaatgagcttaaacagcaacccattaacaagggaggggtgagaaccccagtcccaccgcgggggcgcctgtccgtggcttctacacccatctctcagcgaagatcccaggggaggtcctgtggtcctgcatctcagagtacactcggactgaagggtagcttgaaacgatctgctatttctgcagccaagactggggttaggttttcagcagcgacaaaagacaatgagcacaagagaagcctgactaagacaccggcccggaagtcagcccacgttacggtaagcggcggcacacccaagggagaggccgtgctgggtacacacaagctgaagaccataacaggcaattccgcggcggtcataaccccatttaagcttacaacagaagcaacccagactcccgtgtctaacaaaaagcccgtcttcgatctgaaggcaagtctctcccgcccactgaactatgaaccccacaaggggaagttaaagccctgggggcagagcaaggaaaacaactacctgaatcagcacgttaacaggattaacttctataagaagacttataaacagccccaccttcagactaaagaagaacagcgaaagaagcgcgaacaggagcggaaggagaagaaagcaaaggtcctcgggatgcgccgtgggctgattctggcagaagattag

SEQ ID NO: 113481 - DNA, 2232 bp, Artificial Sequence
  derived and/or modified sequence
gtttggtgatccatcttccgagtatcgccgggatttcgaatcgcgatgatcatcccctctctagaggagctggactccctcaagtacagtgacctgcagaacttagccaagagtctgggtctccgggccaacctgagggcaaccaagttgttaaaagccttgaaaggctacattaaacatgaggcaagaaaaggaaatgagaatcaggatgaaagtcaaacttctgcatcctcttgtgatgagactgagatacagatcagcaaccaggaagaagctgagagacagccacttggccatgtcaccaaaacaaggagaaggtgcaagactgtccgtgtggaccctgactcacagaatcattcagagataaaaataagtaatcccactgaattccagaatcatgaaaagcaggaaagccaggatctcagagctactgcaaaagttccttctccaccagacgagcaccaagaagctgagaatgctgtttcctcaggtaacagagattcaaaggtaccttcagaaggaaagaaatctctctacacagatgagtcatccaaacctggaaaaaataaaagaactgcaatcactactccaaactttaagaagcttcatgaagctcattttaaggaaatggagtccattgatcaatatattgagagaaaaaagaaacattttgaagaacacaattccatgaatgaactgaagcagcagcccatcaataagggaggggtcaggactccagtacctccaagaggaagactctctgtggcttctactcccatcagccaacgacgctcgcaaggccggtcttgtggccctgcaagtcagagtaccttgggtctgaaggggtcactcaagcgctctgctatctctgcagctaaaacgggtgtcaggttttcagctgctactaaagataatgagcataagcgttcactgaccaagactccagccagaaagtctgcacatgtgaccgtgtctgggggcaccccaaaaggcgaggctgtgcttgggacacacaaattaaagaccatcacggggaattctgctgctgttattaccccattcaagttgacaactgaggcaacgcagactccagtctccaataagaaaccagtgtttgatcttaaagcaagtttgtctcgtcccctcaactatgaaccacacaaaggaaagctaaaaccatgggggcaatctaaagaaaataattatctaaatcaacatgtcaacagaattaacttctacaagaaaacttacaaacaaccccatctccagacaaaggaagagcaacggaagaaacgcgagcaagaacgaaaggagaagaaagcaaaggttttgggaatgcgaaggggcctcattttggctgaagattaataattttttaacatcttgtaaatattcctgtattctcaacttttttccttttgtaaattttttttttttgctgtcatccccactttagtcacgagatctttttctgctaactgttcatagtctgtgtagtgtccatgggttcttcatgtgctatgatctctgaaaagacgttatcaccttaaagctcaaattctttgggatggtttttacttaagtccattaacaattcaggtttctaacgagacccatcctaaaattctgtttctagatttttaatgtcaagttcccaagttccccctgctggttctaatattaacagaactgcagtcttctgctagccaatagcatttacctgatggcagctagttatgcaagcttcaggagaatttgaacaataacaagaatagggtaagctgggatagaaaggccacctcttcactctctatagaatatagtaacctttatgaaacggggccatatagtttggttatgacatcaatattttacctaggtgaaattgtttaggcttatgtaccttcgttcaaatatcctcatgtaattgccatctgtcactcactatattcacaaaaataaaactctacaactcattctaacattgcttacttaaaagctacatagccctatcgaaatgcgaggattaatgctttaatgcttttagagacagggtctcactgtgttgcccaggctggtctcaaactccaccaaatgtacttcttattcattttatggaaaagactaggctttgcttagtatcatgtccatgtttccttcacctcagtggagcttctgagttttatactgctcaagatcgtcataaataaaattttttctcattgtcataga

SEQ ID NO: 113482 - DNA, 1323 bp, Artificial Sequence
  derived and/or modified sequence
atgatcattccttccctggaggagctggacagccttaagtactccgacctccaaaatctggcgaagtcactggggctccgggctaatctgagagctaccaaactgctaaaggctcttaagggctacatcaagcacgaggcacggaaagggaatgaaaatcaagatgaatcgcagacttccgccagttcctgcgacgagacagaaattcagatttccaaccaagaagaggccgagagacaacctctgggccatgttaccaaaactcgcagacgttgtaagacagttcgtgtggaccctgattctcagaatcactcggaaattaagattagcaaccccacagagttccagaaccacgagaaacaagaaagtcaagatctgcgggctactgccaaagtgcctagccccccagatgagcaccaggaggctgaaaacgccgtgagctccggaaatcgggattctaaggtgccatccgagggaaagaagtctctttatacagacgagtcttccaagccaggcaaaaataagcgaacagccatcacgacacccaactttaaaaagctgcacgaggctcactttaaagaaatggagtctatcgatcagtacatcgagcgcaaaaaaaagcatttcgaagagcacaactcaatgaacgaactgaaacagcaacctatcaacaaggggggagtgcggacacccgttccaccaaggggccgactgtcggtggcctctacacccatttctcagcggcgttcccaaggaaggtcatgtggcccagcatcacaatcgacactgggtctgaagggctcgctgaaacgctcagcaatatctgcggctaagacaggtgtgcggttctcggctgccaccaaggacaacgaacacaaaaggtctctcacaaaaaccccggctaggaagtccgcgcacgtgaccgtttctggcggtacccctaagggtgaggctgtcctcgggacccataagctgaagacaattaccggtaactccgccgcagttataactccatttaaactgacaaccgaggctactcagacccctgtgagtaacaagaaaccagtcttcgatttgaaagcatcgctgagccgtcctctgaattatgagccccacaagggaaagttgaaaccctgggggcagagtaaagagaacaactaccttaatcagcacgtgaacaggatcaacttttataaaaaaacttacaaacagcctcatctgcaaaccaaggaggagcaaagaaagaaacgggaacaggagcggaaggagaagaaggcgaaggtattggggatgagaaggggactaatcttggcagaagactag

SEQ ID NO: 113483 - DNA, 1323 bp, Artificial Sequence
  derived and/or modified sequence
atgatcatccccagcctggaggagctggacagcctgaagtacagcgacctgcagaacctggccaagagcctgggcctgagagccaacctgagagccaccaagctgctgaaggccctgaagggctacatcaagcacgaggccagaaagggcaacgagaaccaggacgagagccagaccagcgccagcagctgcgacgagaccgagatccagatcagcaaccaggaggaggccgagagacagcccctgggccacgtgaccaagaccagaagaagatgcaagaccgtgagagtggaccccgacagccagaaccacagcgagatcaagatcagcaaccccaccgagttccagaaccacgagaagcaggagagccaggacctgagagccaccgccaaggtgcccagcccccccgacgagcaccaggaggccgagaacgccgtgagcagcggcaacagagacagcaaggtgcccagcgagggcaagaagagcctgtacaccgacgagagcagcaagcccggcaagaacaagagaaccgccatcaccacccccaacttcaagaagctgcacgaggcccacttcaaggagatggagagcatcgaccagtacatcgagagaaagaagaagcacttcgaggagcacaacagcatgaacgagctgaagcagcagcccatcaacaagggcggcgtgagaacccccgtgccccccagaggcagactgagcgtggccagcacccccatcagccagagaagaagccagggcagaagctgcggccccgccagccagagcaccctgggcctgaagggcagcctgaagagaagcgccatcagcgccgccaagaccggcgtgagattcagcgccgccaccaaggacaacgagcacaagagaagcctgaccaagacccccgccagaaagagcgcccacgtgaccgtgagcggcggcacccccaagggcgaggccgtgctgggcacccacaagctgaagaccatcaccggcaacagcgccgccgtgatcacccccttcaagctgaccaccgaggccacccagacccccgtgagcaacaagaagcccgtgttcgacctgaaggccagcctgagcagacccctgaactacgagccccacaagggcaagctgaagccctggggccagagcaaggagaacaactacctgaaccagcacgtgaacagaatcaacttctacaagaagacctacaagcagccccacctgcagaccaaggaggagcagagaaagaagagagagcaggagagaaaggagaagaaggccaaggtgctgggcatgagaagaggcctgatcctggccgaggactag

SEQ ID NO: 113484 - protein, 886 aa, Artificial Sequence
  derived and/or modified sequence
MHDAFEPVPILEKLPLQIDCLAAWEEWLLVGTKQGHLLLYRIRKDVVPADVASPESGSCNRFEVTLEKSNKNFSKKIQQIHVVSQFKILVSLLENNIYVHDLLTFQQITTVSKAKGASLFTCDLQHTETGEEVLRMCVAVKKKLQLYFWKDREFHELQGDFSVPDVPKSMAWCENSICVGFKRDYYLIRVDGKGSIKELFPTGKQLEPLVAPLADGKVAVGQDDLTVVLNEEGICTQKCALNWTDIPVAMEHQPPYIIAVLPRYVEIRTFEPRLLVQSIELQRPRFITSGGSNIIYVASNHFVWRLIPVPMATQIQQLLQDKQFELALQLAEMKDDSDSEKQQQIHHIKNLYAFNLFCQKRFDESMQVFAKLGTDPTHVMGLYPDLLPTDYRKQLQYPNPLPVLSGAELEKAHLALIDYLTQKRSQLVKKLNDSDHQSSTSPLMEGTPTIKSKKKLLQIIDTTLLKCYLHTNVALVAPLLRLENNHCHIEESEHVLKKAHKYSELIILYEKKGLHEKALQVLVDQSKKANSPLKGHERTVQYLQHLGTENLHLIFSYSVWVLRDFPEDGLKIFTEDLPEVESLPRDRVLGFLIENFKGLAIPYLEHIIHVWEETGSRFHNCLIQLYCEKVQGLMKEYLLSFPAGKTPVPAGEEEGELGEYRQKLLMFLEISSYYDPGRLICDFPFDGLLEERALLLGRMGKHEQALFIYVHILKDTRMAEEYCHKHYDRNKDGNKDVYLSLLRMYLSPPSIHCLGPIKLELLEPKANLQAALQVLELHHSKLDTTKALNLLPANTQINDIRIFLEKVLEENAQKKRFNQVLKNLLHAEFLRVQEERILHQQVKCIITEEKVCMVCKKKIGNSAFARYPNGVVVHYFCSKEVNPADT

SEQ ID NO: 113485 - DNA, 2661 bp, Artificial Sequence
  derived and/or modified sequence
atgcacgacgccttcgagcccgtgcccatcctggagaagctgcccctgcagatcgactgcctggccgcctgggaggagtggctgctggtgggcaccaagcagggccacctgctgctgtacagaatcagaaaggacgtggtgcccgccgacgtggccagccccgagagcggcagctgcaacagattcgaggtgaccctggagaagagcaacaagaacttcagcaagaagatccagcagatccacgtggtgagccagttcaagatcctggtgagcctgctggagaacaacatctacgtgcacgacctgctgaccttccagcagatcaccaccgtgagcaaggccaagggcgccagcctgttcacctgcgacctgcagcacaccgagaccggcgaggaggtgctgagaatgtgcgtggccgtgaagaagaagctgcagctgtacttctggaaggacagagagttccacgagctgcagggcgacttcagcgtgcccgacgtgcccaagagcatggcctggtgcgagaacagcatctgcgtgggcttcaagagagactactacctgatcagagtggacggcaagggcagcatcaaggagctgttccccaccggcaagcagctggagcccctggtggcccccctggccgacggcaaggtggccgtgggccaggacgacctgaccgtggtgctgaacgaggagggcatctgcacccagaagtgcgccctgaactggaccgacatccccgtggccatggagcaccagcccccctacatcatcgccgtgctgcccagatacgtggagatcagaaccttcgagcccagactgctggtgcagagcatcgagctgcagagacccagattcatcaccagcggcggcagcaacatcatctacgtggccagcaaccacttcgtgtggagactgatccccgtgcccatggccacccagatccagcagctgctgcaggacaagcagttcgagctggccctgcagctggccgagatgaaggacgacagcgacagcgagaagcagcagcagatccaccacatcaagaacctgtacgccttcaacctgttctgccagaagagattcgacgagagcatgcaggtgttcgccaagctgggcaccgaccccacccacgtgatgggcctgtaccccgacctgctgcccaccgactacagaaagcagctgcagtaccccaaccccctgcccgtgctgagcggcgccgagctggagaaggcccacctggccctgatcgactacctgacccagaagagaagccagctggtgaagaagctgaacgacagcgaccaccagagcagcaccagccccctgatggagggcacccccaccatcaagagcaagaagaagctgctgcagatcatcgacaccaccctgctgaagtgctacctgcacaccaacgtggccctggtggcccccctgctgagactggagaacaaccactgccacatcgaggagagcgagcacgtgctgaagaaggcccacaagtacagcgagctgatcatcctgtacgagaagaagggcctgcacgagaaggccctgcaggtgctggtggaccagagcaagaaggccaacagccccctgaagggccacgagagaaccgtgcagtacctgcagcacctgggcaccgagaacctgcacctgatcttcagctacagcgtgtgggtgctgagagacttccccgaggacggcctgaagatcttcaccgaggacctgcccgaggtggagagcctgcccagagacagagtgctgggcttcctgatcgagaacttcaagggcctggccatcccctacctggagcacatcatccacgtgtgggaggagaccggcagcagattccacaactgcctgatccagctgtactgcgagaaggtgcagggcctgatgaaggagtacctgctgagcttccccgccggcaagacccccgtgcccgccggcgaggaggagggcgagctgggcgagtacagacagaagctgctgatgttcctggagatcagcagctactacgaccccggcagactgatctgcgacttccccttcgacggcctgctggaggagagagccctgctgctgggcagaatgggcaagcacgagcaggccctgttcatctacgtgcacatcctgaaggacaccagaatggccgaggagtactgccacaagcactacgacagaaacaaggacggcaacaaggacgtgtacctgagcctgctgagaatgtacctgagcccccccagcatccactgcctgggccccatcaagctggagctgctggagcccaaggccaacctgcaggccgccctgcaggtgctggagctgcaccacagcaagctggacaccaccaaggccctgaacctgctgcccgccaacacccagatcaacgacatcagaatcttcctggagaaggtgctggaggagaacgcccagaagaagagattcaaccaggtgctgaagaacctgctgcacgccgagttcctgagagtgcaggaggagagaatcctgcaccagcaggtgaagtgcatcatcaccgaggagaaggtgtgcatggtgtgcaagaagaagatcggcaacagcgccttcgccagataccccaacggcgtggtggtgcactacttctgcagcaaggaggtgaaccccgccgacacctag

SEQ ID NO: 113486 - DNA, 2661 bp, Artificial Sequence
  derived and/or modified sequence
atgcatgacgcatttgagcccgtccctatcctggaaaagctgccactccagattgactgtcttgcagcatgggaggaatggctcctggttgggactaagcaggggcatctgctgctttacagaattaggaaagatgtcgtgcctgctgatgtcgccagcccagaatctggctcctgcaaccgcttcgaggtcacactggagaaaagcaataagaacttcagcaaaaagatccagcaaatccacgtggtttcccaattcaaaattctggtcagcctgcttgaaaataacatttacgtccatgacctgctcacattccaacagatcacgactgttagcaaggccaagggggctagcctctttacatgtgatctccagcatactgagacgggtgaggaggtgctcagaatgtgtgtggccgtaaagaaaaagttgcaactgtacttttggaaggatagagagttccacgagctccaaggcgattttagtgtccctgacgtgcccaagagcatggcttggtgcgagaactcgatatgcgtgggctttaaaagagactactacctcattcgcgtagacggaaaaggatcgatcaaggagctctttcctaccggaaaacagctggaacccctggtagcccccttagcagacggcaaggtggctgtgggccaagacgatctgactgtggtgctcaacgaggaaggcatctgcactcaaaaatgcgcgcttaattggacagatatcccagtggcaatggagcaccagccaccatatataatagcagtcctacccaggtatgtagagatccgaacttttgaacctaggcttctcgtgcagagtatcgagcttcagagaccccgcttcatcacctccggtggatctaatatcatatacgtagctagtaaccactttgtgtggcgtctcattccggtgcctatggcaacccagatccagcagcttctgcaggataagcagtttgaactcgcgcttcagcttgccgagatgaaggacgattctgattctgaaaagcaacagcagattcaccacattaagaacctctacgccttcaatctattctgccaaaagaggttcgacgagagtatgcaggtatttgccaagctcggtacagaccccactcatgtgatgggactgtaccctgaccttttgcccaccgactatcgcaaacaacttcaatatcctaatcctctccccgtactgagcggggcagaacttgaaaaggctcatctcgccttgattgactaccttacacaaaaaagatctcagctagtgaagaaactaaatgattccgaccatcagtcatctactagtccactaatggagggaacaccgactatcaagtccaaaaaaaaacttctgcagattatcgatacgacactactaaaatgttatttacacacaaacgtggctctcgtagctccgctcctgaggctggagaacaaccattgccacatagaggaaagcgagcacgttctcaaaaaggctcacaaatactctgagctgattattctctacgagaagaaaggcctgcacgagaaagctctgcaggtactagttgaccagtcgaaaaaggcaaactctccactgaagggccatgaacggactgtgcagtatttgcagcacctaggcaccgaaaatctgcatttaatttttagttactcagtgtgggtgctcagggacttccctgaagacggtctaaaaatctttaccgaagacctccccgaggtggaatctctgccgagggaccgcgtgctgggctttctcattgagaatttcaaaggcctcgcgatcccttacttagagcatataatacacgtgtgggaggagactggtagtagatttcataattgcttgatccagctatattgcgagaaagttcagggcctaatgaaagaatacttactgtcatttccggctggcaagacaccggttccagccggcgaggaggaaggcgagctaggtgaatacagacagaagctgctaatgtttctggagatctcatcatattacgacccgggccggctgatctgtgactttccatttgacggcctactggaggagagagcgttgctcttaggccggatgggcaagcacgaacaggccctctttatctacgtgcatattctgaaggatactcggatggctgaggagtattgccataagcattatgatcgcaataaggacgggaataaagatgtttacctgtctttgctgaggatgtatttgtctcctccaagcatacactgccttgggcctatcaaacttgagctgctggagcccaaagccaatctgcaggccgctctccaggtgttggagctgcaccacagtaaacttgacactactaaggcattaaaccttctgcccgcaaatacccaaattaatgatatccgaatatttctggagaaggtactcgaggaaaatgcacagaaaaagcgatttaatcaggtgctcaagaatttgctccatgcagagttcctgagggtgcaggaagagcggattcttcaccaacaggtcaagtgtataatcactgaggagaaggtgtgtatggtgtgtaagaagaagatcggcaattctgcctttgcaagataccctaatggggtagtcgtacactacttttgctccaaggaggtgaatcctgccgacacatag

SEQ ID NO: 113487 - DNA, 2661 bp, Artificial Sequence
  derived and/or modified sequence
atgcatgatgcctttgagcctgtgcccatcctggagaagctgcccctgcagattgactgcctggccgcctgggaggagtggctgctggtgggcaccaagcagggccacctgctgctgtaccgcatcaggaaggatgtggtgcctgcagatgtggccagccctgagagcggcagctgcaacagatttgaggtgaccctggagaagagcaacaagaacttcagcaagaagatccagcagatccacgtggtgtcccagttcaagatcctggtgtccctgctggagaacaacatctacgtgcatgacctgctgaccttccagcagatcaccaccgtgtccaaggccaagggggccagcctcttcacctgtgacctgcagcacacagaaacaggagaggaggtgctgaggatgtgtgtggccgtgaagaagaagctgcagctgtacttctggaaggaccgggagttccacgagctgcagggcgacttctctgtgcctgatgtgcccaagtccatggcctggtgtgagaacagcatctgtgtgggcttcaagagggactactacctgatccgggtggatggcaagggcagcatcaaggagctgttccccaccgggaagcagctggagcccctggtggcccccctggctgatggcaaggtggccgtgggccaggatgacctgactgtggtgctgaatgaggagggcatctgcacccagaagtgtgccctgaactggacagacatccctgtggccatggagcaccagcccccctacatcatcgctgtgctgccccgctacgtggagatccgcacctttgagccccggctgctggtgcagagcattgagctgcagaggccccgcttcatcaccagcggcggcagcaacatcatctacgtggccagcaaccactttgtgtggaggctcatccctgtgcccatggccacccagatccagcagctgctgcaggacaagcagtttgagctggccctgcagctggccgagatgaaggatgacagcgacagcgagaagcagcagcagatccaccacatcaagaacctgtatgccttcaacctcttctgccagaagagatttgatgagagcatgcaggtgtttgccaagctgggcacagaccccacccacgtgatgggcctgtacccagacctgctgcccacagactacaggaagcagctgcagtaccccaaccccctgcctgtgctgtctggagctgagctggagaaggcccacctggccctgattgactacctgacccagaagaggagccagctggtgaagaagctgaatgacagcgaccaccagagcagcaccagccccctgatggagggcacccccaccatcaagagcaagaagaagctgctgcagatcatcgacaccaccctgctgaagtgctacctgcacaccaacgtggccctggtggcccccctgctgcggctggagaacaaccactgccacatcgaggagagcgagcacgtgctgaagaaggcccacaagtacagcgagctgatcatcctgtatgagaagaagggcctgcacgagaaggccctgcaggtgctggtggaccagagcaagaaggccaacagccccctgaagggccacgagaggacagtgcagtacctgcagcacctgggcacagagaacctgcacctgatcttctcctacagcgtgtgggtgctgcgggacttcccagaagatggcctgaagatcttcacagaggacctgcctgaggtggagagcctgccccgggacagagtgctgggcttcctgattgagaacttcaagggcctggccatcccctacctggagcacatcatccacgtgtgggaggagaccggcagccgcttccacaactgcctgatccagctgtactgtgagaaggtgcagggcctgatgaaggagtacctgctgtccttccctgctgggaagacccctgtgcctgctggggaggaggagggggagctgggggagtaccggcagaagctgctgatgttcctggagatcagcagctactatgaccccggccgcctcatctgtgacttcccctttgatggcctgctggaggagcgggccctgctgctgggccgcatgggcaagcatgagcaggccctcttcatctacgtgcacatcctgaaggacaccaggatggccgaggagtactgccacaagcactatgacaggaacaaggatggcaacaaggatgtgtacctgagcctgctgaggatgtacctgagcccccccagcatccactgcctgggccccatcaagctggagctgctggagcccaaggccaacctgcaggccgccctgcaggtgctggagctgcaccacagcaagctggacaccaccaaggccctgaacctgctgcctgccaacacccagatcaatgacatccgcatcttcctggagaaggtgctggaggagaatgcccagaagaagcgcttcaaccaggtgctgaagaacctgctgcatgctgagttcctgcgggtgcaggaggagcgcatcctgcaccagcaggtgaagtgcatcatcacagaggagaaggtgtgcatggtgtgcaagaagaagattggcaacagcgcctttgcccgctacccaaatggagtggtggtgcactacttctgcagcaaggaggtgaacccagctgacacctag

SEQ ID NO: 113488 - DNA, 2661 bp, Artificial Sequence
  derived and/or modified sequence
atgcacgacgccttcgagcccgtgcccatcctggagaagctgccccttcagatcgactgtctggctgcctgggaggagtggttgctggtcggaaccaagcagggccatctactcctgtaccgcattcgaaaggatgtggttcccgcagatgtcgcatcccccgagagcggatcctgcaatcgattcgaagtgacattggaaaaaagcaacaagaatttctctaaaaagattcaacagattcacgtcgtctcacagtttaaaatactggtgtccctgcttgagaataatatctatgtccacgatctcctgaccttccagcagatcacaacagtcagcaaggccaagggcgcctctctgttcacatgcgatctccagcatacagagacaggagaggaggtgctgaggatgtgtgtagccgtgaagaaaaagctccagctttatttttggaaagatagggagttccatgaactacagggggatttcagtgtgcccgatgtgccaaagtccatggcttggtgtgaaaactctatctgtgtgggatttaaacgggactactacctgatacgtgtcgacgggaagggttccataaaggagttatttcctaccggtaaacagctcgagccattagtggcccccctcgctgacggaaaggtggccgttggtcaggatgatttgaccgtggtactcaacgaggagggaatctgcacacagaaatgtgccctgaactggactgacattcccgttgctatggaacatcagcctccttacataattgccgtgctcccacgttacgtggaaattagaacctttgagccacgacttctcgtgcagtccattgagttgcagagaccaaggttcattacctcaggcggatccaatattatctatgttgcctcaaatcactttgtatggagattgatccccgtccccatggctactcagatacagcagctgcttcaggataagcagttcgagctcgctctccaactggccgaaatgaaggacgattcagacagcgaaaagcaacagcagattcaccatattaagaacctgtacgcgtttaatctcttctgtcaaaagaggtttgatgaaagcatgcaagtgttcgccaagttggggactgatccaacgcacgttatgggactctaccccgaccttttgccgacagattaccggaaacaactgcagtaccctaaccctctgccggtactctctggcgcagagttggaaaaagctcatttggcactgattgactacctgacccagaaaaggagtcaactggtaaagaaattaaatgacagcgatcatcagtcaagcacgagcccattaatggagggtacaccaactataaaatcgaagaaaaaacttttgcaaataatcgacactactctgttaaagtgttacctacacaccaacgtcgcactagtggctccgctgcttcgccttgaaaataaccattgccacattgaagaaagtgagcacgttctgaaaaaagcccataagtactccgaattaatcattctctatgagaaaaagggactgcacgaaaaggctctgcaggtgcttgtagaccagagtaagaaagcgaattccccccttaaaggccatgagaggacggtgcagtaccttcagcatttagggaccgaaaacctgcacctcatctttagttactcagtgtgggtgttacgggacttcccagaggacggcctgaaaatcttcacagaggatcttcctgaagtagaaagccttccccgagatagagtgttgggcttcctgatcgaaaacttcaagggcctcgcgatcccgtaccttgagcacatcatccacgtttgggaagaaaccggttcccggttccataactgtcttatacagctatattgcgagaaggtacagggtctcatgaaggagtacctgttatccttcccggccggcaaaacccctgttccggcaggtgaagaggaaggcgaactaggagaatataggcagaaactgctaatgttccttgagatctcttcctactatgaccccggtcgattgatttgtgatttccccttcgatggactactggaagagcgcgctctcctcttaggtcgcatgggcaagcacgagcaggctctctttatttatgtacatatcttgaaagacacccgcatggcagaagaatactgccacaaacactacgaccgcaataaggacggtaataaggacgtgtatttgagtctgcttcggatgtacttgtctccccccagcatccactgcctcgggcccatcaagcttgagctgcttgagcccaaggctaacctgcaggctgcactccaggtgctcgagctgcatcactccaagctggacactacaaaggcgctcaacttgctccccgccaatactcagattaatgacattcggatatttttagaaaaggtactagaggagaacgctcagaagaagcggtttaatcaagtcttaaagaatttactccacgccgagtttcttcgggtgcaggaagaaagaatacttcaccaacaggtgaaatgcatcatcaccgaggagaaagtttgcatggtgtgcaagaaaaaaattggcaattccgcttttgctagatatcccaacggtgtggtggttcactacttttgttcgaaagaggtgaaccccgctgatacctag

SEQ ID NO: 113489 - DNA, 2661 bp, Artificial Sequence
  derived and/or modified sequence
atgcatgacgcatttgaacccgtcccaatcctggagaaactgccactccaaatagattgtctagcagcttgggaggaatggttattggtcggaactaaacagggtcatcttctgctctaccggattagaaaggacgtggtgccggctgatgtggcttcacccgagagcggttcttgtaaccgcttcgaagtcacgctggagaaatccaacaaaaactttagcaaaaagatccagcagattcacgtggtgtcgcagttcaagatcctggtctccctgctcgagaacaatatctatgtgcacgacctgctgacctttcagcagattactaccgtgtctaaggctaaaggggcttcactcttcacctgcgatctgcagcacaccgagactggtgaagaagtgctacggatgtgcgtcgccgtcaagaagaaactgcagctgtatttttggaaggacagagagttccacgagctgcagggggacttctctgtgcccgatgtcccaaagagtatggcatggtgcgagaatagcatatgcgtgggatttaaaagagactattaccttatccgcgttgacggaaagggctccattaaggaattgttccctactggcaagcagctggagcccttggttgctcccttagctgatggcaaggtggcagtcggacaggatgacttgaccgtggttcttaacgaggaggggatctgtacacagaaatgtgccctcaattggaccgacatacccgtcgctatggagcatcagcccccatacatcattgctgttctacccaggtatgttgagatccgcacattcgagcccagacttctggtccagtcaatagaactgcagcgccctcggttcatcacctccggagggtccaatattatctacgtggcctccaaccatttcgtgtggcgactgataccagtaccaatggctactcaaatccaacagctcctgcaggataagcagtttgaactggccctgcagttagctgaaatgaaggacgactccgactctgaaaaacagcagcagattcatcacataaaaaacctgtacgcctttaatttgttctgtcagaagcggtttgacgaatcaatgcaggtgttcgcaaagctcgggactgatccaacacatgtaatgggcttatacccagacttgcttcccactgattacaggaaacagctgcaatatcccaacccccttccggtcctgtccggagccgagctggagaaggcccatctggccctcatcgattatctcactcaaaagagatcacagctggtgaaaaagctgaatgacagcgatcatcaaagttcgacatccccgcttatggagggcacaccaacaatcaaatcaaagaagaaactgctgcagatcattgacactaccctgcttaagtgctacctgcacacaaacgtggcccttgtggccccattactgcgcctggagaataaccattgccatatcgaagagtcagagcatgttctgaagaaggcacataaatatagcgaacttattatactgtacgaaaaaaaaggactgcacgaaaaggctctgcaggtactggtagatcagagcaagaaagccaattcccccttgaaaggtcatgagcggaccgtgcagtacctgcaacacctcggcaccgagaatctgcatttaattttttcttactcggtgtgggtattgagagacttccccgaagatggactgaagatcttcactgaggatctgcccgaggttgaaagtctgccacgcgacagagtgctggggtttcttatcgaaaacttcaagggattggcgatcccatacctggaacacattatccacgtatgggaagagaccggctcaaggttccacaactgtctgattcaactctattgcgaaaaggtccaagggctgatgaaggagtacctcctatcattccctgctggcaagactcccgttcccgctggcgaagaggagggcgagctgggtgagtatcggcagaagctgctgatgtttctagagattagcagctactatgatccaggaaggctcatttgcgactttccttttgacggccttctggaggaacgggctctgctgctgggacgcatgggtaaacatgagcaggccctatttatctacgtgcatattctcaaagacacccgtatggccgaggaatattgccacaagcattacgacaggaacaaggatggaaacaaggatgtgtacctgagcttgctcaggatgtacctgtctccgccttcgatccactgtttgggacccatcaagctggaactactggaaccgaaggctaatctgcaggctgctttacaagtgctcgagctgcaccattccaagttagatacaaccaaagctctaaacctgctgcctgcaaacacgcagattaacgatatccgcattttcctggaaaaagttctagaggagaatgcccagaagaaacgctttaatcaggttctcaaaaatctgctccacgctgagttcttaagggtgcaggaggaaagaatcctgcaccagcaggtcaaatgcattattaccgaggagaaagtctgcatggtttgcaagaaaaagattggtaactctgccttcgctcgataccccaacggagtagtcgttcactatttctgttccaaggaggtgaaccctgcggacacttag

SEQ ID NO: 113490 - DNA, 2661 bp, Artificial Sequence
  derived and/or modified sequence
atgcacgacgctttcgagccagtgccgatcctagaaaagctgcctctgcaaatcgactgtctggctgcctgggaggaatggcttcttgtgggaaccaaacaaggacatcttcttctctataggattcggaaggacgttgtgccagcagatgtagcatcacctgaaagcggcagttgcaacagatttgaagtgacactagagaaatccaataagaacttctccaaaaagattcagcagatccatgtggtttcccagtttaagattctggtcagcttgttagaaaataacatttatgtccatgacctattgacatttcaacaaatcactacggtttcaaaggcaaagggagcatcactgtttacttgtgacctccagcacacagagaccggtgaggaggtgttacggatgtgtgtggcagtaaaaaagaagctgcagctctatttctggaaggacagggaatttcatgaattgcagggggactttagtgtgccagatgtgcccaagtccatggcgtggtgtgaaaattctatctgtgtgggtttcaagagagactactacctaataagggtggatggaaaggggtccatcaaagagctctttccaacaggaaaacagctggagcccttagttgcacctctggcagatggaaaagtggctgtgggccaggatgatctcaccgtggtactcaatgaggaagggatctgcacacagaaatgtgccctgaactggacggacataccagtggccatggagcaccagcctccctacatcattgcagtgttgcctcgatatgttgagatccgaacatttgaaccgaggcttctggtccaaagcattgaattgcaaaggccccgtttcattacctcaggaggatcaaacattatctatgtggccagcaatcattttgtttggagactcatccctgtccccatggcaacccaaatccaacaacttctccaggacaagcagtttgaattggctctgcagctcgcagaaatgaaagatgattctgacagtgaaaagcagcaacaaattcatcacatcaagaacttgtatgccttcaacctcttctgccagaagcgttttgatgagtccatgcaggtctttgctaaacttggcacagatcccacccatgtgatgggcctgtaccctgacctgctgcccacagactacagaaagcagttgcagtatcccaacccattgcctgtgctctccggggctgaattggagaaggctcacttagctctgattgactacctgacacagaaacgaagtcaattggtaaagaagctgaatgactctgatcaccagtcaagcacctcaccgctcatggaaggcactcccaccatcaaatccaagaagaagctgctacaaatcatcgacaccaccctgctcaagtgctatctccatacaaatgtggccctggtggcccccttgctacgcctggagaacaatcactgccacatcgaggagagcgagcacgtgctaaagaaggctcacaagtacagtgagcttatcatcctgtatgagaagaaggggctccacgagaaagctctgcaggtgctcgtggaccagtccaagaaagccaactcccctctgaaaggccacgagaggacagtgcagtatctgcagcatctgggcacagaaaacctgcatttgattttctcctactcagtgtgggtgctgagagacttcccagaagatggcctgaagatatttactgaagatctcccggaagtggagtctctgccacgtgatcgagtcctcggcttcttaatagagaattttaagggtctggctattccttatctggaacacatcatccatgtttgggaggagacaggctctcggttccacaactgcctgatccagctatactgtgagaaggtgcaaggtctgatgaaggagtatctcctgtccttccctgcaggcaaaaccccagtcccagctggagaggaagagggtgagctgggagaataccggcaaaagctcctcatgttcttggagatttccagctactatgatccaggccggctcatctgtgattttccctttgatggcctcttagaagaacgagctctcctgttggggcgcatggggaaacatgaacaagctcttttcatttatgtccacatcttgaaggatacaaggatggctgaggagtactgccacaaacactatgaccgaaacaaagatggcaacaaagatgtgtatctgtccctgcttcggatgtacctgtcgccccccagcattcactgcctggggccaatcaagctggaactactggagccaaaagccaacctccaggccgctctgcaggtcctcgagctacaccacagcaaactggacaccaccaaggccctcaaccttctgccagcaaacactcagatcaatgacatacgcatcttcctggaaaaggtcttggaagaaaatgcacaaaagaaacggttcaatcaagtgctcaagaaccttctccatgcagaattcctgagggtccaggaagagcggattttacaccagcaggtgaagtgcatcatcacagaggagaaggtgtgcatggtgtgtaagaagaagattgggaacagtgcatttgcaagataccccaatggagtggtcgtccattacttctgttccaaagaggtaaacccagctgacacttga

SEQ ID NO: 113491 - DNA, 891 bp, Artificial Sequence
  derived and/or modified sequence
atggagtttctgaagctccatcagttcttgcattcaaaggaaaaggacatcttgacagagctcagggaagagggcaaagcactgaacgaggaaatggaactgaatctgtctcaactgcaagagcaatgtctgctcgccaaagatatgcttgtctccattcaggcaaaaactgagcagcaaaattccttcgatttccttaaggacatcaccacacttttacactccctcgagcaagggatgaaggtgctggcaacccgagagctgatctcacggaagttaaatttggggcagtataaggggcccatccagtatatggtatggagggagatgcaggataccctctgtccaggcctgtcacccctcactctagatccaaaaaccgctcaccccaatctggttctttcaaaatctcagaccagcgtgtggcatggcgacattaagaagattatgccggatgatcctgagaggttcgactcttcagtggccgtcttgggatctcggggattcacaagcggaaagtggtattgggaagtcgaggtggccaaaaaaactaagtggacagttggggtagttcgggaatctattatcaggaagggcagctgcccactgacccccgaacagggattctggttgctccgtttaagaaaccagactgatctcaaggcgcttgatctgccttcattctccttaactcttaccaataacctggacaaagtcggtatctacctggactatgagggcgggcagctctccttctacaacgctaaaacgatgacacacatttataccttttctaatacgttcatggagaagctgtacccttacttttgcccctgtctgaacgatgggggcgaaaacaaagagcctttgcatatcctgcatccgcagtag

SEQ ID NO: 113492 - DNA, 891 bp, Artificial Sequence
  derived and/or modified sequence
atggagtttctgaagttgcaccagtttcttcacagcaaggaaaaggacattctgacagagttgagggaggagggtaaggcactgaacgaagaaatggagctgaacctgtcccagctccaagagcagtgccttctggcaaaggacatgttagtgtccattcaggctaagacagagcagcagaactcatttgatttcttgaaggacatcactacacttcttcacagcctggagcagggaatgaaggttttagcaacacgggaacttatttcgcgcaagcttaacttaggacagtataaaggccccatacagtacatggtgtggcgcgaaatgcaggataccttatgccctggtttgagtccgttgactctggaccctaagactgcgcatcccaacttggtactgtctaagtcccaaaccagtgtgtggcatggagacattaagaagattatgcctgatgacccagagagattcgattcctccgtggccgtccttggtagccgaggcttcactagtgggaagtggtactgggaagtcgaggtagcaaaaaaaacgaagtggacagtgggggtcgtacgggaaagtataattcggaagggttcctgtcctctgactcccgaacagggattctggctccttagactgcgaaatcagaccgacctgaaggcactggatcttccgtccttctctctgaccttgacaaacaatctggataaggtcgggatctatttagattatgaaggagggcaactgtctttttacaacgctaaaactatgactcatatatacaccttcagcaatacattcatggagaaactgtacccttatttctgtccttgtttgaatgatgggggagagaacaaggaacctctgcatattcttcatccacagtag

SEQ ID NO: 113493 - DNA, 891 bp, Artificial Sequence
  derived and/or modified sequence
atggagttcctgaagctgcaccagttcctgcacagcaaggagaaggacatcctgacagagctgcgggaggagggcaaggccctgaatgaggagatggagctgaacctgagccagctgcaggagcagtgcctgctggccaaggacatgctggtgtccatccaggccaagacagagcagcagaacagctttgacttcctgaaggacatcaccaccctgctgcacagcctggagcagggcatgaaggtgctggccacccgggagctgatcagcaggaagctgaacctgggccagtacaagggccccatccagtacatggtgtggagggagatgcaggacaccctgtgccccggcctgagccccctgaccctggaccccaagacagcccaccccaacctggtgctgagcaagagccagacctctgtgtggcatggagacatcaagaagatcatgccagatgatcctgagagatttgacagctctgtggccgtgctgggcagccggggcttcaccagcggcaagtggtactgggaggtggaggtggccaagaagaccaagtggacagtgggcgtggtgcgggagagcatcatcaggaagggcagctgccccctgaccccagagcagggcttctggctgctgcggctgaggaaccagacagacctgaaggccctggacctgcccagcttcagcctgaccctgaccaacaacctggacaaggtgggcatctacctggactatgaaggaggccagctgtccttctacaatgccaagaccatgacccacatctacaccttcagcaacaccttcatggagaagctgtacccctacttctgcccctgcctgaatgatggaggagagaacaaggagcccctgcacatcctgcacccccagtag

SEQ ID NO: 113494 - DNA, 891 bp, Artificial Sequence
  derived and/or modified sequence
atggagttcctgaagctgcaccagttcctgcacagcaaggagaaggacatactgactgagttgagggaagagggcaaggcattaaatgaggagatggagctgaaccttagccaactgcaggaacagtgccttctcgccaaagacatgttggtgagcatccaggccaaaaccgaacagcagaattctttcgatttcctgaaggacattaccacactactccactccctcgaacagggtatgaaagttctggccacgagagagctgattagtcgtaagctgaacctagggcaatacaaagggccaatccagtacatggtttggcgcgagatgcaggatacactgtgcccaggcctcagccccctcaccttagaccccaagaccgcccaccccaatcttgtcctcagtaaatcccagacgagcgtttggcatggcgacattaagaaaattatgccagatgatcccgagcggttcgactcctcagtggctgtgctcggatccaggggtttcacctctggcaaatggtactgggaagtggaagtggccaaaaagactaagtggactgtgggcgtggtcagggaatccatcatccgtaagggcagttgccctctcacgcctgagcagggattctggcttttaaggcttagaaatcaaactgatctgaaagccctcgacctcccttccttttcgcttactctaaccaacaatcttgacaaggtgggcatttatctggattacgagggaggccagctgagcttttataacgcaaaaactatgacgcacatctacaccttttctaatacattcatggaaaaactctatccctatttttgcccttgtctgaacgatggaggggaaaataaggagccattgcacattctgcacccgcagtag

SEQ ID NO: 113495 - DNA, 891 bp, Artificial Sequence
  derived and/or modified sequence
atggagttcctgaagctgcaccagttcctgcacagcaaggagaaggacatacttacagagctgcgggaggaagggaaagcacttaacgaggaaatggagctgaacctcagtcagttgcaagagcagtgcctccttgccaaagacatgttggtgtctatccaggccaagaccgagcagcaaaacagcttcgactttttgaaggacatcacgaccctgctgcattctttagaacaaggaatgaaagtgctggcgactcgcgagttgattagccgcaagctgaatctgggccagtataagggacccattcagtacatggtgtggcgcgaaatgcaggacaccctttgtccaggtctctccccgctgactttagatcccaagactgcgcatccaaacctcgtgctcagcaaatcacagacatccgtgtggcacggagacatcaagaaaataatgccagatgaccctgagcgattcgacagcagcgtcgctgtgcttggatcacggggatttacatcggggaagtggtactgggaagtggaggtggctaagaagactaagtggacagtcggagttgtgagggaatctatcatccgcaagggctcttgtcccctgacacccgaacaggggttttggctgctgcgccttcgaaatcaaacggatctgaaggcattagacttgccatcctttagcttaacgctcaccaacaacttggataaggtgggaatctacttggattacgaaggaggccagcttagtttttacaacgccaagactatgacccatatttacacattttctaacacttttatggagaaattatatccctacttctgcccttgcttgaatgacgggggtgagaacaaagaacccctgcacatacttcaccctcaatag

SEQ ID NO: 113496 - DNA, 891 bp, Artificial Sequence
  derived and/or modified sequence
atggaatttctgaagctccaccagttcctgcacagcaaagaaaaggatatcctgaccgagttaagagaagaagggaaagccttaaatgaagagatggagttgaatctctcccagctgcaggagcagtgtctgctggcgaaggatatgctggtgtcaatccaggccaaaactgaacagcagaacagctttgattttttgaaagatattactactttactgcatagcctagaacaaggcatgaaagtgctggccacgcgggagctgatctcccgaaaattgaatctggggcagtataagggccctattcagtatatggtctggcgggaaatgcaggataccctgtgccctgggctgagccctctaaccctggaccccaaaacagcacaccccaatctcgtgctttccaaaagtcaaactagtgtgtggcacggcgacattaagaagatcatgcccgacgatcctgagcggttcgattcatccgtcgccgtactcggaagtagagggtttacctccggcaagtggtattgggaggtggaggtggcaaaaaaaaccaagtggactgtgggagtagtccgtgagagcattattcgcaaaggcagctgcccattaactccagagcaggggttttggctccttagacttagaaatcagaccgatttgaaggctctggacttgccttcgttctccctaacactcaccaacaatctggataaggtggggatctacctagactacgaaggaggccagctgagcttctataacgccaagacaatgactcacatatacaccttttctaacacatttatggaaaagctgtacccgtacttctgtccctgtctgaacgatgggggtgaaaataaggaacccttacatattctgcacccccaatag

SEQ ID NO: 113497 - DNA, 891 bp, Artificial Sequence
  derived and/or modified sequence
atggaattccttaagttgcaccaatttctacactcgaaagagaaagacatcctgactgaactgcgggaagaaggcaaagcccttaacgaagaaatggagctaaatctgtcacagttgcaggagcagtgcttgctggccaaggatatgcttgtctcaatccaggccaagacagaacagcagaacagtttcgactttctgaaggatattacaactctgctgcactctctggagcagggaatgaaggtccttgccacaagagagttgattagccgaaaactgaacctgggccagtacaagggtccaatccaatatatggtgtggcgggaaatgcaggacaccttgtgtcctggactgtcgccgttaaccttggaccccaaaacagcccaccccaatctggtgctctccaagagccagacatcagtgtggcacggtgatatcaagaagatcatgcccgacgaccctgagcggttcgacagttctgtagcagttcttgggtcaagagggtttacctccggcaaatggtattgggaggtagaagtcgcaaagaagaccaagtggacggttggggtggtaagggaatctattattcgaaaaggatcctgcccccttacacccgagcaggggttttggctcctccgacttcggaatcagacagatctcaaggccctggacctaccaagttttagtcttacgctaaccaacaatctggataaagtcggaatctaccttgattatgagggaggacaactcagcttttataacgccaaaacgatgacccacatctacactttttctaacaccttcatggaaaaactgtatccgtatttctgtccttgcctgaatgatggcggtgaaaacaaggagcccctgcacatattgcacccacagtag

SEQ ID NO: 113498 - DNA, 891 bp, Artificial Sequence
  derived and/or modified sequence
atggagttcctgaagctgcaccagttcctgcacagcaaggagaaggacatcctgaccgagctgagagaggagggcaaggccctgaacgaggagatggagctgaacctgagccagctgcaggagcagtgcctgctggccaaggacatgctggtgagcatccaggccaagaccgagcagcagaacagcttcgacttcctgaaggacatcaccaccctgctgcacagcctggagcagggcatgaaggtgctggccaccagagagctgatcagcagaaagctgaacctgggccagtacaagggccccatccagtacatggtgtggagagagatgcaggacaccctgtgccccggcctgagccccctgaccctggaccccaagaccgcccaccccaacctggtgctgagcaagagccagaccagcgtgtggcacggcgacatcaagaagatcatgcccgacgaccccgagagattcgacagcagcgtggccgtgctgggcagcagaggcttcaccagcggcaagtggtactgggaggtggaggtggccaagaagaccaagtggaccgtgggcgtggtgagagagagcatcatcagaaagggcagctgccccctgacccccgagcagggcttctggctgctgagactgagaaaccagaccgacctgaaggccctggacctgcccagcttcagcctgaccctgaccaacaacctggacaaggtgggcatctacctggactacgagggcggccagctgagcttctacaacgccaagaccatgacccacatctacaccttcagcaacaccttcatggagaagctgtacccctacttctgcccctgcctgaacgacggcggcgagaacaaggagcccctgcacatcctgcacccccagtag

SEQ ID NO: 113499 - protein, 279 aa, Artificial Sequence
  derived and/or modified sequence
MEFLKLHQFLHSKEKDILTELREEGKALNEEMELNLSQLQEQCLLAKDMLDITTLLHSLEQGMKVLATRELISRKLNLGQYKGPIQYMVWREMQDTLCPGLSPLTLDPKTAHPNLVLSKSQTSVWHGDIKKIMPDDPERFDSSVAVLGSRGFTSGKWYWEVEVAKKTKWTVGVVRESIIRKGSCPLTPEQGFWLLRLRNQTDLKALDLPSFSLTLTNNLDKVGIYLDYEGGQLSFYNAKTMTHIYTFSNTFMEKLYPYFCPCLNDGGENKEPLHILHPQ

SEQ ID NO: 113500 - DNA, 840 bp, Artificial Sequence
  derived and/or modified sequence
atggaattcctgaagttacaccagtttttacactccaaggagaaagacatcctgactgaactccgggaggagggaaaagcactcaatgaggaaatggagctcaatttgtctcagctgcaggagcagtgcctcctcgccaaagacatgctggatatcacgaccttgttgcactcactcgagcagggcatgaaagtgctggccacgcgagaactgatttccagaaaactgaacctggggcagtacaagggcccaattcagtacatggtgtggagggagatgcaggataccttatgtcccggtctgtctccgctgacgctagacccaaaaactgctcatccaaatctcgtcctgagtaaatcccagacttcggtctggcacggtgacatcaaaaagattatgccggatgatcccgaaagattcgatagtagcgtcgccgttctcggcagtcggggattcacttctggcaagtggtactgggaagttgaggtcgccaaaaaaactaagtggacagtgggggtggttagggagtcaattattcgcaaggggagctgccctctaacccctgagcaaggtttctggttactccggttgcgcaaccagaccgatttgaaagcactagatctgccctccttctcattgacactcaccaacaatcttgacaaagtgggaatttatctggactatgaggggggccagctgagcttctataatgctaagactatgacgcacatctatacatttagcaataccttcatggagaagttgtatccttatttctgcccctgtctgaatgacggcggcgaaaacaaggaacctctccatatcctccacccacagtag

SEQ ID NO: 113501 - DNA, 840 bp, Artificial Sequence
  derived and/or modified sequence
atggagttcctgaagctgcaccagttcctgcacagcaaggagaaggacatcctgacagagctgcgggaggagggcaaggccctgaatgaggagatggagctgaacctgagccagctgcaggagcagtgcctgctggccaaggacatgctggacatcaccaccctgctgcacagcctggagcagggcatgaaggtgctggccacccgggagctgatcagcaggaagctgaacctgggccagtacaagggccccatccagtacatggtgtggagggagatgcaggacaccctgtgccccggcctgagccccctgaccctggaccccaagacagcccaccccaacctggtgctgagcaagagccagacctctgtgtggcacggggacatcaagaagatcatgccagatgatcctgagagatttgacagctctgtggccgtgctgggcagccggggcttcaccagcggcaagtggtactgggaggtggaggtggccaagaagaccaagtggacagtgggcgtggtgcgggagagcatcatcaggaagggcagctgccccctgaccccagagcagggcttctggctgctgcggctgaggaaccagacagacctgaaggccctggacctgcccagcttcagcctgaccctgaccaacaacctggacaaggtgggcatctacctggactatgagggcggccagctgtccttctacaatgccaagaccatgacccacatctacaccttcagcaacaccttcatggagaagctgtacccctacttctgcccctgcctgaatgatggaggagagaacaaggagcccctgcacatcctgcacccccagtag

SEQ ID NO: 113502 - DNA, 840 bp, Artificial Sequence
  derived and/or modified sequence
atggagttcctgaagctgcaccagttcctgcacagcaaggagaaggacattctgacagaattgagagaggagggcaaagctttaaatgaagagatggaacttaacctgtcccagctccaggagcaatgtctgctggcaaaggatatgctggatattactactctgcttcacagcctggagcaaggcatgaaagtgctggctacacgagagttgatctctcgcaagctcaacctgggccagtataagggacctatccagtatatggtgtggcgcgagatgcaagatactctttgtcctggacttagccctctgactctggacccaaaaaccgcccatcctaatctggtgttatctaagtcccagacgtccgtgtggcacggagatatcaaaaagattatgccagacgatccagaacggtttgattcttctgtggccgtactgggctctcgcggcttcacgtccgggaagtggtattgggaagtcgaggttgctaaaaagacaaagtggaccgtaggcgtagttcgggagagtattattcggaaagggtcatgcccgcttacacccgagcagggcttttggctgctgcgattacgaaaccagaccgacctcaaagccttggacctgccaagcttctcactgacacttactaataatcttgataaagttggcatctacttggattatgaaggtgggcagttgtctttttacaatgctaagacgatgactcacatttatacttttagcaatacttttatggaaaaactttacccgtatttttgcccatgcctaaatgacggtggagagaacaaagagcccctccatattctccatccacagtag

SEQ ID NO: 113503 - DNA, 840 bp, Artificial Sequence
  derived and/or modified sequence
atggagttcttgaaactgcatcagtttttgcatagtaaagaaaaggacatcctcacggagcttcgggaggaggggaaggctcttaatgaggagatggaactgaatctgtcccagctacaagaacagtgccttttagcgaaggacatgctagacatcacaacactcctgcactcactggagcaagggatgaaagtgttagctacccgggaactgatctcacgtaaacttaacctgggacaatacaaagggccaatacaatatatggtgtggagagagatgcaggacaccctttgcccgggactgagcccacttaccttggaccccaagacagctcatcctaacttggtgctttccaaatcacagacaagcgtttggcatggcgatattaaaaagattatgccagacgatccagagcgctttgattccagtgttgccgtccttggcagccggggttttacgagcggaaaatggtattgggaagttgaggtcgctaaaaagactaagtggaccgtgggagtcgtgcgcgagagcatcatcaggaagggttcgtgcccacttacccctgaacagggtttctggctcctccgcctgaggaatcagaccgacctgaaggccctggacctgccttccttttccctcacccttactaataatcttgacaaggtggggatttatctcgactacgagggaggacagttgtctttctacaacgccaaaaccatgacacacatctacactttttcaaacacctttatggagaagctatacccctacttctgcccctgtttaaacgatggcggtgagaacaaggagccactccacatcctgcatcctcagtag

SEQ ID NO: 113504 - DNA, 840 bp, Artificial Sequence
  derived and/or modified sequence
atggagttcctgaagctgcaccagttcctgcacagcaaggagaaggacatcctgaccgagctgagagaggagggcaaggccctgaacgaggagatggagctgaacctgagccagctgcaggagcagtgcctgctggccaaggacatgctggacatcaccaccctgctgcacagcctggagcagggcatgaaggtgctggccaccagagagctgatcagcagaaagctgaacctgggccagtacaagggccccatccagtacatggtgtggagagagatgcaggacaccctgtgccccggcctgagccccctgaccctggaccccaagaccgcccaccccaacctggtgctgagcaagagccagaccagcgtgtggcacggcgacatcaagaagatcatgcccgacgaccccgagagattcgacagcagcgtggccgtgctgggcagcagaggcttcaccagcggcaagtggtactgggaggtggaggtggccaagaagaccaagtggaccgtgggcgtggtgagagagagcatcatcagaaagggcagctgccccctgacccccgagcagggcttctggctgctgagactgagaaaccagaccgacctgaaggccctggacctgcccagcttcagcctgaccctgaccaacaacctggacaaggtgggcatctacctggactacgagggcggccagctgagcttctacaacgccaagaccatgacccacatctacaccttcagcaacaccttcatggagaagctgtacccctacttctgcccctgcctgaacgacggcggcgagaacaaggagcccctgcacatcctgcacccccagtag

SEQ ID NO: 113505 - protein, 518 aa, Artificial Sequence
  derived and/or modified sequence
MQGEAHPSASLIDRTIKMRKETEARKVVLAWGLLNVSMAGMIYTEMTGKLISSYYNVTYWPLWYIELALASLFSLNALFDFWRYFKYTVAPTSLVVSPGQQTLLGLKTAVVQTTPPHDLAATQIPPAPPSPSIQGQSVLSYSPSRSPSTSPKFTTSCMTGYSPQLQGLSSGGSGSYSPGVTYSPVSGYNKLASFSPSPPSPYPTTVGPVESSGLRSRYRSSPTVYNSPTDKEDYMTDLRTLDTFLRSEEEKQHRVKLGSPDSTSPSSSPTFWNYSRSMGDYAQTLKKFQYQLACRSQAPCANKDEADLSSKQAAEEVWARVAMNRQLLDHMDSWTAKFRNWINETILVPLVQEIESVSTQMRRMGCPELQIGELSQGGCMSSFRWNRGGDFKGRKWDTDLPTDSAIIMHVFCTYLDSRLPPHPKYPDGKTFTSQHFVQTPNKPDVTNENVFCIYQSAINPPHYELIYQRHVYNLPKGRNNMFHTLLMFLYIIKTKESGMLGRVNLGLSGVNILWIFGE

SEQ ID NO: 113506 - protein, 519 aa, Artificial Sequence
  derived and/or modified sequence
MMQGEAHPSASLIDRTIKMRKETEARKVVLAWGLLNVSMAGMIYTEMTGKLISSYYNVTYWPLWYIELALASLFSLNALFDFWRYFKYTVAPTSLVVSPGQQTLLGLKTAVVQTTPPHDLAATQIPPAPPSPSIQGQSVLSYSPSRSPSTSPKFTTSCMTGYSPQLQGLSSGGSGSYSPGVTYSPVSGYNKLASFSPSPPSPYPTTVGPVESSGLRSRYRSSPTVYNSPTDKEDYMTDLRTLDTFLRSEEEKQHRVKLGSPDSTSPSSSPTFWNYSRSMGDYAQTLKKFQYQLACRSQAPCANKDEADLSSKQAAEEVWARVAMNRQLLDHMDSWTAKFRNWINETILVPLVQEIESVSTQMRRMGCPELQIGELSQGGCMSSFRWNRGGDFKGRKWDTDLPTDSAIIMHVFCTYLDSRLPPHPKYPDGKTFTSQHFVQTPNKPDVTNENVFCIYQSAINPPHYELIYQRHVYNLPKGRNNMFHTLLMFLYIIKTKESGMLGRVNLGLSGVNILWIFGE

SEQ ID NO: 113507 - DNA, 1557 bp, Artificial Sequence
  derived and/or modified sequence
atgcagggcgaggcccaccccagcgccagcctgatcgacagaaccatcaagatgagaaaggagaccgaggccagaaaggtggtgctggcctggggcctgctgaacgtgagcatggccggcatgatctacaccgagatgaccggcaagctgatcagcagctactacaacgtgacctactggcccctgtggtacatcgagctggccctggccagcctgttcagcctgaacgccctgttcgacttctggagatacttcaagtacaccgtggcccccaccagcctggtggtgagccccggccagcagaccctgctgggcctgaagaccgccgtggtgcagaccacccccccccacgacctggccgccacccagatcccccccgccccccccagccccagcatccagggccagagcgtgctgagctacagccccagcagaagccccagcaccagccccaagttcaccaccagctgcatgaccggctacagcccccagctgcagggcctgagcagcggcggcagcggcagctacagccccggcgtgacctacagccccgtgagcggctacaacaagctggccagcttcagccccagcccccccagcccctaccccaccaccgtgggccccgtggagagcagcggcctgagaagcagatacagaagcagccccaccgtgtacaacagccccaccgacaaggaggactacatgaccgacctgagaaccctggacaccttcctgagaagcgaggaggagaagcagcacagagtgaagctgggcagccccgacagcaccagccccagcagcagccccaccttctggaactacagcagaagcatgggcgactacgcccagaccctgaagaagttccagtaccagctggcctgcagaagccaggccccctgcgccaacaaggacgaggccgacctgagcagcaagcaggccgccgaggaggtgtgggccagagtggccatgaacagacagctgctggaccacatggacagctggaccgccaagttcagaaactggatcaacgagaccatcctggtgcccctggtgcaggagatcgagagcgtgagcacccagatgagaagaatgggctgccccgagctgcagatcggcgagctgagccagggcggctgcatgagcagcttcagatggaacagaggcggcgacttcaagggcagaaagtgggacaccgacctgcccaccgacagcgccatcatcatgcacgtgttctgcacctacctggacagcagactgcccccccaccccaagtaccccgacggcaagaccttcaccagccagcacttcgtgcagacccccaacaagcccgacgtgaccaacgagaacgtgttctgcatctaccagagcgccatcaaccccccccactacgagctgatctaccagagacacgtgtacaacctgcccaagggcagaaacaacatgttccacaccctgctgatgttcctgtacatcatcaagaccaaggagagcggcatgctgggcagagtgaacctgggcctgagcggcgtgaacatcctgtggatcttcggcgagtag

SEQ ID NO: 113508 - DNA, 171 bp, Artificial Sequence
  derived and/or modified sequence
atgcagggcgaggcccaccccagcgccagcctgatcgacagaaccatcaagatgagaaaggagaccgaggccagaaaggtggtgctggcctggggcctgctgaacgtgagcatggccggcatgatctacaccgagatgaccggcaagctgatcagcagctactacaactag

SEQ ID NO: 113509 - DNA, 1560 bp, Artificial Sequence
  derived and/or modified sequence
atgatgcagggcgaggcccaccccagcgccagcctgatcgacagaaccatcaagatgagaaaggagaccgaggccagaaaggtggtgctggcctggggcctgctgaacgtgagcatggccggcatgatctacaccgagatgaccggcaagctgatcagcagctactacaacgtgacctactggcccctgtggtacatcgagctggccctggccagcctgttcagcctgaacgccctgttcgacttctggagatacttcaagtacaccgtggcccccaccagcctggtggtgagccccggccagcagaccctgctgggcctgaagaccgccgtggtgcagaccacccccccccacgacctggccgccacccagatcccccccgccccccccagccccagcatccagggccagagcgtgctgagctacagccccagcagaagccccagcaccagccccaagttcaccaccagctgcatgaccggctacagcccccagctgcagggcctgagcagcggcggcagcggcagctacagccccggcgtgacctacagccccgtgagcggctacaacaagctggccagcttcagccccagcccccccagcccctaccccaccaccgtgggccccgtggagagcagcggcctgagaagcagatacagaagcagccccaccgtgtacaacagccccaccgacaaggaggactacatgaccgacctgagaaccctggacaccttcctgagaagcgaggaggagaagcagcacagagtgaagctgggcagccccgacagcaccagccccagcagcagccccaccttctggaactacagcagaagcatgggcgactacgcccagaccctgaagaagttccagtaccagctggcctgcagaagccaggccccctgcgccaacaaggacgaggccgacctgagcagcaagcaggccgccgaggaggtgtgggccagagtggccatgaacagacagctgctggaccacatggacagctggaccgccaagttcagaaactggatcaacgagaccatcctggtgcccctggtgcaggagatcgagagcgtgagcacccagatgagaagaatgggctgccccgagctgcagatcggcgagctgagccagggcggctgcatgagcagcttcagatggaacagaggcggcgacttcaagggcagaaagtgggacaccgacctgcccaccgacagcgccatcatcatgcacgtgttctgcacctacctggacagcagactgcccccccaccccaagtaccccgacggcaagaccttcaccagccagcacttcgtgcagacccccaacaagcccgacgtgaccaacgagaacgtgttctgcatctaccagagcgccatcaaccccccccactacgagctgatctaccagagacacgtgtacaacctgcccaagggcagaaacaacatgttccacaccctgctgatgttcctgtacatcatcaagaccaaggagagcggcatgctgggcagagtgaacctgggcctgagcggcgtgaacatcctgtggatcttcggcgagtag

SEQ ID NO: 113510 - DNA, 612 bp, Artificial Sequence
  derived and/or modified sequence
atgatgcagggcgaggcccaccccagcgccagcctgatcgacagaaccatcaagatgagaaaggagaccgaggccagaaaggtggtgctggcctggggcctgctgaacgtgagcatggccggcatgatctacaccgagatgaccggcaagctgatcagcagctactacaacgtgacctactggcccctgtggtacatcgagctggccctggccagcctgttcagcctgaacgccctgttcgacttctggagatacttcaagtacaccgtggcccccaccagcctggtggtgagccccggccagcagaccctgctgggcctgaagaccgccgtggtgcagaccacccccccccacgacctggccgccacccagatcccccccgccccccccagccccagcatccagggccagagcgtgctgagctacagccccagcagaagccccagcaccagccccaagttcaccaccagctgcatgaccggctacagcccccagctgcagggcctgagcagcggcggcagcggcagctacagccccggcgtgacctacagccccgtgagcggctacaacaaggtgatgaccctgttcagctgcctggtgaccctgttctag

SEQ ID NO: 113511 - DNA, 1557 bp, Artificial Sequence
  derived and/or modified sequence
atgcaaggtgaggcccaccctagcgcttcactaattgatcggaccatcaagatgcggaaagagactgaggcccgtaaggtcgtcctggcctggggcctcctgaatgtaagtatggccggcatgatctacaccgagatgacaggcaagctgatttcttcttattacaatgtgacttattggccactctggtacatcgagctcgccctcgcaagcctattctctctcaatgccctctttgacttttggcgttacttcaagtatacggtggcacctacctccttggttgtctctcccggccagcagaccctcctcggcctcaagacagcagtcgtgcaaacaacgccccctcatgacctggcagctacccagattccacctgcaccccctagcccctcgattcaagggcagtccgttctatcttactccccctcacggtcaccatccaccagccccaagtttacgacatcctgtatgaccggatatagcccgcagctgcagggcttgtcatctggaggcagcggttcgtatagccccggagtgacgtattcaccagtcagtggttacaacaagctcgcctccttctctccatctccccccagtccctatccaaccaccgtcggcccagtggaatcgagcgggctgcgaagccgctatagatcttcaccgaccgtttacaatagccccacggacaaggaagattatatgactgaccttcgcaccctcgatacattccttcgctctgaggaggaaaaacagcacagggtgaaactggggtcacccgactccacctcgcccagctcatctcccactttttggaattactccaggagtatgggcgattacgcccaaacgctcaagaagtttcaatatcagctagcttgtagaagccaggccccatgcgcaaacaaggatgaggcagacctgtcgtccaaacaggcagcagaagaggtctgggcccgtgtggcaatgaatcggcagctcctggaccacatggactcatggaccgccaagtttaggaactggataaacgagaccatcctagtccctctggtgcaggagattgagtctgtatctacccaaatgcggagaatgggatgtcccgaattacagattggggagttaagccagggtgggtgtatgtcctcttttagatggaacagaggaggagacttcaaaggcaggaagtgggacactgacctgcctaccgacagtgccattattatgcacgtgttttgtacatatctcgatagcagactccctcctcatccaaaatatcccgatggaaagaccttcaccagccagcacttcgtacaaacccccaacaagcccgatgtgacaaatgagaatgtgttttgtatctaccagtccgcgataaaccctcctcactacgagcttatctaccagcgccatgtgtacaatctaccaaaaggacgtaataatatgtttcacaccctgctgatgtttctctacattatcaagacgaaagaaagtggaatgctgggaagagttaacctcggattgagcggggtaaacatcctgtggatcttcggggaatag

SEQ ID NO: 113512 - DNA, 171 bp, Artificial Sequence
  derived and/or modified sequence
atgcagggggaagcacacccaagtgcaagtcttatcgaccggacaattaaaatgcgaaaagagaccgaggcccggaaggttgtgctagcgtggggactgttgaatgtgagtatggctgggatgatttacaccgaaatgactggaaaattaatttccagctattataattag

SEQ ID NO: 113513 - DNA, 1560 bp, Artificial Sequence
  derived and/or modified sequence
atgatgcagggcgaggctcaccccagtgccagcctgatcgatagaactatcaagatgagaaaggagaccgaggccagaaaagtagtgcttgcctgggggctgcttaacgtaagcatggctggcatgatctatactgagatgaccgggaagctcatctctagctattacaacgtgacatactggcctctctggtatattgaattagcgctggcttccctcttttctcttaacgccttattcgacttctggcgctacttcaaatatactgtcgctcccacctccctcgtggtttcccctgggcagcaaaccttactggggctcaaaaccgcggtcgttcaaactactcctcctcacgatctagcagccactcagatacctccagccccgcctagcccctcaattcagggacagtctgtgctcagctactctcccagtcggagtccgtcaacctctcccaagttcaccacaagctgtatgaccggctatagtccccaattacaaggactttctagcggaggttccgggagctactcccccggcgtgacatattctccagtatcagggtacaataaactggccagcttctccccgtctccgcctagcccttaccccacaacagtggggcctgttgaaagctccggcctgagatcgcgctaccggtcaagccccacagtttacaattccccaactgacaaggaagactacatgactgatctgaggactctcgatacttttctgaggtcggaggaagaaaagcagcatagagttaaactgggcagtccggactctaccagtcccagctcaagccctaccttctggaactattcccgctccatgggcgactatgcccagacccttaaaaaattccagtatcagctcgcttgtcggagccaggctccctgtgcaaacaaagatgaagcggacctttcctcaaagcaggcagcagaggaagtctgggccagagttgccatgaacagacagcttctcgaccacatggactcgtggaccgccaaattccggaactggattaacgaaaccatcctagtgcctctggttcaagaaatcgaatctgtgtctacacagatgcgccgcatggggtgtcccgagcttcagatcggagaattgagtcaaggaggctgtatgtcttcattcaggtggaatcggggcggggactttaagggtcgcaaatgggatacagatctgcccactgactccgccatcattatgcatgttttttgcacatatctggattctaggctgcccccacaccctaagtaccctgacggcaaaaccttcacgtcccagcatttcgtccagacaccgaataagcctgacgtaacaaatgagaacgtattttgtatttatcaatctgccattaacccacctcactacgaattgatctatcagcgccatgtatataacctgcctaagggccgcaataatatgttccataccctgctgatgtttctgtatataattaagactaaggagtccggcatgctcggccgcgtcaatttaggattaagcggggtgaacatactctggatctttggcgagtag

SEQ ID NO: 113514 - DNA, 612 bp, Artificial Sequence
  derived and/or modified sequence
atgatgcagggagaggcgcacccatccgcatcattaatcgaccgtaccatcaagatgcggaaggagactgaggctagaaaggtcgtgcttgcatgggggctgcttaacgtgagtatggcaggcatgatatacactgaaatgacgggcaaactgattagctcctactataacgtgacctactggccgctctggtacattgaactggctttggcctccctgtttagcctgaatgcacttttcgatttttggagatactttaaatacactgtcgccccaacctctctggtggttagccccgggcagcaaacactcctgggcctcaaaaccgcagtggtccaaacgactccgccccatgatctcgccgccacccagatcccgccagcaccaccgtccccttcaatacaggggcagtctgtgctatcttactctccatcccgaagcccatcgacaagtcccaaatttaccactagctgcatgacgggctatagtccccagttacaaggtcttagtagcggcggaagcggctcttattctcctggcgttacatactcccccgtttctggatataataaagtgatgacactgtttagctgcctggttaccctgttctag

SEQ ID NO: 113515 - DNA, 1557 bp, Artificial Sequence
  derived and/or modified sequence
atgcagggcgaggcccaccccagcgccagcctgattgacaggaccatcaagatgaggaaggagacagaggccaggaaggtggtgctggcctggggcctgctgaatgtgtccatggccggcatgatctacacagagatgaccgggaagctgatcagcagctactacaacgtgacctactggcccctgtggtacatcgagctggccctggccagcctcttcagcctgaatgccctgtttgacttctggagatacttcaagtacacagtggcccccaccagcctggtggtgtccccaggccagcagaccctgctgggcctgaagacagctgtggtgcagaccaccccacctcatgacctggccgccacccagatccccccagccccacccagccccagcatccagggccagagcgtgctgagctacagccccagccgcagccccagcaccagccccaagttcaccaccagctgcatgacaggctacagcccccagctgcagggcctgagcagcggcggcagcggcagctacagccctggggtgacctacagccctgtgtctggctacaacaagctggccagcttcagccccagcccccccagcccctaccccaccaccgtgggccctgtggagagcagcggcctgcggagccgctaccgcagcagccccaccgtgtacaacagccccacagacaaggaggactacatgacagacctgcggaccctggacaccttcctgcggtctgaggaggagaagcagcaccgggtgaagctgggcagcccagacagcaccagccccagcagcagccccaccttctggaactacagccgctccatgggagactatgcccagaccctgaagaagttccagtaccagctggcctgccgcagccaggccccctgtgccaacaaggatgaggccgacctgagcagcaagcaggccgctgaggaggtgtgggcccgggtggccatgaaccggcagctgctggaccacatggacagctggacagccaagttcaggaactggatcaatgagaccatcctggtgcccctggtgcaggagattgagagcgtgtccacccagatgaggaggatgggctgcccagagctgcagattggagagctgagccagggcggctgcatgagcagcttccgctggaacagaggaggagacttcaagggcaggaagtgggacacagacctgcccacagacagcgccatcatcatgcacgtgttctgcacctacctggacagccggctgcccccccaccccaagtacccagatggcaagaccttcaccagccagcactttgtgcagacccccaacaagccagatgtgaccaatgaaaatgtgttctgcatctaccagagcgccatcaaccccccccactatgagctgatctaccagagacatgtgtacaacctgcccaagggcaggaacaacatgttccacaccctgctgatgttcctgtacatcatcaagaccaaggagagcggcatgctgggccgggtgaacctgggcctgagcggcgtgaacatcctgtggatctttggagagtag

SEQ ID NO: 113516 - DNA, 171 bp, Artificial Sequence
  derived and/or modified sequence
atgcagggcgaggcccaccccagcgccagcctgattgacaggaccatcaagatgaggaaggagacagaggccaggaaggtggtgctggcctggggcctgctgaatgtgtccatggccggcatgatctacacagagatgaccgggaagctgatcagcagctactacaactag

SEQ ID NO: 113517 - DNA, 1560 bp, Artificial Sequence
  derived and/or modified sequence
atgatgcagggcgaggcccaccccagcgccagcctgattgacaggaccatcaagatgaggaaggagacagaggccaggaaggtggtgctggcctggggcctgctgaatgtgtccatggccggcatgatctacacagagatgaccgggaagctgatcagcagctactacaacgtgacctactggcccctgtggtacatcgagctggccctggccagcctcttcagcctgaatgccctgtttgacttctggagatacttcaagtacacagtggcccccaccagcctggtggtgtccccaggccagcagaccctgctgggcctgaagacagctgtggtgcagaccaccccacctcatgacctggccgccacccagatccccccagccccacccagccccagcatccagggccagagcgtgctgagctacagccccagccgcagccccagcaccagccccaagttcaccaccagctgcatgacaggctacagcccccagctgcagggcctgagcagcggcggcagcggcagctacagccctggggtgacctacagccctgtgtctggctacaacaagctggccagcttcagccccagcccccccagcccctaccccaccaccgtgggccctgtggagagcagcggcctgcggagccgctaccgcagcagccccaccgtgtacaacagccccacagacaaggaggactacatgacagacctgcggaccctggacaccttcctgcggtctgaggaggagaagcagcaccgggtgaagctgggcagcccagacagcaccagccccagcagcagccccaccttctggaactacagccgctccatgggagactatgcccagaccctgaagaagttccagtaccagctggcctgccgcagccaggccccctgtgccaacaaggatgaagctgacctgagcagcaagcaggccgctgaggaggtgtgggcccgggtggccatgaaccggcagctgctggaccacatggacagctggacagccaagttcaggaactggatcaatgagaccatcctggtgcccctggtgcaggagattgaatctgtgtccacccagatgaggaggatgggctgcccagagctgcagatcggggagctgagccagggcggctgcatgagcagcttccgctggaacagaggaggagacttcaagggcaggaagtgggacacagacctgcccacagattctgccatcatcatgcacgtgttctgcacctacctggacagccggctgcccccccaccccaagtacccagatggcaagaccttcaccagccagcactttgtgcagacccccaacaagccagatgtgaccaatgaaaatgtgttctgcatctaccagagcgccatcaaccccccccactatgagctgatctaccagagacatgtgtacaacctgcccaagggcaggaacaacatgttccacaccctgctgatgttcctgtacatcatcaagaccaaggagagcggcatgctgggccgggtgaacctgggcctgtctggagtgaacatcctgtggatctttggagagtag

SEQ ID NO: 113518 - DNA, 612 bp, Artificial Sequence
  derived and/or modified sequence
atgatgcagggcgaggcccaccccagcgccagcctgattgacaggaccatcaagatgaggaaggagacagaggccaggaaggtggtgctggcctggggcctgctgaatgtgtccatggccggcatgatctacacagagatgaccgggaagctgatcagcagctactacaacgtgacctactggcccctgtggtacatcgagctggccctggccagcctcttcagcctgaatgccctgtttgacttctggagatacttcaagtacacagtggcccccaccagcctggtggtgtccccaggccagcagaccctgctgggcctgaagacagctgtggtgcagaccaccccacctcatgacctggccgccacccagatccccccagccccacccagccccagcatccagggccagagcgtgctgagctacagccccagccgcagccccagcaccagccccaagttcaccaccagctgcatgacaggctacagcccccagctgcagggcctgagcagcggcggcagcggcagctacagccctggggtgacctacagccctgtgtctggctacaacaaggtgatgaccctcttcagctgcctggtgaccctcttctag

SEQ ID NO: 113519 - DNA, 1557 bp, Artificial Sequence
  derived and/or modified sequence
atgcagggcgaggcccaccccagcgccagcctgatcgaccggaccattaagatgcgcaaagaaacggaggctcggaaagtggtgctagcctggggcttacttaacgtctccatggccggaatgatttacaccgagatgacaggcaagcttatttcatcgtactataatgtcacatactggcctttatggtacattgagctagctttggctagccttttttcactaaatgctcttttcgatttttggaggtactttaaatacaccgtcgcccctacatcactggtcgtgtcccccggtcagcagaccctcctggggcttaaaaccgccgtggtgcagaccacacccccacatgaccttgcagcaacacaaattccaccagcacccccttcccccagcatccagggacagagtgtgttgagttactcacccagcaggagtccttctacgtcccccaagtttacaacatcttgcatgactggctatagtccacagttacagggccttagctcaggcggttctggatcttatagccccggggttacctatagcccagtgtcaggatataataaactggccagtttctccccatccccacccagcccataccccacaacagtagggcccgtggagagtagtgggctacggtcccggtacaggagttcccccacagtgtataacagcccgacagacaaggaggactacatgacagaccttaggactctcgatacttttcttcgcagtgaggaggagaagcaacaccgggtgaagttgggatctcccgatagcaccagcccatcatccagccctactttctggaattatagcaggtcgatgggggactatgctcagacactcaaaaagttccagtaccagctcgcctgccgaagccaggcaccctgtgccaataaggatgaggcagacctcagcagtaagcaggctgctgaagaagtctgggcccgagttgcaatgaaccgccagctgttggatcatatggatagctggactgctaaattccggaattggataaatgagacgatcttggtgcctctggtgcaggagattgagtcggtgtctactcagatgagacgcatgggctgccctgagttacagatcggggagctcagtcaagggggatgcatgtccagctttagatggaatagggggggggatttcaagggtcgaaaatgggacaccgacctgcctaccgacagtgccataattatgcacgtgttttgtacctatcttgacagccggcttcctccccaccctaaatatcccgacggaaagacgttcacatcacagcactttgtgcagactcctaataagcctgacgtgaccaacgaaaacgtcttctgtatctaccagtccgccatcaaccctcctcattacgaattaatctatcagagacacgtttacaaccttcccaagggcagaaacaacatgttccacactttactcatgttcctgtacatcatcaagactaaagaatccggaatgctcgggcgtgtcaaccttggtctctctggagtgaatatactctggatattcggtgagtag

SEQ ID NO: 113520 - DNA, 171 bp, Artificial Sequence
  derived and/or modified sequence
atgcagggcgaggcccaccccagcgccagcctgatcgaccggaccattaaaatgagaaaagaaacagaggccaggaaggtggtgctggcgtggggactccttaacgtgagtatggcagggatgatttatactgagatgactgggaagctgataagctcctactacaattag

SEQ ID NO: 113521 - DNA, 1560 bp, Artificial Sequence
  derived and/or modified sequence
atgatgcagggcgaggcccaccccagcgccagcctgatcgaccggacgatcaaaatgcgaaaggagacagaggcccgaaaagtggtcctggcctggggcctactgaacgtctccatggccggcatgatctacacggagatgaccgggaagttgatctcatcatattataacgtgacctattggccactgtggtatatcgagctggcactggcaagcctcttctcacttaacgcactcttcgatttttggcgctactttaagtataccgtagccccaacctccctggttgtatccccaggtcaacagacgctgctggggttgaagaccgctgtcgtgcagaccacccccccccatgatttggctgcaacacagattccacccgctcccccttcaccctctatccaaggccagtctgtcttatcatatagcccttcaagatccccatccacttcgccaaagtttactacctcctgcatgacagggtattcccctcagttacagggtcttagctcagggggctccggttcttattcccccggtgtgacatactcccctgtcagtggctataataaactcgctagcttcagtccctctcccccaagcccttatccgaccactgtgggaccagtagagtcatctggtcttagatcaaggtacagatcttctccaacagtctataattcgcccacggacaaggaggattatatgacagatttgcgcactctagacacattcctccgctctgaagaggaaaaacaacaccgggtgaaacttggatcccctgatagcacctcaccctctagtagtcctacattctggaactacagtaggagtatgggcgactacgctcagaccctcaagaagtttcagtaccagctggcctgtcggagccaggcaccctgtgccaacaaagatgaggccgacctgtccagcaagcaggccgccgaggaggtttgggccagagtggccatgaatcggcagctcctggaccatatggactcctggaccgctaaattccgaaactggattaatgagactattctggtgccactggtgcaggagattgaatccgtctccacccagatgagaaggatggggtgccccgaattgcaaatcggagagctgtctcaaggcgggtgcatgtcttcttttaggtggaaccgcggtggggactttaaagggaggaaatgggacaccgacttgcctactgactccgctatcattatgcacgtgttctgtacgtaccttgacagtagacttcccccccatccaaagtaccccgacggaaagacatttacaagccagcactttgtacagacaccaaataaacccgatgttaccaatgagaacgttttctgtatctatcagtccgctataaatccgcctcactatgagcttatttatcagcgtcatgtatacaaccttccgaaagggcgcaacaatatgttccacacattgttaatgttcctatatatcatcaagacaaaggagagtgggatgctgggaagggtgaacctgggacttagcggcgtgaatatcctttggatattcggggaatag

SEQ ID NO: 113522 - DNA, 612 bp, Artificial Sequence
  derived and/or modified sequence
atgatgcagggcgaggcccaccccagcgccagcctgatcgaccggactatcaagatgaggaaagaaactgaagctcggaaggtggtgctcgcatggggcctgctgaatgtttcaatggccgggatgatttatactgagatgacagggaagctcatctcatcttattataacgtcacatactggcctttgtggtacattgagctcgccctggcctctctgttttctctcaatgcacttttcgacttctggcgatattttaagtatacggtcgctcccacgtccctggtggtgtcgccagggcagcagaccctgttgggactgaagaccgcggtagtccagactacacctcctcatgacttggccgccacccagatcccacccgcaccgcctagcccaagtattcagggacagagcgtcttgtcatattccccttctcgctccccctccacatcacccaaattcacaacaagctgtatgactggctattctccacagctgcagggtctgtcgagcggaggctccgggtcttatagtcccggagtgacctatagcccggtgagcggatataataaagtgatgaccctgttcagctgcctggtcacattgttctag

SEQ ID NO: 113523 - DNA, 1557 bp, Artificial Sequence
  derived and/or modified sequence
atgcagggcgaagcccacccatccgcttctcttatcgaccggaccataaaaatgcggaaagagactgaggctcgtaaggtggtcctggcctgggggctcttgaatgtgtccatggccggtatgatatataccgaaatgactggaaagctgatctcgagctattacaatgtcacctactggcctttgtggtacatagagctggcactggcctccctgttcagtttgaacgccctgtttgacttttggaggtatttcaaatacactgtggcaccaacgtccctcgtggtatcccctggccagcagacgctgctgggtctcaagacggcagtggtgcagactacaccacctcacgatctcgcagctacgcaaatccccccagccccaccatctccatcaatacagggacagtccgtcttgtcctactctccatcacggtcaccttccacatcacctaagttcactacttcatgcatgactggttatagcccccagttgcagggcctgtcctctgggggaagcgggtcttattcaccaggcgttacctattcaccggtgtccggctacaacaagctggcatcattctccccctcaccgccttctccctaccccacgaccgtcgggcctgtggagtcatctggcctcaggtcccgatatcgcagcagccccacagtctacaactctccaactgacaaagaggactatatgactgatctcagaacattggatactttcttacgttcagaggaagagaaacagcatcgtgtgaagctaggctcccctgattctacaagccctagtagtagtcccacattttggaattattcaaggtctatgggcgattacgcacagaccctgaagaaatttcaataccagcttgcatgcagatcacaggccccttgcgcaaacaaggacgaagctgatctgtctagtaaacaggccgcagaagaggtctgggcccgagtggccatgaacaggcagctgctggatcatatggatagctggactgctaaatttcggaactggatcaacgagactatcctcgtcccacttgtacaggagattgaaagcgtttccacacaaatgcggcgtatgggatgccccgaattacagatcggggagctgagtcagggcggatgtatgagctcttttcgttggaaccgcggtggagacttcaaaggacgcaaatgggataccgatctccccactgactcggcaatcatcatgcacgtgttctgtacttacttggacagccggttaccgccacacccgaaatacccggacggaaagacatttactagtcagcactttgtccaaactcccaataagccagatgtcacaaacgagaatgtgttctgcatttaccagtctgctatcaaccctccacattatgagctcatttaccaaagacacgtttataacctgccaaaagggcgaaataatatgttccatacattgcttatgtttctctatatcattaagactaaagaaagcggaatgctcggccgagtcaacttagggctatccggggttaatatactgtggatttttggtgagtag

SEQ ID NO: 113524 - DNA, 171 bp, Artificial Sequence
  derived and/or modified sequence
atgcaaggcgaggcacatcccagcgcctctctgatcgataggactatcaagatgcgcaaggaaaccgaagcacggaaggtggttttggcctggggtttgttgaacgtgtcgatggccggaatgatttataccgaaatgacagggaagttaatatcctcttactacaactag

SEQ ID NO: 113525 - DNA, 1560 bp, Artificial Sequence
  derived and/or modified sequence
atgatgcagggggaagcccatcccagtgcctcattaattgatcggacgatcaagatgcgtaaagagactgaggccaggaaagtggtgcttgcctgggggctccttaatgtctccatggccggtatgatctatactgaaatgacagggaaattaatttcttcttactataatgtgacctattggcccctgtggtacattgagctggccctggccagcctctttagcctgaatgctctgtttgacttttggcgctatttcaaatatacagttgcacctacatccctcgtggtttcccctgggcagcaaaccctgctgggattaaagaccgctgtggtgcagactactcccccacacgacttggcagcaacccagattccaccggctccaccatccccttccatccaggggcagtccgtgttgagctactccccatctcggagcccctcaaccagcccaaaatttaccactagttgcatgacgggatacagcccacaactacagggcctttcgagcggcggaagcggatcttacagccctggagtaacttatagcccagtttctggttacaataaactggcatcctttagccccagcccgccaagcccctatcccaccacagtggggcctgtggagtcaagtggattacggtctagatatcgctcatcacccacagtgtataattctccaactgacaaggaggactatatgacagatttgcgcacccttgacacttttctccggtctgaggaagagaagcagcacagagtgaaacttggcagccccgattctacatctccatcctcatcacccaccttttggaattattctagatcaatgggagactacgcccagactctgaagaaatttcagtaccagctggcctgcaggtcgcaagcgccatgcgccaataaagatgaagctgacctctcaagtaaacaggcagctgaggaagtgtgggcgagggtagccatgaataggcagctcctcgatcatatggattcatggacagccaagttccgcaactggatcaatgagacaatactggtcccactggtgcaagaaatcgagtccgttagtacccagatgcggaggatgggctgtccggagctgcaaattggcgagttgtcccagggcggttgcatgagctctttccgatggaatagaggaggagattttaaaggcaggaaatgggacactgacctcccgaccgacagtgctatcatcatgcatgtgttttgcacgtacctggactccagacttcctccacatcccaaataccctgacggcaaaactttcaccagccagcatttcgtgcagacacccaacaagcccgatgtgactaacgaaaatgtgttctgcatttatcagagcgcaatcaatcctccgcattatgaactgatttaccagaggcacgtgtataacctgccaaaaggccgaaacaatatgtttcacacgttgttgatgtttctgtacatcattaaaacaaaggagtcggggatgttaggtcgggttaacctaggactaagcggggtaaatattttatggatctttggtgagtag

SEQ ID NO: 113526 - DNA, 612 bp, Artificial Sequence
  derived and/or modified sequence
atgatgcaaggcgaggctcatccgagcgcatccctgatcgataggaccatcaagatgagaaaggaaaccgaggcaagaaaggtcgtgctagcctgggggctgctgaacgtgtctatggccggtatgatctacacagaaatgaccggcaaactgatatcctcctactacaatgttacatactggccactgtggtacatagagctcgcccttgcttcactgttcagcctgaacgctctgttcgatttctggcgttacttcaaatacacagtggcgccaacatcgctcgtcgtgagcccagggcagcagactctcttaggcttgaaaaccgcagtggtacagactactcccccacacgatctcgcagccacccagatcccgcctgctcccccatcaccatcgatacagggccagagcgtgttatcctactcaccaagccgtagcccgagtacctccccaaagttcactacctcgtgcatgactggatacagtccacaattgcaggggctatcatccgggggaagcggctcatacagccctggggtcacctacagccccgtcagcggttacaacaaggtgatgactttattctcatgcctggttaccttgttttag

SEQ ID NO: 113527 - DNA, 1980 bp, Artificial Sequence
  derived and/or modified sequence
ggctttgcgcatgcccagagagagtggcgcgagcctgcgttttccggccagaggacatgatgcagggggaggcacaccctagtgcttcccttattgacagaaccatcaagatgagaaaagaaacagaggctaggaaagtggtcttagcctggggactcctaaatgtatctatggctggaatgatatatactgaaatgactggaaaattgattagttcatactacaatgtgacatactggcccctctggtatattgagcttgcccttgcatctctcttcagccttaatgccttatttgatttttggagatatttcaaatatactgtggcaccaacaagtctggttgttagtcctggacagcaaacacttttagggttgaaaacagctgttgtacagactacgcctccacatgatctggcagcaacccaaatccctcccgctccaccttccccttcaattcagggtcagagtgtgttgagttatagcccttctcgttcgcccagtaccagtcccaagttcaccaccagctgtatgactggttacagccctcagctgcaaggtctgtcctcaggtggcagtggttcttatagccctggagtgacctactcgcccgtcagtggttataataagttggcgagctttagcccctctcctccttctccgtaccctaccactgttggaccagtggagagcagtggattgagatctcgctaccgttcttcacctaccgtctacaactcacctactgacaaagaagactacatgaccgacctacgaactttggatacttttctcagaagtgaagaggagaaacagcatagggttaagctggggagcccagattctacctctccttccagcagtcctactttctggaactatagtcgttctatgggggattatgcacaaactttaaagaagtttcagtatcagcttgcctgtaggtctcaggccccatgtgctaacaaagatgaagccgatctcagctctaaacaagccgcagaagaggtctgggcaagagtggctatgaatagacaacttcttgatcatatggattcatggacagctaaatttagaaattggatcaatgagacaatattagtgccacttgttcaagagattgagtctgtcagcacacagatgagacgaatgggttgtccagagctacagataggagaactatctcagggaggttgtatgagctcatttcgatggaacagaggtggcgacttcaaaggacgaaagtgggatacagacctgcccaccgattctgctatcatcatgcatgtattttgcacctaccttgattccagattacctccacatccgaagtatcccgacggaaaaacttttacttctcagcactttgttcagacaccaaataaaccagatgttacaaatgagaatgttttttgcatttatcagagtgctatcaaccctccccattatgagctcatctaccagcgtcatgtatacaacctgccaaagggcagaaataatatgtttcatacattgttgatgtttctctacatcataaagaccaaagagtcaggaatgcttgggagagttaatcttggtctatctggtgtgaatatattgtggatctttggcgagtagcaagtcatatatttaattctgacatttagactatttcactgaaccagaagtcgaaactaaacatctctgagccactgactcttctgaaataaaatacacatgggtgtatgttacagactctttagatttaacagaaaatgtagctgttatgaaatgtaattgtaaaaatatgtcccgtatcttctatatcgagacattgcctttaattttatatcgcttttcagaaatttcagttgactacaaaactgcaacccttcggatttttattgactcaaaatagtgccattccccttaatgaaatagattttgagtctttttttcattgtaacccccaaatgagaatcatctacctgattcttgtacc

SEQ ID NO: 113528 - DNA, 585 bp, Artificial Sequence
  derived and/or modified sequence
agaggacatggtgcgttttcggggtcgtgtttgtgcttcctgtcttggaatctacgcgggttgtgggagttccgcgcctgctgatctgtcctgggttcagccaagggggatgtggctaggcgttccgcctctctaggggaagggaagaaagaagcaatagggttgctgaagttcgtgcccaggagccggggagggaagctctggactgggaaattgggacgcgggggctgagtggcgcgaaagctattgctctgtcctctgtgggatacgactgcttgtcgctggaacaagttttgcacggtctgtaagagttgagcctagctgaagaaaggaggaattataaatcccaaatgtggaccaaaacaatgcacgttttcccctctctccctcttactccgctcaccaccccatcataaatgcagggggaggcacaccctagtgcttcccttattgacagaaccatcaagatgagaaaagaaacagaggctaggaaagtggtcttagcctggggactcctaaatgtatctatggctggaatgatatatactgaaatgactggaaaattgattagttcatactacaatg

SEQ ID NO: 113529 - DNA, 1961 bp, Artificial Sequence
  derived and/or modified sequence
gcgagcctgcgttttccggccagaggacatgatgcagggggaggcacaccctagtgcttcccttattgacagaaccatcaagatgagaaaagaaacagaggctaggaaagtggtcttagcctggggactcctaaatgtatctatggctggaatgatatatactgaaatgactggaaaattgattagttcatactacaatgtgacatactggcccctctggtatattgagcttgcccttgcatctctcttcagccttaatgccttatttgatttttggagatatttcaaatatactgtggcaccaacaagtctggttgttagtcctggacagcaaacacttttagggttgaaaacagctgttgtacagactacgcctccacatgatctggcagcaacccaaatccctcccgctccaccttccccttcaattcagggtcagagtgtgttgagttatagcccttctcgttcgcccagtaccagtcccaagttcaccaccagctgtatgactggttacagccctcagctgcaaggtctgtcctcaggtggcagtggttcttatagccctggagtgacctactcgcccgtcagtggttataataagttggcgagctttagcccctctcctccttctccgtaccctaccactgttggaccagtggagagcagtggattgagatctcgctaccgttcttcacctaccgtctacaactcacctactgacaaagaagactacatgaccgacctacgaactttggatacttttctcagaagtgaagaggagaaacagcatagggttaagctggggagcccagattctacctctccttccagcagtcctactttctggaactatagtcgttctatgggggattatgcacaaactttaaagaagtttcagtatcagcttgcctgtaggtctcaggccccatgtgctaacaaagatgaagccgatctcagctctaaacaagccgcagaagaggtctgggcaagagtggctatgaatagacaacttcttgatcatatggattcatggacagctaaatttagaaattggatcaatgagacaatattagtgccacttgttcaagagattgagtctgtcagcacacagatgagacgaatgggttgtccagagctacagataggagaactatctcagggaggttgtatgagctcatttcgatggaacagaggtggcgacttcaaaggacgaaagtgggatacagacctgcccaccgattctgctatcatcatgcatgtattttgcacctaccttgattccagattacctccacatccgaagtatcccgacggaaaaacttttacttctcagcactttgttcagacaccaaataaaccagatgttacaaatgagaatgttttttgcatttatcagagtgctatcaaccctccccattatgagctcatctaccagcgtcatgtatacaacctgccaaagggcagaaataatatgtttcatacattgttgatgtttctctacatcataaagaccaaagagtcaggaatgcttgggagagttaatcttggtctatctggtgtgaatatattgtggatctttggcgagtagcaagtcatatatttaattctgacatttagactatttcactgaaccagaagtcgaaactaaacatctctgagccactgactcttctgaaataaaatacacatgggtgtatgttacagactctttagatttaacagaaaatgtagctgttatgaaatgtaattgtaaaaatatgtcccgtatcttctatatcgagacattgcctttaattttatatcgcttttcagaaatttcagttgactacaaaactgcaacccttcggatttttattgactcaaaatagtgccattccccttaatgaaatagattttgagtctttttttcattgtaacccccaaatgagaatcatctacctgattcttgtaccaaaaaaaaa

SEQ ID NO: 113530 - DNA, 1984 bp, Artificial Sequence
  derived and/or modified sequence
gcgagcctgcgttttccggccagaggacatgatgcagggggaggcacaccctagtgcttcccttattgacagaaccatcaagatgagaaaagaaacagaggctaggaaagtggtcttagcctggggactcctaaatgtatctatggctggaatgatatatactgaaatgactggaaaattgattagttcatactacaatgtgacatactggcccctctggtatattgagcttgcccttgcatctctcttcagccttaatgccttatttgatttttggagatatttcaaatatactgtggcaccaacaagtctggttgttagtcctggacagcaaacacttttagggttgaaaacagctgttgtacagactacgcctccacatgatctggcagcaacccaaatccctcccgctccaccttccccttcaattcagggtcagagtgtgttgagttatagcccttctcgttcgcccagtaccagtcccaagttcaccaccagctgtatgactggttacagccctcagctgcaaggtctgtcctcaggtggcagtggttcttatagccctggagtgacctactcgcccgtcagtggttataataaggtaatgactctcttctcttgtctagtcacattattttagaattgagaggtatactaaaaatcatctaatgagtcaaaacttatcagtgagcaaactgagagttgatttgcccagaacacccatttaaaaaccgagaatagaacataatatcttaaacacaacatcttaaaatgaaagagaaaaaattagcatttacagagataacaaacttagtgcaccatctacgatctttcagctgtctttaaaacaagttgaaacaaggataattttttactttagttgcttttactcctgttttccctcttgctttccttcttcatgtgaggcctttgtatacctttttagagttttagtgtggtttatcatgttggagtgtcttctaagctaaaagctgagattgtcacatagtttcttttttttttccaatgagtacaaatgattcttgaatatggacgctttccatggaatagtaggaaccttcatttccactcccacagtaatgtgaaattttgttctaatttttaggattaatagaaacaggattgacaaattgaaattttgactccttcttgaagcataaaactattaatttttttttttttttttttttttgagacagagtctcgctctgttgcctagactggagtgcagtggcgtgatctcagctcactgcaaactccgcctcccgggctcatgccattctcctgcctcagcctcccgagtagctgggactacaggcgtccaccaccgtgcccggctaattttttgtactttcagtagagacggggtttcgccatgttagccaggatggtctcgatctcctgaccttgcgatctgccctcctcgacctcccaaacatttacacatttctttgtaatgaaattccatactactggttatccaatattaaaattaattttggcaggtaatagaattttgaaaattttgtacaagttaaatttttatgagaaagtatatatgtagtgaaaattaataactcataggtaaatgtgacttttaaaaataatttttcacaagatgatactatatgatccttatagaaaattggaaaagtaaaacagaaggaaaattattatagtcctgccacacaaaaataatctgtttaatggctatttaatactcatctaatggatataccataatttactcttgaatgtttaagtcattttcatttataaaaaaactttttaatgtatactaaatagccctgtacataaaattattgataaatttgggatgggagtgtcgatccaaaagaattgtaccaatttacattgtcacagaaatgtagaagagtgtttgttttaccacactgttgaccatcaagttaattttttaaaaaaataaatctctgctaataag

SEQ ID NO: 113531 - protein, 366 aa, Artificial Sequence
  derived and/or modified sequence
MLLSGAPPAAPPAPPPDILAAYRLQRERDFEDPYSGGSSGSAALATPVAPGPTPPPRHGSPPHRLIRVETPGPPAPPADERISGPPASSDRLAILEDYADPFDVQETGEGSAGASGAPEKVPENDGYMEPYEAQKMMAEIRGSKETATQPLPLYDTPYEPEEDGATAEGEGAPWPRESRLPEDDERPPEEYDQPWEWKKERISKAFAAQFEGPEKSCLSPGREEKGRLPPRLSAGNPKSAKPLSMEPSSPLGEWTDPALPLENQVWYHGAISRTDAENLLRLCKEASYLVRNSETSKNDFSLSLKSSQGFMHMKLSRTKEHKYVLGQNSPPFSSVPEIVHHYASRKLPIKGAEHMSLLYPVAIRTL

SEQ ID NO: 113532 - DNA, 1101 bp, Artificial Sequence
  derived and/or modified sequence
atgctgctgagcggcgccccccccgccgccccccccgcccccccccccgacatcctggccgcctacagactgcagagagagagagacttcgaggacccctacagcggcggcagcagcggcagcgccgccctggccacccccgtggcccccggccccacccccccccccagacacggcagccccccccacagactgatcagagtggagacccccggcccccccgccccccccgccgacgagagaatcagcggcccccccgccagcagcgacagactggccatcctggaggactacgccgaccccttcgacgtgcaggagaccggcgagggcagcgccggcgccagcggcgcccccgagaaggtgcccgagaacgacggctacatggagccctacgaggcccagaagatgatggccgagatcagaggcagcaaggagaccgccacccagcccctgcccctgtacgacaccccctacgagcccgaggaggacggcgccaccgccgagggcgagggcgccccctggcccagagagagcagactgcccgaggacgacgagagaccccccgaggagtacgaccagccctgggagtggaagaaggagagaatcagcaaggccttcgccgcccagttcgagggccccgagaagagctgcctgagccccggcagagaggagaagggcagactgccccccagactgagcgccggcaaccccaagagcgccaagcccctgagcatggagcccagcagccccctgggcgagtggaccgaccccgccctgcccctggagaaccaggtgtggtaccacggcgccatcagcagaaccgacgccgagaacctgctgagactgtgcaaggaggccagctacctggtgagaaacagcgagaccagcaagaacgacttcagcctgagcctgaagagcagccagggcttcatgcacatgaagctgagcagaaccaaggagcacaagtacgtgctgggccagaacagcccccccttcagcagcgtgcccgagatcgtgcaccactacgccagcagaaagctgcccatcaagggcgccgagcacatgagcctgctgtaccccgtggccatcagaaccctgtag

SEQ ID NO: 113533 - DNA, 1101 bp, Artificial Sequence
  derived and/or modified sequence
atgttgctgtccggcgccccaccagccgcacctcctgctcctccgccagacatcctggctgcctataggcttcaaagggaaagggacttcgaggacccatacagcggaggctccagcggcagtgcagctctcgctactcccgtcgcacctggacctacaccaccccccaggcacggaagcccaccccaccgcctgatcagagtcgaaacacccgggccccccgcacccccagcggacgagaggatctccggcccccctgcatccagtgacaggctggccatcctcgaagattacgcggacccctttgatgtgcaggagaccggggagggaagtgcaggggccagcggggccccggagaaggtccctgaaaacgacgggtatatggagccatatgaggcgcagaaaatgatggcagagatcagaggatccaaggaaactgcaacacagcccctccctctgtacgatactccatacgaacccgaggaagacggcgccacggccgaaggagaaggcgctccctggccaagggagtccagattgccagaagatgacgagcgcccccccgaggaatacgatcaaccttgggaatggaagaaggagcggatcagcaaggcttttgccgcacagttcgagggtcctgagaagagctgtctatccccgggaagagaggagaaaggccgcttgccaccaaggctgtccgcaggaaacccgaaatctgcaaagcccttgtctatggagccctcttctcccctgggggagtggacagatcctgcactgccactggagaaccaggtgtggtaccatggtgcgatctcaaggaccgacgctgaaaacttactgcggttatgcaaagaggcttcatacctggtccgcaactctgagaccagtaagaatgacttctccctatcgctgaagagctcacaggggttcatgcatatgaagctcagcagaacaaaggaacacaagtatgttctgggccaaaacagccctccattctccagcgtgcccgaaatagtgcatcattacgccagcaggaaactgcccataaaaggcgcagagcatatgtctcttctgtacccagtggccattcgaacactatag

SEQ ID NO: 113534 - DNA, 1101 bp, Artificial Sequence
  derived and/or modified sequence
atgctgctgagcggggcccctcctgctgcccccccagcccctcctccagacatcctggccgcctaccgcctgcagcgggagcgggactttgaggacccctacagcggcggcagcagcggcagcgctgccctggccacccctgtggcccctggccccaccccaccacccaggcatggcagccccccccacaggctcatccgggtggagaccccaggccccccagcccccccagcagatgagcgcatcagcggccccccagccagcagtgaccggctggccatcctggaggactatgctgacccctttgatgtgcaggagactggagagggcagcgctggggccagcggggcccctgagaaggtgcctgaaaatgatggctacatggagccctatgaggcccagaagatgatggccgagatccggggcagcaaggagacagccacccagcccctgcccctgtatgacaccccctatgagcctgaggaggatggagccacagctgagggggagggcgccccctggccccgggagagccggctgcctgaagatgatgagaggcctcctgaggagtatgaccagccctgggagtggaagaaggagcgcatcagcaaggcctttgctgcccagtttgagggccctgagaagagctgcctgagccctggccgggaggagaagggccgcctgcccccccggctgtctgctggcaaccccaagagcgccaagcccctgtccatggagcccagcagccccctgggggagtggacagatcctgccctgcccctggagaaccaggtgtggtaccacggggccatcagcaggacagatgctgagaacctgctgcggctgtgcaaggaggccagctacctggtgagaaattctgagaccagcaagaatgacttcagcctgagcctgaagagcagccagggcttcatgcacatgaagctgagcaggaccaaggagcacaagtatgtgctgggccagaacagcccccccttcagctctgtgcctgagatcgtgcaccactacgccagcaggaagctgcccatcaagggagctgagcacatgagcctgctgtaccctgtggccatccgcaccctgtag

SEQ ID NO: 113535 - DNA, 1101 bp, Artificial Sequence
  derived and/or modified sequence
atgctgctgagcggcgccccccccgccgccccccccgccccccccccggacatcctcgccgcctaccgccttcagcgcgagcgggattttgaggacccatactctggcggctcctcgggtagtgctgcattagccactccagtcgcccctggccctactccacctccgcggcatggatctccccctcatcgcctcatcagggtggaaactccaggtccacctgctcctcctgctgatgaaagaatcagtggcccgcccgcgtcctcagaccggctcgccatccttgaagattatgccgaccccttcgatgtacaagaaacaggagagggcagcgccggagccagcggcgcccccgagaaagtgccagagaacgacgggtacatggagccctatgaggcacagaaaatgatggccgagatcaggggctcaaaggagaccgcaacacagcctctgccactgtacgatacaccatatgaaccggaggaggatggagcaactgccgaaggtgagggggccccttggccccgtgagtcgcgcctacctgaagatgatgaacgccctcctgaggaatacgaccagccgtgggagtggaagaaagagcgaatatctaaggcattcgcagcacagtttgaaggaccggagaagtcatgcctctccccggggagagaggaaaagggaagactgcctcctcgactgtccgcagggaaccccaagagcgcaaagcccctgtccatggaaccatcttctccgttgggcgaatggacggaccccgcgttacctcttgagaatcaagtctggtatcacggcgccatttctcgcactgacgccgagaatctgctgcgactctgcaaggaagcttcttacttggttaggaacagcgagaccagcaagaacgacttttccctgtcgctgaaatcctcacaggggttcatgcacatgaaactgagcagaacaaaggaacataaatacgtgctcgggcagaatagtccaccattctcttccgtgcccgagatcgttcaccattacgcctccaggaaactgcccattaagggagccgagcatatgtcactgctctatcctgtggccatccggaccttgtag

SEQ ID NO: 113536 - DNA, 1101 bp, Artificial Sequence
  derived and/or modified sequence
atgcttcttagcggcgcaccgccagcggcacccccagcccctccgccagatatcctggccgcttataggctgcagcgcgaacgggacttcgaggatccctatagcggtgggtctagcgggagtgccgcactggccactccagtggcccctggccctaccccgcctcctcgccacggaagtcctccacacaggttgattcgcgttgagactcccggaccacccgctccgccagcagacgaacgcatctctggaccacctgcctcctcagatagactggcaatactggaagactatgccgaccctttcgacgtgcaggagacgggcgaggggtcagccggtgcgagcggggcacccgaaaaagtgcctgagaacgacggttatatggagccttatgaggctcagaagatgatggcagagattagaggcagcaaggagacagctacccagcctctgcctctctacgataccccttacgagcccgaagaggacggagccacagccgagggagagggggcaccatggccccgtgagtctaggttgccagaggacgatgagagaccgcctgaggagtatgaccaaccatgggagtggaagaaggaaaggatctccaaagcctttgctgctcaattcgaggggcctgagaaaagctgtctctctcctggcagggaggagaaaggacgtttgccgcctcgcctatctgccggaaatccgaaaagcgcgaaacccctgtccatggagccctcttcccctctgggcgagtggacagaccctgccctcccgcttgagaaccaggtgtggtaccatggcgctatttccagaaccgatgctgaaaacctgctgaggctctgtaaggaagcctcttatctcgttaggaactctgaaactagcaagaacgatttttctctttccttaaaaagctcccagggcttcatgcatatgaagctgtctcggacaaaagaacataaatacgtcctgggacagaattcgcccccatttagctctgtgcctgagattgtgcatcactatgcatcccggaagctgcccattaagggcgctgaacacatgtctcttctgtatccggttgccattcggactctgtag

SEQ ID NO: 113537 - DNA, 1159 bp, Artificial Sequence
  derived and/or modified sequence
cagtctggctggccccatgttactgagcggagctcctccggccgcgccccccgcgccgcccccggacatcctggccgcctacaggctgcagcgggagcgcgacttcgaagacccctactccggggggtcgtccggctccgccgccctcgccacccctgtcgcccccggacccacgccgcccccgcgccacggctctcccccacaccgccttattcgggtcgagaccccggggcccccggcgccgcctgctgatgagcggatctccggaccccccgccagcagcgataggctagctatcctagaagactatgcggacccgtttgatgttcaggagactggcgaaggctcagcaggagcttcaggagccccagagaaggtccctgaaaatgatggctacatggagccctatgaggctcaaaagatgatggccgagatccggggctccaaggagacagcaactcagcccttgcctctgtatgacacaccctatgagccagaggaggatggggccaccgcggaaggtgagggggccccctggccccgggagtcccgcctgccagaggatgatgagaggccccctgaggagtatgaccagccctgggagtggaagaaggagcggatttccaaagcctttgcagcccagtttgaaggaccggagaagagctgcctgtcacctggccgggaggagaaggggcggctacctccccgactctctgcagggaaccccaagtcagccaaacccctaagcatggagcccagcagccccctgggggagtggacagatccagcactgcctctggaaaaccaggtctggtatcacggggccatcagccgaaccgacgccgagaacctgctccggctgtgcaaagaggccagctacctggtgcgcaacagtgagaccagcaagaatgacttctccctctccctcaagagcagccagggattcatgcacatgaagctgtcccgaaccaaggaacacaaatatgtgctgggccagaacagcccgcccttcagcagcgtccctgaaattgtgcaccactatgccagccgcaagctacccattaagggagccgaacacatgtccctgctctaccctgtggccatccggactctttagatgtgaagccagggcactgtgatagacctgtacccagccctg

SEQ ID NO: 113538 - protein, 344 aa, Artificial Sequence
  derived and/or modified sequence
MLSEVLLVSAPGKVILHGEHAVVHGKVALAVSLNLRTFLRLQPHSNGKVDLSLPNIGIKRAWDVARLQSLDTSFLEQGDVTTPTSEQVEKLKEVAGLPDDCAVTERLAVLAFLYLYLSICRKQRWTKEDLELINKWAFQGERMIHGNPSGVDNAVSTWGGALRYHQGKISSLKRSPALQILLTNTKVPRNTRALVAGVRNRLLKFPEIVAPLLTSIDAISLECERVLGEMGEAPAPEQYLVLEELIDMNQHHLNALGVGHASLDQLCQVTRARGLHSKLTGAGGGGCGITLLKPGLEQPEVEATKQALTSCGFDCLETSIGAPGVSIHSATSLDSRVQQALDGL

SEQ ID NO: 113539 - protein, 202 aa, Artificial Sequence
  derived and/or modified sequence
MIHGNPSGVDNAVSTWGGALRYHQGKISSLKRSPALQILLTNTKVPRNTRALVAGVRNRLLKFPEIVAPLLTSIDAISLECERVLGEMGEAPAPEQYLVLEELIDMNQHHLNALGVGHASLDQLCQVTRARGLHSKLTGAGGGGCGITLLKPGLEQPEVEATKQALTSCGFDCLETSIGAPGVSIHSATSLDSRVQQALDGL

SEQ ID NO: 113540 - DNA, 1035 bp, Artificial Sequence
  derived and/or modified sequence
atgctttctgaagtcctactggtttctgctccgggaaaagttatcctgcacggggaacacgccgtcgtccatggtaaagtggcgttggcagtgtctctgaatcttcgcaccttcctacgcctgcagccccatagcaatggcaaggtggatctgagtctgccaaatatcggtattaagagggcatgggacgtggcccgcctgcagtctctggacacaagttttttggagcagggggacgtgactacgccgacatcggaacaggttgagaaacttaaagaggtggccggcctgcccgatgattgcgcagttacggaaagattggctgtgttggctttcttatatctctacctgagcatctgtcgcaagcagagatggaccaaggaggacctggagttgatcaacaagtgggcatttcagggagaacgaatgatccatggtaacccttcaggtgtggataacgctgtctccacctggggtggggcactcaggtatcatcaggggaagattagtagtctgaagcgcagtcccgccctccaaatactcctcacaaacactaaagtacctcgaaatacccgcgccctggtcgccggcgtcaggaataggttgctgaagttccccgagatcgtggcccctttgctgacgagcattgacgctataagtctcgagtgtgagcgggtgctgggcgaaatgggtgaggcaccagctccagaacagtaccttgtgcttgaagaactgatcgacatgaatcagcatcacctcaacgcgctgggggttggacacgcgtccctggatcaactgtgccaagttactcgggcacgcgggcttcatagtaagctcactggggccgggggaggagggtgcgggattactttactgaagcccggattagaacagcccgaagtggaggcaactaagcaggccctgacgtcatgtggtttcgactgcctggagacctctatcggcgctccaggggtttcaatccactccgcaacctccctggattcccgggtccagcaggctctcgacgggctctag

SEQ ID NO: 113541 - DNA, 1035 bp, Artificial Sequence
  derived and/or modified sequence
atgctgagcgaggtgctcctcgtctcagcaccaggtaaagtgatcctgcatggagaacatgccgttgtacatggaaaagtggcactcgccgtgagcttgaatttgcgtacatttctgagacttcagccacacagtaacggcaaagtggatttaagtttacccaacatcggcattaaaagagcctgggacgttgccaggttgcagtcgctggatacatccttcttggaacagggcgacgtaacgacaccgacctccgaacaggtggaaaagcttaaagaggtggccggactgcctgatgactgtgctgttacagagagactggcagtgttagcttttctctacctatacctttcaatttgccgaaagcagagatggacgaaggaagacctcgagttgatcaataagtgggcttttcagggcgaacggatgatccatggtaatccgtccggcgtggataacgcggtgtctacctggggaggagccctgagataccaccagggcaagatcagctcactgaaacgttcccccgcccttcagatcctactcactaatacgaaggtccctcgcaacacgcgggccctcgtcgcgggagtgcgcaacaggttgctgaaattccctgagattgttgccccgttgctgacctcaattgacgccatctcccttgagtgcgaaagggttctaggagagatgggagaggctcccgctcccgaacagtatctagtactggaagagctgatcgatatgaatcagcatcacctgaatgctcttggggtgggacacgcatccctggatcaactgtgccaagtcaccagggctagaggtcttcattccaagctgaccggcgccggcgggggtggctgtgggatcacactgctgaaaccaggcttagagcaaccagaagtggaggctactaagcaggctttgactagctgtggatttgattgcttggagacgtcgataggtgccccgggagtgagcatccacagcgccacgagtctcgattcaagagtccagcaggctttagacggtctatag

SEQ ID NO: 113542 - DNA, 609 bp, Artificial Sequence
  derived and/or modified sequence
atgatccatggcaatccgtcaggcgtcgacaacgcagtgagcacttggggaggcgccctccgatatcaccagggtaaaatcagtagcctgaagagaagccctgcactacagatcctgcttacaaataccaaggtccctcgtaacactagggctctggtggcaggagtgcgtaaccgactgctgaaattccctgaaatagtcgccccccttctcacttcaatcgacgccattagcttggaatgtgagcgtgtgctcggtgaaatgggagaagccccagcccccgaacagtacttggtactggaggagctgatagacatgaaccagcaccacttaaacgctttgggggtaggccatgcctctcttgatcagctgtgtcaggtcacaagggcacggggactgcattcgaagctcactggcgcaggcggagggggctgcgggataaccctcctgaaacctggactggagcagcccgaagtggaggccacaaagcaggccctcacttcatgcggctttgattgtcttgaaacatccatcggcgcccctggagtctcgatccacagcgctacatccttggattcccgagtgcagcaggctctggacggcctgtag

SEQ ID NO: 113543 - DNA, 1035 bp, Artificial Sequence
  derived and/or modified sequence
atgctgtctgaggtgctgctggtgtctgcccctgggaaggtgatcctgcatggagagcacgctgtggtgcacggcaaggtggccctggccgtgtccctgaacctgcggaccttcctgcggctgcagccccacagcaatggcaaggtggacctgagcctgcccaacatcggcatcaagagggcctgggatgtggcccggctgcagagcctggacaccagcttcctggagcagggagatgtgaccacccccaccagcgagcaggtggagaagctgaaggaggtggccggcctgcctgatgactgtgctgtgacagagcggctggccgtgctggccttcctgtacctgtacctgagcatctgcaggaagcagcgctggaccaaggaggacctggagctgatcaacaagtgggccttccagggcgagaggatgattcatggcaaccccagcggcgtggacaatgctgtgtccacctggggcggggccctgcgctaccaccagggcaagatcagcagcctgaagaggagccctgccctgcagatcctgctgaccaacaccaaggtgcccaggaacacccgggccctggtggccggcgtgaggaaccggctgctgaagtttcctgagatcgtggcccccctgctgaccagcattgatgccatcagcctggagtgtgagcgggtgctgggggagatgggagaggccccagcccctgagcagtacctggtgctggaggagctgattgacatgaaccagcaccacctgaatgccctgggcgtgggccacgccagcctggaccagctgtgccaggtgacccgggcccggggcctgcacagcaagctgaccggggccggcggcggcggctgcggcatcaccctgctgaagccaggcctggagcagcctgaggtggaggccaccaagcaggccctgaccagctgtggctttgactgcctggagaccagcatcggggcccctggggtgtccatccacagcgccaccagcctggacagccgggtgcagcaggccctggatggcctgtag

SEQ ID NO: 113544 - DNA, 609 bp, Artificial Sequence
  derived and/or modified sequence
atgattcatggcaaccccagcggcgtggacaatgctgtgtccacctggggcggggccctgcgctaccaccagggcaagatcagcagcctgaagaggagccctgccctgcagatcctgctgaccaacaccaaggtgcccaggaacacccgggccctggtggccggcgtgaggaaccggctgctgaagtttcctgagatcgtggcccccctgctgaccagcattgatgccatcagcctggagtgtgagcgggtgctgggggagatgggagaggccccagcccctgagcagtacctggtgctggaggagctgattgacatgaaccagcaccacctgaatgccctgggcgtgggccacgccagcctggaccagctgtgccaggtgacccgggcccggggcctgcacagcaagctgaccggggccggcggcggcggctgcggcatcaccctgctgaagccaggcctggagcagcctgaggtggaggccaccaagcaggccctgaccagctgtggctttgactgcctggagaccagcatcggggcccctggggtgtccatccacagcgccaccagcctggacagccgggtgcagcaggccctggatggcctgtag

SEQ ID NO: 113545 - DNA, 1770 bp, Artificial Sequence
  derived and/or modified sequence
ggaggggcggcggccggggaggcggcggcggcggcaggattcccaggagccatgttgtcagaagtcctactggtgtctgctccggggaaagtcatccttcatggagaacatgccgtggtacatggcaaggtagcactggctgtatccttgaacttgagaacattcctccggcttcaaccccacagcaatgggaaagtggacctcagcttacccaacattggtatcaagcgggcctgggatgtggccaggcttcagtcactggacacaagctttctggagcaaggtgatgtcacaacacccacctcagagcaagtggagaagctaaaggaggttgcaggcttgcctgacgactgtgctgtcaccgagcgcctggctgtgctggcctttctttacttatacctgtccatctgccggaagcagaggtggaccaaggaggatttggagctaattaacaagtgggccttccaaggggagagaatgattcacgggaacccctccggagtggacaatgctgtcagcacctggggaggagccctccgataccatcaagggaagatttcatccttaaagaggtcgccagctctccagatcctgctgaccaacaccaaagtccctcgcaataccagggcccttgtggctggcgtcagaaacaggctgctcaagttcccagagatcgtggcccccctcctgacctcaatagatgccatctccctggagtgtgagcgcgtgctgggagagatgggggaagccccagccccggagcagtacctcgtgctggaagagctcattgacatgaaccagcaccatctgaatgccctcggcgtgggccacgcctctctggaccagctctgccaggtgaccagggcccgcggacttcacagcaagctgactggcgcaggcggtggtggctgtggcatcacactcctcaagccagggctggagcagccagaagtggaggccacgaagcaggccctgaccagctgtggctttgactgcttggaaaccagcatcggtgcccccggcgtctccatccactcagccacctccctggacagccgagtccagcaagccctggatggcctctgagaggagcccacgacactgcagccccacccagatgcccctttctggattattctgggggctgcagttcgactctgtgctggccagcgagcgcccagctcctgacactgctggagaggccccagccgcttggcgatgccagccaagctctgcagtcccagcggtgggacctagggaggcatggtctgccctctgcatcctctggagccagccgagcaggaggcctaggagggtcctctgagactccagacctgaggcgagaagggctgcttccctgaagctcccacagtcccatctgcttcaggcccccgccttggcctgtgttcttcctggccgcctgggtccaatgctcaggtgctggggcctggttcccggagaagtgtgccttctctctcccttttcagggaccgccccctgtctctcagggccaggcctctccctcctccaggaagccttcccctaccccttgtcgcccctccctcccagagcacctgctgtctgggtggctcactcagcacttggtgtggccttcccttctacctagcgggatggggctcccccaggggctgtcccggaggcggtgggcctggttaaataaggcagggtttatatgcactttcttccgatctgtacctgagaggtttgtggaaaagatggcaaatggggaataaaaagattttgtgtcaa

SEQ ID NO: 113546 - DNA, 1095 bp, Artificial Sequence
  derived and/or modified sequence
aggattcccaggagccatgttgtcagaagtcctactggtgtctgctccggggaaagtcatccttcatggagaacatgccgtggtacatggcaaggtagcactggctgtatccttgaacttgagaacattcctccggcttcaaccccacagcaatgggaaagtggacctcagcttacccaacattggtatcaagcgggcctgggatgtggccaggcttcagtcactggacacaagctttctggagcaaggtgatgtcacaacacccacctcagagcaagtggagaagctaaaggaggttgcaggcttgcctgacgactgtgctgtcaccgagcgcctggctgtgctggcctttctttacttatacctgtccatctgccggaagcagaggtggaccaaggaggatttggagctaattaacaagtgggccttccaaggggagagaatgattcacgggaacccctccggagtggacaatgctgtcagcacctggggaggagccctccgataccatcaagggaagatttcatccttaaagaggtcgccagctctccagatcctgctgaccaacaccaaagtccctcgcaataccagggcccttgtggctggcgtcagaaacaggctgctcaagttcccagagatcgtggcccccctcctgacctcaatagatgccatctccctggagtgtgagcgcgtgctgggagagatgggggaagccccagccccggagcagtacctcgtgctggaagagctcattgacatgaaccagcaccatctgaatgccctcggcgtgggccacgcctctctggaccagctctgccaggtgaccagggcccgcggacttcacagcaagctgactggcgcaggcggtggtggctgtggcatcacactcctcaagccagggctggagcagccagaagtggaggccacgaagcaggccctgaccagctgtggctttgactgcttggaaaccagcatcggtgcccccggcgtctccatccactcagccacctccctggacagccgagtccagcaagccctggatggcctctgagaggagcccacgacactgcagccccacccagatgcccctttctg

SEQ ID NO: 113547 - DNA, 1075 bp, Artificial Sequence
  derived and/or modified sequence
aggattcccaggagccatgttgtcagaagtcctactggtgtctgctccggggaaagtcatccttcatggagaacatgccgtggtacatggcaaggtagcactggctgtatccttgaacttgagaacattcctccggcttcaaccccacagcaatgggaaagtggacctcagcttacccaacattggtatcaagcgggcctgggatgtggccaggcttcagtcactggacacaagctttctgggtggaccaaggaggatttggagctaattaacaagtgggccttccaaggggagagaatgattcacgggaacccctccggagtggacaatgctgtcagcacctggggaggagccctccgataccatcaagggaagatttcatccttaaagaggtcgccagctctccagatcctgctgaccaacaccaaagtccctcgcaataccagggcccttgtggctggcgtcagaaacaggctgctcaagttcccagagatcgtggcccccctcctgacctcaatagatgccatctccctggagtgtgagcgcgtgctgggagagatgggggaagccccagccccggagcagtacctcgtgctggaagagctcattgacatgaaccagcaccatctgaatgccctcggcgtgggccacgcctctctggaccagctctgccaggtgaccagggcccgcggacttcacagcaagctgactggcgcaggcggtggtggctgtggcatcacactcctcaagccagggctggagcagccagaagtggaggccacgaagcaggccctgaccagctgtggctttgactgcttggaaaccagcatcggtgcccccggcgtctccatccactcagccacctccctggacagccgagtccagcaagccctggatggcctctgagaggagcccacgacactgcagccccacccagatgcccctttctggattattctgggggctgcagttcgactctgtgctggccagcgagcgcccagctcctgacactgctggagaggccccagccgcttggcgatgccagccaagctctgcagtcccagcggtgggacct

SEQ ID NO: 113548 - DNA, 1035 bp, Artificial Sequence
  derived and/or modified sequence
atgctgagcgaggtgctgctggtgagcgcccccggcaaggtgatcctccatggggagcacgccgtagttcatgggaaagtagccctggctgtctccctgaacctccgtacctttttaaggctccagccacactccaacggaaaggtagacttgagccttccaaatattggtattaagcgggcctgggatgtggctcggttgcagtcactggacacttcttttctcgagcagggtgatgtgacgacccccacttcagagcaagtcgaaaagctgaaagaggtggccggtctgccggacgattgtgccgtgactgagaggctcgcagttctcgccttcctgtacctatacttgagtatctgccggaagcagcgctggacgaaagaggatctggagcttataaataaatgggctttccaaggggaacgtatgattcatggtaatcctagtggcgtggataatgccgtgagcacttggggtggggctctcagatatcaccaaggaaaaattagttcattgaagagaagccctgcactccagattttgctgactaacacaaaagtgcccagaaacacaagggcccttgtggctggtgtccggaaccgcttactgaaattcccagagattgtggcaccactgctgaccagcattgacgctatctcgctggagtgcgagcgggtgctaggagagatgggtgaagccccagcgcccgagcagtatttagttctggaggaactgatcgatatgaatcagcaccatctgaacgcactgggtgtgggacatgcttctctcgatcagttatgtcaagtaaccagagccagaggtctgcattccaagttgacgggtgccggtggcggcgggtgcggaatcactttacttaaacccggacttgagcagccagaagtggaagcaaccaagcaagcactgacctcatgtgggttcgactgcctggagacgagcatcggcgcgccaggagtctcaatccactcagccaccagcttggacagccgggtccagcaggccttggatggtctgtag

SEQ ID NO: 113549 - DNA, 1035 bp, Artificial Sequence
  derived and/or modified sequence
atgctgagcgaggtgctgctggtgagcgcccccggcaaggtgatcctgcatggagagcacgctgtggtgcacggcaaggtagccctagccgtaagcctcaaccttcgcactttcctgcgtctgcagccccattccaatggaaaggtggacctgtctctgccgaacataggaataaaaagagcctgggatgttgctaggctacagagtctcgacacatcatttctcgagcaaggtgatgttaccacacccacatcggagcaggtggagaagcttaaagaagtagccgggcttccagacgactgtgctgtgacggagcgcttagctgttctggccttcctgtacctctatttatcaatctgcaggaagcagcgctggacaaaagaagatctggaactcatcaacaagtgggcctttcagggagagcgcatgattcacgggaacccatcaggtgttgataatgccgtgagcacctggggcggagctctgaggtaccatcagggtaaaatctccagtctgaaacgcagtcccgccctccagatcctcctgaccaacactaaagtgccacgaaacactcgggctctcgttgcgggcgtacggaatcgactgttgaagttcccggaaattgtggctcctctcttgacctcaattgacgcaatttcgctagagtgcgaacgggtgctcggagagatgggtgaggcccccgcgcctgaacagtaccttgttctggaggagctgatagatatgaatcaacaccatctcaatgccttaggcgtcgggcacgcctcactggaccagctctgccaggtgaccagggctaggggactccactccaaactcactggcgccggcggcggtggatgtgggattacactccttaagccaggtctggagcagcccgaagtcgaggccactaagcaggcactaacatcctgcggctttgattgcctcgagacttcaattggggctcctggcgttagtattcactccgctacatccctcgacagcagagtgcagcaggctcttgatggtttatag

SEQ ID NO: 113550 - DNA, 609 bp, Artificial Sequence
  derived and/or modified sequence
atgatccacggcaaccccagcggcgtggacaacgccgtgagcacctgggggggggctctcaggtaccatcaaggcaagataagctctcttaagcgaagccctgcgctgcagatcttgctgacaaacactaaagtgcccaggaacactcgtgccctggtggcgggtgtcagaaatagacttttgaagttccctgaaattgtggctcctcttctgacaagtatcgacgccatatccctggaatgcgagcgagtccttggggaaatgggagaggcacctgcccctgaacagtacctagtgctcgaggagttgatagacatgaaccagcatcacctgaatgcgctcggggtaggtcatgcatcgttggaccagctgtgccaggtcacaagagcccgaggcctacactccaagctgaccggagccggtggcggaggctgcggcataacccttcttaagcctggcctggagcagcccgaggtcgaagcgacgaaacaggccctgacctcttgcggcttcgattgtctggagacatccattggagctccaggggtgagcatccattccgccaccagcctggacagccgcgtgcagcaggcacttgatggactttag

SEQ ID NO: 113551 - DNA, 1035 bp, Artificial Sequence
  derived and/or modified sequence
atgcttagtgaggtgttattagtcagtgctcctggtaaggtaatcctgcacggagaacacgcagttgtgcatggcaaagtagctctcgccgtgagcctgaatctcaggacgttcctccggctgcaaccacattctaacgggaaggtggatctgagtctccctaacattgggatcaagcgtgcttgggatgttgccagactgcaatctttggatacctcttttttagagcagggggatgtcactacaccgaccagtgagcaggtcgagaaattaaaagaggtggcaggactccctgatgattgcgcggtaacagagcgcttggccgtgctggcgtttctctacctttacctgtccatctgcagaaagcaaagatggaccaaggaagaccttgaacttataaacaagtgggcctttcaaggtgaaagaatgattcatggcaacccatcaggcgtggataacgcagtgagtacctggggaggagccttgagatatcaccaagggaaaataagctccttgaaacgcagccccgcactgcagatactgctgactaacacaaaagtaccacgtaatacaagagctctggtggccggagttcgtaaccgattgcttaagtttcccgaaatcgtggcaccattgctaaccagcatagacgccatcagtctggagtgcgagcgtgttctcggtgagatgggagaagcccctgcccctgaacaatacttagttctggaggaactgattgatatgaaccagcatcacctgaatgctcttggcgtgggacacgcttccttggatcagctctgtcaggtgacaagggcacgcggactccacagtaagcttaccggagcgggtggtgggggttgtggaattactttattaaaacccggattggagcagccggaagttgaggcaacaaagcaagccctaaccagctgtggcttcgactgcctcgagacatccatcggtgcccctggcgtctctatccattccgcaaccagtttggatagccgtgtccagcaggcattggatggattgtag

SEQ ID NO: 113552 - DNA, 1035 bp, Artificial Sequence
  derived and/or modified sequence
atgctttccgaggttctcctcgtttcagcaccgggaaaggtaatcctacatggcgagcacgcggtcgtacatggtaaggtggctctggccgtcagcctaaaccttaggactttccttagactgcagccccactcaaacgggaaggttgacctgagtctgccaaatatcgggataaagcgtgcctgggatgttgccagactccaatccctagacacttccttcttggaacagggggatgtgacaacaccaacctctgagcaagtcgaaaaactgaaggaagtggcagggctgcccgacgattgcgccgttactgaaaggctggctgtgttggctttcctatatttgtacttgagtatctgccgcaagcagcggtggaccaaagaggacctcgaactgattaataaatgggcgttccaaggcgaacgtatgatacacggcaatcccagtggggtggataatgcagtgtctacatggggaggagcgctgcgctaccaccagggaaaaatcagctctttaaagagatcacctgcccttcagattcttttgaccaacacgaaggtgccgagaaacactcgcgctttggtggcaggggtgaggaatcgtctactgaagttccccgaaatcgtagctcccttactgacgtcgatcgatgctatcagtctggaatgcgagagggtgctgggagaaatgggagaggcgcctgctcctgagcagtacctggtcttagaggaacttatcgacatgaatcagcatcatctgaacgccttaggagtcggccatgccagcttggaccagctgtgccaggtgacgagggccagaggcttgcactctaagctcacaggtgcgggtggtggcggatgcggtataaccctgcttaagcctggtctcgagcaacccgaggttgaagcaacgaagcaggccctaacttcctgtggctttgactgcctcgagacaagtattggcgctccaggcgtaagcattcattccgccaccagtctagattcaagagtccagcaagccctggacggtttgtag

SEQ ID NO: 113553 - DNA, 609 bp, Artificial Sequence
  derived and/or modified sequence
atgatccatggcaatccatcaggcgtggataatgctgtgtcaacctggggcggagcccttcgctaccatcagggaaagattagttccctaaaaaggagtcccgcactgcagattctccttaccaatacgaaagttccaaggaacaccagagcgctggtcgccggtgttcgcaaccggctgttgaagttccccgagatagttgcccctctactgacatctatcgatgcaatctctttggagtgcgaaagagtgctaggagaaatgggcgaggccccagcccctgagcagtatctggtgctggaggagctgatagatatgaatcagcaccatctcaatgcactgggtgtcggccatgcgtccctggaccagctgtgccaggtgacccgagccagaggtcttcattcgaagctaaccggagccggaggtggagggtgtggcatcacccttctgaagccaggactagagcagcctgaggtcgaagccaccaagcaagctcttacctcttgcggttttgactgcctcgagaccagtatcggggcaccaggagtgtctattcactcggctacgtccctggattcacgggtccagcaggccctggatggactttag

SEQ ID NO: 113554 - DNA, 1035 bp, Artificial Sequence
  derived and/or modified sequence
atgctgagcgaggtgctgctggtgagcgcccccggcaaggtgatcctgcacggcgagcacgccgtggtgcacggcaaggtggccctggccgtgagcctgaacctgagaaccttcctgagactgcagccccacagcaacggcaaggtggacctgagcctgcccaacatcggcatcaagagagcctgggacgtggccagactgcagagcctggacaccagcttcctggagcagggcgacgtgaccacccccaccagcgagcaggtggagaagctgaaggaggtggccggcctgcccgacgactgcgccgtgaccgagagactggccgtgctggccttcctgtacctgtacctgagcatctgcagaaagcagagatggaccaaggaggacctggagctgatcaacaagtgggccttccagggcgagagaatgatccacggcaaccccagcggcgtggacaacgccgtgagcacctggggcggcgccctgagataccaccagggcaagatcagcagcctgaagagaagccccgccctgcagatcctgctgaccaacaccaaggtgcccagaaacaccagagccctggtggccggcgtgagaaacagactgctgaagttccccgagatcgtggcccccctgctgaccagcatcgacgccatcagcctggagtgcgagagagtgctgggcgagatgggcgaggcccccgcccccgagcagtacctggtgctggaggagctgatcgacatgaaccagcaccacctgaacgccctgggcgtgggccacgccagcctggaccagctgtgccaggtgaccagagccagaggcctgcacagcaagctgaccggcgccggcggcggcggctgcggcatcaccctgctgaagcccggcctggagcagcccgaggtggaggccaccaagcaggccctgaccagctgcggcttcgactgcctggagaccagcatcggcgcccccggcgtgagcatccacagcgccaccagcctggacagcagagtgcagcaggccctggacggcctgtag

SEQ ID NO: 113555 - DNA, 609 bp, Artificial Sequence
  derived and/or modified sequence
atgatccacggcaaccccagcggcgtggacaacgccgtgagcacctggggcggcgccctgagataccaccagggcaagatcagcagcctgaagagaagccccgccctgcagatcctgctgaccaacaccaaggtgcccagaaacaccagagccctggtggccggcgtgagaaacagactgctgaagttccccgagatcgtggcccccctgctgaccagcatcgacgccatcagcctggagtgcgagagagtgctgggcgagatgggcgaggcccccgcccccgagcagtacctggtgctggaggagctgatcgacatgaaccagcaccacctgaacgccctgggcgtgggccacgccagcctggaccagctgtgccaggtgaccagagccagaggcctgcacagcaagctgaccggcgccggcggcggcggctgcggcatcaccctgctgaagcccggcctggagcagcccgaggtggaggccaccaagcaggccctgaccagctgcggcttcgactgcctggagaccagcatcggcgcccccggcgtgagcatccacagcgccaccagcctggacagcagagtgcagcaggccctggacggcctgtag

SEQ ID NO: 113556 - DNA, 816 bp, Artificial Sequence
  derived and/or modified sequence
atgagagccacccccctggccgcccccgccggcagcctgagcagaaagaagagactggagctggacgacaacctggacaccgagagacccgtgcagaagagagccagaagcggcccccagcccagactgcccccctgcctgctgcccctgagcccccccaccgcccccgacagagccaccgccgtggccaccgccagcagactgggcccctacgtgctgctggagcccgaggagggcggcagagcctaccaggccctgcactgccccaccggcaccgagtacacctgcaaggtgtaccccgtgcaggaggccctggccgtgctggagccctacgccagactgcccccccacaagcacgtggccagacccaccgaggtgctggccggcacccagctgctgtacgccttcttcaccagaacccacggcgacatgcacagcctggtgagaagcagacacagaatccccgagcccgaggccgccgtgctgttcagacagatggccaccgccctggcccactgccaccagcacggcctggtgctgagagacctgaagctgtgcagattcgtgttcgccgacagagagagaaagaagctggtgctggagaacctggaggacagctgcgtgctgaccggccccgacgacagcctgtgggacaagcacgcctgccccgcctacgtgggccccgagatcctgagcagcagagccagctacagcggcaaggccgccgacgtgtggagcctgggcgtggccctgttcaccatgctggccggccactaccccttccaggacagcgagcccgtgctgctgttcggctag

SEQ ID NO: 113557 - DNA, 816 bp, Artificial Sequence
  derived and/or modified sequence
atgcgggccacccctctcgctgcccctgccggtagcctgtctcgaaaaaagcgcttagaactggatgacaatctcgatacagagcgccctgtccagaagcgtgccaggtctggtccgcaaccaagattgcccccctgccttctccccctctcccctccgaccgcaccagaccgcgccaccgctgtggccaccgcctctcgcttagggccatatgttctgctggagcctgaagaaggaggccgggcctaccaggccttgcactgtccaacaggaacagagtatacgtgtaaagtctaccctgtccaggaggctctggctgtgctggaaccttatgctcgtctgccgccacacaaacacgtggcgagacctaccgaagtgctagcggggacccagctgctctatgccttttttacccggacccacggcgatatgcattcactagtgagaagccgccaccgcatccccgaacctgaggccgctgtgctgtttcgacagatggccaccgctctggcacactgccatcagcacggtctggtgcttcgcgatttgaagctatgtcgattcgtgttcgccgacagggagaggaaaaagcttgtgctagaaaatttggaggactcctgtgtgcttactggcccggatgacagtttatgggataagcacgcatgtccagcctacgttggtccagagatcctgtccagtcgagcctcatactctgggaaagccgccgatgtctggtctctgggcgtggctctgttcaccatgctagcggggcattacccctttcaggattcggaacccgtgctgttattcggctag

SEQ ID NO: 113558 - DNA, 816 bp, Artificial Sequence
  derived and/or modified sequence
atgagggccacccccctggccgccccagctggcagcctgagcaggaagaagaggctggagctggatgacaacctggacacagagaggcctgtgcagaagagggcccggagcggcccccagccccggctgcccccctgcctgctgcccctgagccccccaacagccccagaccgggccacagctgtggccacagccagccggctgggcccctacgtgctgctggagcctgaggagggcggccgggcctaccaggccctgcactgccccaccggcacagagtacacctgcaaggtgtaccctgtgcaggaggccctggccgtgctggagccctatgcccggctgcccccccacaagcacgtggcccggcccacagaggtgctggccggcacccagctgctgtatgccttcttcaccaggacccatggagacatgcacagcctggtgcgcagccgccaccgcatccctgagcctgaggccgctgtgctcttccggcagatggccacagccctggcccactgccaccagcacggcctggtgctgcgggacctgaagctgtgccgctttgtgtttgctgaccgggagaggaagaagctggtgctggagaacctggaggacagctgtgtgctgaccggcccagatgacagcctgtgggacaagcacgcctgcccagcctacgtgggccctgagatcctgagcagccgggccagctacagcggcaaggccgcagatgtgtggagcctgggcgtggccctcttcaccatgctggccggccactaccccttccaggacagcgagcctgtgctgctgtttggatag

SEQ ID NO: 113559 - DNA, 816 bp, Artificial Sequence
  derived and/or modified sequence
atgcgggccacccccctggccgcccccgccggcagcctgagccggaagaagaggctagagctggatgataaccttgacacagaacgacccgtccaaaagcgggcaagatccggtccccaaccgagattaccaccctgtcttctgccgttgtcaccgcctaccgctcccgatcgagcaaccgctgtggcaacagcttccagactcggtccctatgtcttgttagagcctgaagaggggggccgtgcctaccaagcattgcattgccctacgggcaccgagtatacttgcaaagtctatccagttcaggaagctctcgcagtcctcgagccctatgcccggctgcccccccacaagcatgtcgcccgtccaacagaggttttggctggaacacagttgctctatgctttcttcactaggacccatggagatatgcacagtttagtgagatcccgtcacaggattccagagcccgaagcagccgtgctgttcaggcaaatggccactgcattggcccactgccaccagcatggccttgtattaagggacttaaagctttgccggtttgtgttcgccgaccgggaaaggaaaaagctagtgctggaaaatctcgaggattcttgtgtgcttacagggccggacgatagcctgtgggacaaacatgcatgcccagcctatgtgggcccagaaattcttagcagccgggcctcatattcaggaaaagccgccgacgtgtggtcccttggcgtggctctgttcaccatgctggccggccattatcccttccaggattctgagccagttctcctgtttggctag

SEQ ID NO: 113560 - DNA, 816 bp, Artificial Sequence
  derived and/or modified sequence
atgcgagcaactcctttggccgcaccagccggatccctgagccgcaagaagcgccttgagttggacgacaacctcgacacagagcgacctgtccagaagcgtgcccgtagcggacctcagcctcgcctccctccctgtctcctgcccctgtctccccctacggccccagaccgcgcaacggctgtggccactgcctcacgtttaggtccatatgtcctgctggaacctgaggagggcggaagggcataccaggctctccactgccctaccggcactgagtacacctgcaaggtttatcccgtgcaggaagctctagctgttctcgagccctacgccagactgcctccccataaacacgtggctaggcccacagaggtcctggcaggcacccagctgctgtatgcattttttacacgaacccacggggatatgcacagcctggtcaggtctagacataggatccccgaacctgaagctgcggtactgtttcgacagatggccacagctctggcgcactgccatcagcacggactggttctgcgcgaccttaaactgtgccgcttcgtgtttgctgaccgtgaaagaaaaaaactggtgctggagaatttggaagattcatgcgtgcttaccgggccagatgattcactctgggataaacacgcttgtcccgcttatgtcggaccagagattcttagtagccgggcatcttacagtggaaaagccgctgatgtgtggagcctcggcgtggcactttttaccatgctggcgggtcactatccattccaggatagcgaacccgtgttgctattcggctag

SEQ ID NO: 113561 - DNA, 2499 bp, Artificial Sequence
  derived and/or modified sequence
ggagcttgcagtgagccgagatcgcgccaccgccctccagcctgggcgacagagcaagactctgtctcaaaaaaaaaaaaaaaaagagcaaattttttttccaaggtgatagggagagtccgtggctgatgtctgcactgaccagacgcccctagggggccagcgagggcgggtcccaggtgcagcggatgcagaggagagaggcccgggcgcggcgcgggggatggtgcgatcccgggcccgagggcatcagacggcggctgattagctccggtttgcatcacccggaccgggggattagctccggtttgcatcacccggaccgggggattagctccggtttgcatcacccggaccgggggccgggcgcgcacgagactcgcagcggaagtggaggcggctccgcgcgcgtccgctgctaggacccgggcagggctggagctgggctgggatcccgagctcggcagcagcgcagcgggccggcccacctgctggtgccctggaggctctgagccccggcggcgcccgggcccacgcggaacgacggggcgagatgcgagccacccctctggctgctcctgcgggttccctgtccaggaagaagcggttggagttggatgacaacttagataccgagcgtcccgtccagaaacgagctcgaagtgggccccagcccagactgcccccctgcctgttgcccctgagcccacctactgctccagatcgtgcaactgctgtggccactgcctcccgtcttgggccctatgtcctcctggagcccgaggagggcgggcgggcctaccaggccctgcactgccctacaggcactgagtatacctgcaaggtgtaccccgtccaggaagccctggccgtgctggagccctatgcgcggctgcccccgcacaagcatgtggctcggcccactgaggtcctggctggtacccagctcctctacgcctttttcactcggacccatggggacatgcacagcctggtgcgaagccgccaccgtatccctgagcctgaggctgccgtgctcttccgccagatggccaccgccctggcgcactgtcaccagcacggtctggtcctgcgtgatctcaagctgtgtcgctttgtcttcgctgaccgtgagaggaagaagctggtgctggagaacctggaggactcctgcgtgctgactgggccagatgattccctgtgggacaagcacgcgtgcccagcctacgtgggacctgagatactcagctcacgggcctcatactcgggcaaggcagccgatgtctggagcctgggcgtggcgctcttcaccatgctggccggccactaccccttccaggactcggagcctgtcctgctcttcggcaagatccgccgcggggcctacgccttgcctgcaggcctctcggcccctgcccgctgtctggttcgctgcctccttcgtcgggagccagctgaacggctcacagccacaggcatcctcctgcacccctggctgcgacaggacccgatgcccttagccccaacccgatcccatctctgggaggctgcccaggtggtccctgatggactggggctggacgaagccagggaagaggagggagacagagaagtggttctgtatggctaggaccaccctactacacgctcagctgccaacagtggattgagtttgggggtagctccaagccttctcctgcctctgaactgagccaaaccttcagtgccttccagaagggagaaaggcagaagcctgtgtggagtgtgctgtgtacacatctgctttgttccacacacatgcagttcctgcttgggtgcttatcaggtgccaagccctgttctcggtgctgggagtacagcagtgagcaaaggagacaatattccctgctcacagagatgacaaactggcatccttgagctgacaacacttttccatgaccataggtcactgtctacactgggtacactttgtaccagtgtcggcctccactgatgctggtgctcaggcacctctgtccaaggacaatccctttcacaaacaaaccagctgcctttgtatcttgtaccttttcagagaaagggaggtatccctgtgccaaaggctccaggcctctcccctgcaactcaggacccaagcccagctcactctgggaactgtgttcccagcatctctgtcctcttgattaagagattctccttccaggcctaagcctgggatttgggccagagataagaatccaaactatgaggctagttcttgtctaactcaagactgttctggaatgagggtccaggcctgtcaaccatggggcttctgacctgagcaccaaggttgagggacaggattaggcagggtctgtcctgtggccacctggaaagtcccaggtgggactcttctggggacacttggggtccacaatcccaggtccatactctaggttttggataccatgagtatgtatgtttacctgtgcctaataaaggagaattatgaaataa

SEQ ID NO: 113562 - DNA, 1070 bp, Artificial Sequence
  derived and/or modified sequence
ggaagcctctgggcgtctgcgtgttgccgcgtgttacacgcacgcacgccccttacacaccttttcacagaccccgccgtcggggcgcggccaggtcagatcccttttgatccgggcctgggctgagtgctccccccgggcttcaggtgacgcggccccgcggagcgtggggtcgcccgagttgggctggggaagccagggacggaggtgtccggccgtcacccctagaggagggcgtgcgggggtctgttttgcatgcgagccacccctctggctgctcctgcgggttccctgtccaggaagaagcggttggagttggatgacaacttagataccgagcgtcccgtccagaaacgagctcgaagtgggccccagcccagactgcccccctgcctgttgcccctgagcccacctactgctccagatcgtgcaactgctgtggccactgcctcccgtcttgggccctatgtcctcctggagcccgaggagggcgggcgggcctaccaggccctgcactgccctacaggcactgagtatacctgcaaggtgtaccccgtccaggaagccctggccgtgctggagccctatgcgcggctgcccccgcacaagcatgtggctcggcccactgaggtcctggctggtacccagctcctctacgcctttttcactcggacccatggggacatgcacagcctggtgcgaagccgccaccgtatccctgagcctgaggctgccgtgctcttccgccagatggccaccgccctggcgcactgtcaccagcacggtctggtcctgcgtgatctcaagctgtgtcgctttgtcttcgctgaccgtgagaggaagaagctggtgctggagaacctggaggactcctgcgtgctgactgggccagatgattccctgtgggacaagcacgcgtgcccagcctacgtgggacctgagatactcagctcacgggcctcatactcgggcaaggcagccgatgtctggagcctgggcgtggcgctcttcaccatgctggccggccactaccccttccaggactcggagcctgtcctgctcttcggcaa

SEQ ID NO: 113563 - DNA, 1077 bp, Artificial Sequence
  derived and/or modified sequence
atgcgcgctacacccttggcggccccagcagggtcactctcaaggaaaaagagattggaattagacgacaatcttgatacagaacggcccgtgcagaagcgggctaggagcgggccacagcctagacttcccccttgtctgctgcctttgtccccacccacggcccctgaccgggcaaccgccgttgctaccgcctccaggctgggaccttacgtacttttagaaccagaggaagggggccgcgcatatcaggctctgcattgccctaccggcaccgaatacacttgcaaggtgtaccctgtccaggaggcactggcggttcttgaaccatacgcacgacttcccccgcataagcatgtagcacgccctacggaggtgttagctggtacacaactgttgtatgccttttttacacgtacacacggggacatgcattctctcgtgcggtctaggcacaggattccagagccagaagctgccgtgctgttcagacagatggccaccgccctcgcccattgtcatcagcacgggctggtcctacgcgacctgaaactgtgcagatttgtattcgccgacagagagcgcaagaagctcgtactagaaaatttagaagattcctgtgtgctgacgggccctgacgactctttgtgggataagcatgcttgccccgcctacgtgggaccagaaatactgagcagccgggcatcatactcaggtaaggcggcagacgtatggtccttaggggtggccctgttcaccatgctcgcgggccactacccttttcaggactcggagccagttctgctgttcggaaaaattaggaggggtgcctatgctctgcctgccggcctctccgcgcccgcgagatgcctggtgcggtgcctgttacggagagaacctgccgagcgcttgacggctaccggaatcctgctccacccctggttacgccaggaccccatgcccctcgcccctacacgctcccatctgtgggaggcagctcaggtcgtgcccgatggtctcggactcgacgaggcgcgggaggaggagggtgatcgagaggtagtcctctatgggtag

SEQ ID NO: 113564 - DNA, 1077 bp, Artificial Sequence
  derived and/or modified sequence
atgagggccacccccctggccgccccagctggcagcctgagcaggaagaagaggctggagctggatgacaacctggacacagagaggcctgtgcagaagagggcccggagcggcccccagccccggctgcccccctgcctgctgcccctgagccccccaacagccccagaccgggccacagctgtggccacagccagccggctgggcccctacgtgctgctggagcctgaggagggcggccgggcctaccaggccctgcactgccccaccggcacagagtacacctgcaaggtgtaccctgtgcaggaggccctggccgtgctggagccctatgcccggctgcccccccacaagcacgtggcccggcccacagaggtgctggccggcacccagctgctgtatgccttcttcaccaggacccatggagacatgcacagcctggtgcgcagccgccaccgcatccctgagcctgaggccgctgtgctcttccggcagatggccacagccctggcccactgccaccagcacggcctggtgctgcgggacctgaagctgtgccgctttgtgtttgctgaccgggagaggaagaagctggtgctggagaacctggaggacagctgtgtgctgaccggcccagatgacagcctgtgggacaagcacgcctgcccagcctacgtgggccctgagatcctgagcagccgggccagctacagcggcaaggccgcagatgtgtggagcctgggcgtggccctcttcaccatgctggccggccactaccccttccaggacagcgagcctgtgctgctgtttgggaagatccggcggggggcctatgccctgcctgctggcctgagcgccccagcccgctgcctggtgcgctgcctgctgcggcgggagcctgctgagcggctgacagccaccggcatcctgctgcacccctggctgcggcaggaccccatgcccctggcccccaccaggagccacctgtgggaggccgcccaggtggtgcctgatggcctgggcctggatgaggcccgggaggaggagggggaccgggaggtggtgctgtatggatag

SEQ ID NO: 113565 - DNA, 1077 bp, Artificial Sequence
  derived and/or modified sequence
atgcgggccacccccctggccgcccccgccggcagcctgagccggaagaaacgcttggaactggatgataacctggatactgagcgtcctgtgcagaagcgtgcccggtcagggcctcagcctagattacccccatgccttttgcccctctccccccctactgcacccgaccgcgccacagcagtcgccaccgcctcccgtttgggaccttacgtcctattggagccagaagagggcggtagggcatatcaagccctgcactgtccaactgggacagaatacacctgtaaagtgtaccccgtgcaggaagccctggctgtgttggagccgtacgctcgcctgccccctcataagcatgtcgccaggccaacagaggtcctagctgggacccagcttttgtacgctttttttacacggacccacggagacatgcacagcctcgttcgcagtcgtcacagaatacccgagcccgaggcagctgtgcttttccggcagatggctacagctctcgctcactgccaccagcacggcttagtcttgcgagacttgaaactgtgcagatttgtcttcgcggacagagagagaaaaaagctggtcttagaaaacttggaagactcctgtgtgctgactgggccggacgatagcttatgggataaacatgcgtgtcctgcctacgtgggtccggaaatcctgtccagcagagcctcctacagcgggaaagcagcagatgtctggtctctgggcgtcgctctctttacaatgttggccggccattatccatttcaggactcggagcctgtgctgctttttggaaagatcagacgaggagcttatgccctgccagcaggactttccgctcccgcgcgatgcctagttagatgtctgctgcgaagggagccagctgagaggttgacagcgacgggaatcctgctgcatccttggttgcggcaggaccccatgccactggctcccacccggagtcacttgtgggaggccgcacaagtagtcccagatggcctgggcctcgatgaggcccgcgaagaagagggggacagggaagtggtgctttatggatag

SEQ ID NO: 113566 - DNA, 1077 bp, Artificial Sequence
  derived and/or modified sequence
atgagggccactcccctggccgcaccggcaggttcattgtccaggaaaaagcggttggagctggacgataatctggacaccgagagacctgtgcagaagcgagctcgctccgggcctcaaccccgactccccccatgcttgctgccactgtccccccctactgcaccagacagggccacggccgtagctacagcaagtcgactcggtccctatgtgttactggagcctgaagaggggggtagagcataccaggccctccattgtccaacgggaaccgagtacacttgcaaggtctatcccgttcaggaggctttagctgtccttgagccttatgccagattgcctccacataaacacgtggccaggcctactgaggtccttgcaggtacacagctgctttatgctttctttacacgcacccatggcgatatgcatagcctcgtgaggagtcgtcacaggattccagagcccgaggccgcagtgctattccgccagatggctacggctctggcgcattgtcatcagcacggccttgtgctgagggacctgaagctctgcagattcgtctttgccgaccgtgagcgcaagaagctcgtcctggaaaacctagaagattcttgtgtgctgaccggcccagatgactctctgtgggacaaacacgcatgccctgcatacgtgggcccagagatactgtcaagccgcgctagttactcaggaaaagccgctgacgtctggtcactgggagtcgccctgttcactatgcttgccggacactatccctttcaagattctgagccagtgctgctgtttggaaaaatccgtcggggagcttacgctctgcccgcaggtctgtctgccccagcccgatgcctcgttcgctgtctcctacggagggagccagccgagcggctgacagcgacagggatattgctgcacccttggcttagacaagatccgatgcctttggctccgactcgaagccacctatgggaagctgcccaggtcgtacctgatggtctcggcctcgacgaagccagggaggaggaaggagatcgcgaggttgtcttatacgggtag

SEQ ID NO: 113567 - DNA, 1077 bp, Artificial Sequence
  derived and/or modified sequence
atgagagccacccccctggccgcccccgccggcagcctgagcagaaagaagagactggagctggacgacaacctggacaccgagagacccgtgcagaagagagccagaagcggcccccagcccagactgcccccctgcctgctgcccctgagcccccccaccgcccccgacagagccaccgccgtggccaccgccagcagactgggcccctacgtgctgctggagcccgaggagggcggcagagcctaccaggccctgcactgccccaccggcaccgagtacacctgcaaggtgtaccccgtgcaggaggccctggccgtgctggagccctacgccagactgcccccccacaagcacgtggccagacccaccgaggtgctggccggcacccagctgctgtacgccttcttcaccagaacccacggcgacatgcacagcctggtgagaagcagacacagaatccccgagcccgaggccgccgtgctgttcagacagatggccaccgccctggcccactgccaccagcacggcctggtgctgagagacctgaagctgtgcagattcgtgttcgccgacagagagagaaagaagctggtgctggagaacctggaggacagctgcgtgctgaccggccccgacgacagcctgtgggacaagcacgcctgccccgcctacgtgggccccgagatcctgagcagcagagccagctacagcggcaaggccgccgacgtgtggagcctgggcgtggccctgttcaccatgctggccggccactaccccttccaggacagcgagcccgtgctgctgttcggcaagatcagaagaggcgcctacgccctgcccgccggcctgagcgcccccgccagatgcctggtgagatgcctgctgagaagagagcccgccgagagactgaccgccaccggcatcctgctgcacccctggctgagacaggaccccatgcccctggcccccaccagaagccacctgtgggaggccgcccaggtggtgcccgacggcctgggcctggacgaggccagagaggaggagggcgacagagaggtggtgctgtacggctag

SEQ ID NO: 113568 - protein, 55 aa, Artificial Sequence
  derived and/or modified sequence
MLAGGVRSMPSPLLACWQPILLLVLGSVLSGSATGCPPRCECSAQDRAVLCHRKR

SEQ ID NO: 113569 - DNA, 168 bp, Artificial Sequence
  derived and/or modified sequence
atgcttgccggaggagtccggtcgatgccttctcccttgctggcgtgttggcagccaatcctgctgctcgtcctgggctctgttctatccgggtccgccaccggctgccccccaagatgtgagtgtagtgcacaggatcgagcggtcctttgtcaccgcaaacgctag

SEQ ID NO: 113570 - DNA, 1845 bp, Artificial Sequence
  derived and/or modified sequence
atgttagctggaggtgtcagatccatgccctccccacttctggcatgttggcagccaattctcctccttgtgctaggcagcgtcctctctggctccgctacgggttgtccgccccgatgtgaatgttcagcccaggatagagcggtcctttgccaccgcaaaagattcgtcgccgtgccagaggggatcccaactgagacgagactcctcgaccttgggaagaatcggatcaagaccctaaaccaagacgaatttgccagcttcccacatctggaggagcttgagctcaatgagaatatcgtgtcagccgtggaaccaggcgcattcaataacctctttaacctacggacactgggccttaggagcaaccggctcaaactcattccattaggcgtcttcactgggctgagtaacctgaccaagctggatatttctgaaaataagatcgtgatcttgctcgattatatgttccaggacctgtataatctcaagagcctggaggtgggagacaacgatctagtgtacatcagccatagggcattttccggtctgaactcgttagagcagctgacccttgaaaaatgtaacctgacttccatcccgactgaagccttgagccatctgcacggcctgatagtcctcagattaagacatctgaacatcaacgctatccgtgactactcattcaagcgactgtaccgcctgaaggttcttgaaatctcccactggccgtacttggatacaatgacccctaactgcttgtatgggcttaacttgacttccctgtctatcacacactgcaacctcaccgctgttccttatcttgcggtcaggcacctggtatatctgagattcctgaatctgtcttataacccaatcagcacaatcgagggttcgatgctacacgagctgctgagactgcaggagatccagttggtaggaggccaactcgccgtagttgagccctatgcttttcgagggcttaattacctccgcgtgttaaacgtgagtggcaaccaactcacgactcttgaggagagcgtgtttcactccgtcgggaacctcgaaacccttatcctcgactccaaccccctggcctgcgattgccgactgctgtgggtgttccggcggcgatggagactaaatttcaatcgtcagcagccaacatgcgccacccctgagtttgttcagggaaaggagttcaaggactttcctgacgtactgttaccgaactattttacgtgcagacgcgcacggattcgcgacaggaaagcgcagcaggtctttgtggacgaaggtcatacagtgcagttcgtatgcagagcggatggagatccaccgcctgccattctctggctgagcccccgcaaacacctagtgtctgcgaaatccaacggtaggttgaccgttttcccagatggaactctggaggtaagatatgcccaggtacaagacaacgggacctacctatgtatcgcagccaacgctgggggcaacgactccatgcctgcccacctccatgtccggtcttacagtccggattggccacaccagcccaataaaacgtttgcctttatctcaaatcaacctggcgagggggaagccaattccacccgcgcaacagtcccctttcctttcgatattaagaccctgataatcgccacaaccatgggctttatctcattcttaggcgtcgttctcttttgcctcgttttgctattcctttggtcgagagggaaaggcaacaccaagcacaatatcgaaattgagtacgtgcctcgaaagtcagacgccggaatttcctcggccgatgcgcctcggaaatttaatatgaaaatgatttag

SEQ ID NO: 113571 - DNA, 168 bp, Artificial Sequence
  derived and/or modified sequence
atgctggccggcggcgtgcgctccatgcccagccccctgctggcctgctggcagcccatcctgctgctggtgctgggctctgtgctgagcggcagcgccaccggctgccccccaagatgtgaatgttctgcccaggacagagctgtgctgtgccacaggaagaggtag

SEQ ID NO: 113572 - DNA, 1845 bp, Artificial Sequence
  derived and/or modified sequence
atgctggccggcggcgtgcgctccatgcccagccccctgctggcctgctggcagcccatcctgctgctggtgctgggctctgtgctgagcggcagcgccaccggctgccccccaagatgtgaatgttctgcccaggacagagctgtgctgtgccacaggaagagatttgtggccgtgcctgagggcatccccacagagacccggctgctggacctgggcaagaaccgcatcaagaccctgaaccaggatgaatttgccagcttcccccacctggaggagctggagctgaatgaaaacatcgtgtctgctgtggagcccggggccttcaacaacctcttcaacctgcggaccctgggcctgcggagcaaccggctgaagctgatccccctgggcgtcttcaccggcctgagcaacctgaccaagctggacatcagcgagaacaagatcgtcatcctgctggactacatgttccaggacctgtacaacctgaagagcctggaggtgggggacaatgacctggtgtacatcagccaccgggccttcagcggcctgaacagcctggagcagctgaccctggagaagtgcaacctgaccagcatccccacagaggccctgagccacctgcacggcctcatcgtgctgcggctgcggcacctgaacatcaatgccatccgggactacagcttcaagaggctgtaccgcctgaaggtgctggagatcagccactggccctacctggacaccatgacccccaactgcctgtatggcctgaacctgaccagcctgagcatcacccactgcaacctgacagctgtgccctacctggccgtgcgccacctggtgtacctgcgcttcctgaacctgagctacaaccccatcagcaccatcgagggctccatgctgcacgagctgctgcggctgcaggagatccagctggtgggcggccagctggccgtggtggagccctatgccttccggggcctgaactacctgcgggtgctgaatgtgtctggcaaccagctgaccaccctggaggagagcgtcttccacagcgtgggcaacctggagaccctcatcctggacagcaaccccctggcctgtgactgccgcctgctgtgggtgttcagaagacgctggaggctgaacttcaaccggcagcagcccacctgtgccaccccagagtttgtgcagggcaaggagttcaaggacttcccagatgtgctgctgcccaactacttcacctgccggcgggcccgcatccgggacaggaaggcccagcaggtgtttgtggatgagggccacacagtgcagtttgtgtgcagagcagatggagaccccccaccagccatcctgtggctgagccccaggaagcacctggtgtctgccaagagcaatggccgcctgactgtgtttcctgatggcaccctggaggtgcgctatgcccaggtgcaggacaatggcacctacctgtgcatcgccgccaatgctggaggaaatgacagcatgcctgcccacctgcacgtgcgcagctacagcccagactggccccaccagcccaacaagacctttgccttcatcagcaaccagcccggggagggggaggccaacagcacccgggccaccgtgcccttcccctttgacatcaagaccctcatcatcgccaccaccatgggcttcatctccttcctgggcgtggtgctcttctgcctggtgctgctcttcctgtggagccggggcaagggcaacaccaagcacaacattgaaattgaatatgtgcccaggaagagtgatgctggcatcagcagcgcagatgcccccaggaagttcaacatgaagatgatctag

SEQ ID NO: 113573 - DNA, 168 bp, Artificial Sequence
  derived and/or modified sequence
atgctggccggcggcgtgcggagcatgcccagccccctgctggcctgctggcaacccattttgttgctcgtgctcggttctgtcctgtccggtagtgccactgggtgtccccctcggtgcgagtgctctgcccaggatcgagctgtattatgtcaccgcaagagatag

SEQ ID NO: 113574 - DNA, 1845 bp, Artificial Sequence
  derived and/or modified sequence
atgctggccggcggcgtgcggagcatgcccagccccctgctggcctgctggcagcctattctcctgctggtgctcgggtcggtcctgagtggctccgccacaggatgtccgcccaggtgtgagtgttccgcccaggacagagccgtgctgtgccatcgaaagagatttgttgccgtaccagagggtattcccaccgagacaaggctgctggatctcggtaagaaccgaattaaaacgcttaaccaggacgagttcgccagttttccccatttggaggagctcgagcttaacgaaaatatcgtctctgctgtggaacccggcgcctttaacaacctgtttaacttacggactctgggtctcagatccaatcgccttaagctcattcccctgggcgtgtttacgggactgtctaatctgacgaaactcgacattagtgagaacaaaatcgtgatactcctggactatatgttccaggacctctacaacctgaaatctctggaggtgggggataatgacttagtctacatatcccatcgtgcgtttagcggtctgaacagtctcgagcagttaactttggagaagtgtaatctcacatctattcctacagaagcactatctcatcttcatggtctgattgtacttcgactgagacatctgaatatcaatgccataagagattatagctttaaaaggctgtaccggctcaaagtcctcgagatctcccactggccttatctggatacaatgactcccaattgcctttatggcctgaatttgacctcattatccataactcattgtaatctgaccgcagtcccttacctcgccgttagacatctcgtgtacctacgctttctcaacctgagctacaaccccatcagcaccatcgagggttctatgcttcacgagcttctcaggcttcaggaaatccagttggtgggaggccagttggccgtcgtcgagccatacgcctttcgcgggctgaattaccttcgtgtgcttaacgtttcaggtaatcagctcaccaccctggaggagagcgtgttccactcggttgggaatctcgagacactcattcttgactccaacccactcgcctgtgactgtaggctgctgtgggtgtttcgccggagatggcgactcaattttaacagacaacagcctacttgtgccacacctgaattcgtgcaaggcaaagaattcaaagattttcctgatgtcctcttacctaactatttcacatgcaggcgtgccagaatccgcgaccggaaagctcagcaggtctttgtggacgagggccacacagtgcagtttgtttgcagagctgatggcgacccgccccccgccattctgtggctgtctcctcggaagcaccttgtgtccgccaagagcaatgggcgcctgaccgtgttcccagacggcacactggaagttagatacgcccaggttcaggacaatggcacctatctctgtatcgccgccaatgcaggtggaaacgacagcatgcccgcccacctccatgtcagatcctactctccggactggccccatcagcccaacaagaccttcgccttcatttctaatcagcccggtgagggcgaggcaaactcaacccgcgccactgttccattcccatttgatatcaagacacttataattgctactactatgggatttatttctttcctcggcgtggttctgttttgtttagtgctcctgttcctgtggagtcggggcaagggcaatactaagcacaacattgaaatcgaatacgttcccaggaagagcgatgctggcatctcaagcgccgatgcccctagaaaatttaacatgaagatgatttag

SEQ ID NO: 113575 - DNA, 168 bp, Artificial Sequence
  derived and/or modified sequence
atgctcgcaggcggagttaggagcatgccctccccattgctcgcctgttggcagcccatactgctacttgtactcggatcagtgctaagcgggtccgccacggggtgcccacccagatgcgagtgttcagctcaggacagggccgtgctttgtcatcggaagcgttag

SEQ ID NO: 113576 - DNA, 1845 bp, Artificial Sequence
  derived and/or modified sequence
atgctggctggtggggtaaggtccatgcctagccctctcttagcttgttggcagccgatactgcttctcgtcctgggatctgtactgtcaggatctgccacgggctgtccccctaggtgtgagtgtagcgctcaggatagagccgtactttgtcaccggaagcggtttgtggcggttcccgagggaatccccaccgagaccaggctccttgacctagggaagaatcgaatcaagactctcaatcaggatgagtttgctagctttcctcatctggaggagctcgagctaaatgaaaatattgtgagcgccgtggagcctggcgcttttaataatctcttcaaccttcgaactttaggtttaaggtcaaacagactcaagcttattccccttggggtattcactggcctgagcaacttgacaaagttggacatctctgaaaacaagatagtgatattgcttgactacatgttccaggacctctataatcttaaatccctcgaagtcggggataacgacctcgtgtatattagtcatcgggcttttagtggactgaacagtttggagcaactcaccttggagaaatgtaacctgacttctatcccaaccgaggctctgtctcatctgcatggacttatagttctcaggcttaggcacctgaatattaacgcaatccgggactattcattcaaacgcttataccgcctcaaggtcttggaaatatctcactggccatatctggatactatgacccccaattgcttatacgggctgaatctgacgtcactatccataacacactgcaacctcaccgccgttccatatctggccgtccggcacctggtttatctgcggtttctgaacttaagctataaccccatttctacaatcgaagggagcatgctgcatgagctcttacgcctgcaagaaatacagctggtggggggacaactggcagtggtggaaccctacgcctttagagggctgaactacctgcgcgttctgaacgtgagcggaaaccagctgaccaccctcgaggagtcagtgtttcattctgtggggaacctggagacactcatccttgattcaaaccctctcgcctgcgactgtaggcttctttgggtgtttcggcgacgctggcggctaaatttcaaccggcagcagcccacttgtgccactcccgagtttgtacaaggcaaggagtttaaagactttcctgatgttctgctgcctaattatttcacatgcaggcgcgcacgcatcagagataggaaagcccagcaagtgtttgttgatgaaggacataccgttcagttcgtgtgcagagcagatggcgatcctcctcctgctattctgtggcttagcccaagaaaacatctggtttctgccaagtccaacggacgtctgacagtgttcccagatggaacactggaggtgcggtatgcccaggtgcaggataatggcacttacttgtgtattgccgcaaatgctggcggtaatgacagtatgcctgcccacttgcacgtgaggagctactcacccgattggcctcaccagcccaataaaaccttcgctttcatatccaaccagccaggggagggtgaggcaaatagtactagagctactgtaccatttcctttcgacatcaaaacgctgatcatcgcaacaactatggggttcatcagtttccttggcgtcgtgctcttctgtcttgtgctcctgttcttgtggagccggggaaaaggcaatactaagcataacatcgaaatcgagtatgtccctagaaaatctgacgccggtatctcctccgctgatgctcctcggaagtttaatatgaagatgatctag

SEQ ID NO: 113577 - DNA, 168 bp, Artificial Sequence
  derived and/or modified sequence
atgctggccggcggcgtgagaagcatgcccagccccctgctggcctgctggcagcccatcctgctgctggtgctgggcagcgtgctgagcggcagcgccaccggctgcccccccagatgcgagtgcagcgcccaggacagagccgtgctgtgccacagaaagagatag

SEQ ID NO: 113578 - DNA, 1845 bp, Artificial Sequence
  derived and/or modified sequence
atgctggccggcggcgtgagaagcatgcccagccccctgctggcctgctggcagcccatcctgctgctggtgctgggcagcgtgctgagcggcagcgccaccggctgcccccccagatgcgagtgcagcgcccaggacagagccgtgctgtgccacagaaagagattcgtggccgtgcccgagggcatccccaccgagaccagactgctggacctgggcaagaacagaatcaagaccctgaaccaggacgagttcgccagcttcccccacctggaggagctggagctgaacgagaacatcgtgagcgccgtggagcccggcgccttcaacaacctgttcaacctgagaaccctgggcctgagaagcaacagactgaagctgatccccctgggcgtgttcaccggcctgagcaacctgaccaagctggacatcagcgagaacaagatcgtgatcctgctggactacatgttccaggacctgtacaacctgaagagcctggaggtgggcgacaacgacctggtgtacatcagccacagagccttcagcggcctgaacagcctggagcagctgaccctggagaagtgcaacctgaccagcatccccaccgaggccctgagccacctgcacggcctgatcgtgctgagactgagacacctgaacatcaacgccatcagagactacagcttcaagagactgtacagactgaaggtgctggagatcagccactggccctacctggacaccatgacccccaactgcctgtacggcctgaacctgaccagcctgagcatcacccactgcaacctgaccgccgtgccctacctggccgtgagacacctggtgtacctgagattcctgaacctgagctacaaccccatcagcaccatcgagggcagcatgctgcacgagctgctgagactgcaggagatccagctggtgggcggccagctggccgtggtggagccctacgccttcagaggcctgaactacctgagagtgctgaacgtgagcggcaaccagctgaccaccctggaggagagcgtgttccacagcgtgggcaacctggagaccctgatcctggacagcaaccccctggcctgcgactgcagactgctgtgggtgttcagaagaagatggagactgaacttcaacagacagcagcccacctgcgccacccccgagttcgtgcagggcaaggagttcaaggacttccccgacgtgctgctgcccaactacttcacctgcagaagagccagaatcagagacagaaaggcccagcaggtgttcgtggacgagggccacaccgtgcagttcgtgtgcagagccgacggcgaccccccccccgccatcctgtggctgagccccagaaagcacctggtgagcgccaagagcaacggcagactgaccgtgttccccgacggcaccctggaggtgagatacgcccaggtgcaggacaacggcacctacctgtgcatcgccgccaacgccggcggcaacgacagcatgcccgcccacctgcacgtgagaagctacagccccgactggccccaccagcccaacaagaccttcgccttcatcagcaaccagcccggcgagggcgaggccaacagcaccagagccaccgtgcccttccccttcgacatcaagaccctgatcatcgccaccaccatgggcttcatcagcttcctgggcgtggtgctgttctgcctggtgctgctgttcctgtggagcagaggcaagggcaacaccaagcacaacatcgagatcgagtacgtgcccagaaagagcgacgccggcatcagcagcgccgacgcccccagaaagttcaacatgaagatgatctag

SEQ ID NO: 113579 - protein, 358 aa, Artificial Sequence
  derived and/or modified sequence
MRATPLAAPAGSLSRKKRLELDDNLDTERPVQKRARSGPQPRLPPCLLPLSPPTAPDRATAVATASRLGPYVLLEPEEGGRAYQALHCPTGTEYTCKVYPVQEALAVLEPYARLPPHKHVARPTEVLAGTQLLYAFFTRTHGDMHSLVRSRHRIPEPEAAVLFRQMATALAHCHQHGLVLRDLKLCRFVFADRERKKLVLENLEDSCVLTGPDDSLWDKHACPAYVGPEILSSRASYSGKAADVWSLGVALFTMLAGHYPFQDSEPVLLFGKIRRGAYALPAGLSAPARCLVRCLLRREPAERLTATGILLHPWLRQDPMPLAPTRSHLWEAAQVVPDGLGLDEAREEEGDREVVLYG

SEQ ID NO: 113580 - protein, 385 aa, Artificial Sequence
  derived and/or modified sequence
MVLMHLAVKNNRMSANNDHFLTPTWQQMRATPLAAPAGSLSRKKRLELDDNLDTERPVQKRARSGPQPRLPPCLLPLSPPTAPDRATAVATASRLGPYVLLEPEEGGRAYQALHCPTGTEYTCKVYPVQEALAVLEPYARLPPHKHVARPTEVLAGTQLLYAFFTRTHGDMHSLVRSRHRIPEPEAAVLFRQMATALAHCHQHGLVLRDLKLCRFVFADRERKKLVLENLEDSCVLTGPDDSLWDKHACPAYVGPEILSSRASYSGKAADVWSLGVALFTMLAGHYPFQDSEPVLLFGKIRRGAYALPAGLSAPARCLVRCLLRREPAERLTATGILLHPWLRQDPMPLAPTRSHLWEAAQVVPDGLGLDEAREEEGDREVVLYG

SEQ ID NO: 113581 - protein, 271 aa, Artificial Sequence
  derived and/or modified sequence
MRATPLAAPAGSLSRKKRLELDDNLDTERPVQKRARSGPQPRLPPCLLPLSPPTAPDRATAVATASRLGPYVLLEPEEGGRAYQALHCPTGTEYTCKVYPVQEALAVLEPYARLPPHKHVARPTEVLAGTQLLYAFFTRTHGDMHSLVRSRHRIPEPEAAVLFRQMATALAHCHQHGLVLRDLKLCRFVFADRERKKLVLENLEDSCVLTGPDDSLWDKHACPAYVGPEILSSRASYSGKAADVWSLGVALFTMLAGHYPFQDSEPVLLFG

SEQ ID NO: 113582 - DNA, 1158 bp, Artificial Sequence
  derived and/or modified sequence
atggtgctgatgcacctggccgtgaagaacaacagaatgagcgccaacaacgaccacttcctgacccccacctggcagcagatgagagccacccccctggccgcccccgccggcagcctgagcagaaagaagagactggagctggacgacaacctggacaccgagagacccgtgcagaagagagccagaagcggcccccagcccagactgcccccctgcctgctgcccctgagcccccccaccgcccccgacagagccaccgccgtggccaccgccagcagactgggcccctacgtgctgctggagcccgaggagggcggcagagcctaccaggccctgcactgccccaccggcaccgagtacacctgcaaggtgtaccccgtgcaggaggccctggccgtgctggagccctacgccagactgcccccccacaagcacgtggccagacccaccgaggtgctggccggcacccagctgctgtacgccttcttcaccagaacccacggcgacatgcacagcctggtgagaagcagacacagaatccccgagcccgaggccgccgtgctgttcagacagatggccaccgccctggcccactgccaccagcacggcctggtgctgagagacctgaagctgtgcagattcgtgttcgccgacagagagagaaagaagctggtgctggagaacctggaggacagctgcgtgctgaccggccccgacgacagcctgtgggacaagcacgcctgccccgcctacgtgggccccgagatcctgagcagcagagccagctacagcggcaaggccgccgacgtgtggagcctgggcgtggccctgttcaccatgctggccggccactaccccttccaggacagcgagcccgtgctgctgttcggcaagatcagaagaggcgcctacgccctgcccgccggcctgagcgcccccgccagatgcctggtgagatgcctgctgagaagagagcccgccgagagactgaccgccaccggcatcctgctgcacccctggctgagacaggaccccatgcccctggcccccaccagaagccacctgtgggaggccgcccaggtggtgcccgacggcctgggcctggacgaggccagagaggaggagggcgacagagaggtggtgctgtacggctag

SEQ ID NO: 113583 - DNA, 1158 bp, Artificial Sequence
  derived and/or modified sequence
atggttctgatgcatctcgcggtcaagaacaacaggatgtccgcaaacaatgatcatttcctgactcctacctggcagcagatgcgcgccacccctcttgccgcccctgctggatccctcagcaggaagaagaggttggagctagatgacaacctggacaccgaaaggccggtgcaaaagagagctcgatccggacctcaaccacgcctccctccatgtctgcttccgctgtcccctcccaccgcacccgaccgagcgaccgccgtggcaacagcatcaagattagggccctatgtgctgctcgaacctgaggaaggagggagggcctaccaggcccttcactgtccaaccggcacagagtatacctgcaaagtgtaccctgttcaggaggcccttgcggtgctagaaccttatgcacgcctcccgccccacaaacacgtcgcaaggcctaccgaggtgctggccggtactcagcttctatatgccttttttacccggactcatggggacatgcatagtttagtgcgctctcgccacagaattcccgagcccgaggccgccgtactgttccgtcagatggcaactgccctagcacattgtcaccagcacggcttggtgctccgagacctgaagctctgtcgctttgtgttcgctgacagagaacgcaaaaagctcgtgctcgagaatttggaggacagctgcgtccttactggcccagacgactctctgtgggacaaacatgcctgtcctgcttatgtggggcccgagatcctttctagtcgggcgagctacagtggtaaagcagccgacgtttggtctttaggcgtggccttgttcacaatgctggcgggccattatcccttccaggattccgaacctgtactgctgttcggcaaaatcaggcgcggcgcatacgcgcttcctgcaggcctgagtgccccagccagatgcctggtgcgctgtctgttgcgccgcgagcctgctgagcgactgacagctacagggattctgttgcacccctggctgcgccaggaccccatgccactggcacccacacgaagtcatctgtgggaagccgctcaggtggtgcccgacggtctgggactagacgaggcccgcgaggaggagggcgaccgggaggtggttctgtatggatag

SEQ ID NO: 113584 - DNA, 1158 bp, Artificial Sequence
  derived and/or modified sequence
atggtgctgatgcacctggccgtgaagaacaacaggatgtctgccaacaatgaccacttcctgacccccacctggcagcagatgagggccacccccctggccgccccagctggcagcctgagcaggaagaagaggctggagctggatgacaacctggacacagagaggcctgtgcagaagagggcccggagcggcccccagccccggctgcccccctgcctgctgcccctgagccccccaacagccccagaccgggccacagctgtggccacagccagccggctgggcccctacgtgctgctggagcctgaggagggcggccgggcctaccaggccctgcactgccccactggaacagagtacacctgcaaggtgtaccctgtgcaggaggccctggccgtgctggagccctatgcccggctgcccccccacaagcacgtggcccggcccacagaggtgctggccggcacccagctgctgtatgccttcttcaccaggacccacggggacatgcacagcctggtgcgcagccgccaccgcatccctgagcctgaggccgctgtgctcttccggcagatggccacagccctggcccactgccaccagcacggcctggtgctgcgggacctgaagctgtgccgctttgtgtttgctgaccgggagaggaagaagctggtgctggagaacctggaggacagctgtgtgctgactggaccagatgacagcctgtgggacaagcacgcctgcccagcctacgtgggccctgagatcctgagcagccgggccagctacagcggcaaggctgctgatgtgtggagcctgggcgtggccctcttcaccatgctggccggccactaccccttccaggacagcgagcctgtgctgctgtttgggaagatcagaagaggagcctatgccctgcctgctggcctgagcgccccagcccgctgcctggtgcgctgcctgctgcggcgggagcctgctgagcggctgacagccaccggcatcctgctgcacccctggctgcggcaggaccccatgcccctggcccccaccaggagccacctgtgggaggccgcccaggtggtgcctgatggcctgggcctggatgaggcccgggaggaggagggggaccgggaggtggtgctgtatggatag

SEQ ID NO: 113585 - DNA, 1158 bp, Artificial Sequence
  derived and/or modified sequence
atggtgctgatgcacctggccgtgaagaacaaccggatgagcgccaacaacgatcattttctgacaccgacttggcaacagatgcgtgcaactccgctggccgcgccagccggtagcctgtctagaaaaaagcggttggagctagacgacaacttagacactgagcgccccgttcagaagcgcgcacgatccggaccccagccacgactcccaccatgtcttctgcctctctctcctccgaccgctccagacagagcaaccgcggtggctactgcatctagacttggaccttacgtcctcctggagcctgaagagggggggagagcctaccaggcactgcactgtccaacaggaacagagtacacttgcaaagtgtaccccgtgcaagaggcccttgcagtgctcgagccttatgcaagacttccccctcacaagcatgtggccaggcccaccgaggtactcgctggcacccagctgctgtatgctttcttcacaaggacccatggggatatgcactcactggtgcgttcccgccatagaatcccggagcctgaggctgctgtcctcttccgccagatggctactgcgttggctcactgtcaccagcatggacttgtgcttagagaccttaaactgtgccgttttgttttcgctgaccgcgagagaaagaagcttgttctggagaatctcgaggactcttgtgtgttgacaggcccggacgactccctgtgggacaaacacgcgtgtcctgcttatgttggccccgaaatcctatcttcccgcgccagctacagtggcaaggctgcagatgtgtggagccttggcgttgcactgttcaccatgctggcagggcactacccttttcaagacagcgaaccagttttactgttcgggaagatcaggcgtggagcttacgccctgcctgccggtcttagcgcgcctgcgcgctgtttagtcaggtgcctgctgagacgggaacctgcagagcgtttgaccgctactgggattcttctgcatccatggctgagacaggacccgatgcctcttgcacccacacgctcccacctctgggaggctgctcaggtggtcccggacggactgggtctcgacgaagcccgggaggaagaaggggaccgcgaagtagtgctgtacggctag

SEQ ID NO: 113586 - DNA, 1158 bp, Artificial Sequence
  derived and/or modified sequence
atggtcttaatgcatctcgctgtaaaaaataatcgtatgtcagcaaacaatgatcattttctcacaccaacttggcagcagatgagggccacccccctggctgcgcctgctgggtctctgtccaggaaaaaacgtttggagttagacgacaatctggacactgaaagacctgtgcagaaacgggcacggtccggtccccaacctcgcctccccccatgtctgctgcctctaagtcctccgaccgcaccagatagggccaccgccgtggccactgcctcccgccttggcccttatgtcctcctggagccagaggaaggtggaagggcctaccaggctcttcactgccccactggcaccgagtacacttgcaaagtgtatccagtacaagaagcactagccgtcctcgaaccttatgctcgattgccgcctcacaaacatgtggctcgaccaacagaggtgcttgccggaactcagcttctgtacgcctttttcactcggacgcacggcgacatgcactctcttgtgagatctcgacaccggatccccgaacctgaagccgcagtcctgttcaggcagatggctacagcccttgcccactgccatcagcacggcttggtgctccgcgacttaaagctgtgcagattcgtcttcgccgaccgagagagaaagaagctggtcctcgaaaaccttgaggactcatgtgtgctgaccggccctgatgattcactgtgggacaagcacgcctgtcccgcttatgttgggccagaaattctgagctccagggcctcctactccggaaaggccgctgacgtgtggtctctgggcgtggctctgttcactatgctggcaggacattacccattccaggatagcgagccggtgttgctcttcggcaagatacggagaggcgcttacgccttgccggctgggctttctgcccctgctaggtgcctggtgcgttgtttactgcgacgcgaacccgctgaacggctgacagccaccggaatccttctacacccttggctgcgccaagacccgatgcccctcgcccctacacgtagtcatctgtgggaggcggctcaagtcgtacctgacggactgggtctcgatgaggcgagggaggaagaaggagacagagaggttgttctgtacgggtag

SEQ ID NO: 113587 - DNA, 1533 bp, Artificial Sequence
  derived and/or modified sequence
cttacacaccttttcacagaccccgccgtcggggcgcggccaggtcagatcccttttgatccgggcctgggctgagtgctccccccgggcttcaggtgacgcggccccgcggagcgtggggtcgcccgagttgggctggggaagccagggacggaggtgtccggccgtcacccctagaggagggcgtgcgggggtctgttttgcggcacaaagcatgtgcacagccaggtatcatcctgcgtgactcagaacagccttgagatgtaaggagtgtcatcccagcctcgaacctggggagctttctaagactcccaaggatggtacttatgcatcttgctgtgaagaataacaggatgagtgctaataatgaccatttcctgacacctacctggcaacagatgcgagccacccctctggctgctcctgcgggttccctgtccaggaagaagcggttggagttggatgacaacttagataccgagcgtcccgtccagaaacgagctcgaagtgggccccagcccagactgcccccctgcctgttgcccctgagcccacctactgctccagatcgtgcaactgctgtggccactgcctcccgtcttgggccctatgtcctcctggagcccgaggagggcgggcgggcctaccaggccctgcactgccctacaggcactgagtatacctgcaaggtgtaccccgtccaggaagccctggccgtgctggagccctatgcgcggctgcccccgcacaagcatgtggctcggcccactgaggtcctggctggtacccagctcctctacgcctttttcactcggacccatggggacatgcacagcctggtgcgaagccgccaccgtatccctgagcctgaggctgccgtgctcttccgccagatggccaccgccctggcgcactgtcaccagcacggtctggtcctgcgtgatctcaagctgtgtcgctttgtcttcgctgaccgtgagaggaagaagctggtgctggagaacctggaggactcctgcgtgctgactgggccagatgattccctgtgggacaagcacgcgtgcccagcctacgtgggacctgagatactcagctcacgggcctcatactcgggcaaggcagccgatgtctggagcctgggcgtggcgctcttcaccatgctggccggccactaccccttccaggactcggagcctgtcctgctcttcggcaagatccgccgcggggcctacgccttgcctgcaggcctctcggcccctgcccgctgtctggttcgctgcctccttcgtcgggagccagctgaacggctcacagccacaggcatcctcctgcacccctggctgcgacaggacccgatgcccttagccccaacccgatcccatctctgggaggctgcccaggtggtccctgatggactggggctggacgaagccagggaagaggagggagacagagaagtggttctgtatggctaggaccaccctactacacgctcagctgccaacagtggattgagtttgggggtagctccaa

SEQ ID NO: 113588 - DNA, 522 bp, Artificial Sequence
  derived and/or modified sequence
atgggcagcaccgtgcccagaagcgccagcgtgctgctgctgctgctgctgctgagaagagccgagcagccctgcggcgccgagctgaccttcgagctgcccgacaacgccaagcagtgcttccacgaggaggtggagcagggcgtgaagttcagcctggactaccaggtgatcaccggcggccactacgacgtggactgctacgtggaggacccccagggcaacaccatctacagagagaccaagaagcagtacgacagcttcacctacagagccgaggtgaagggcgtgtaccagttctgcttcagcaacgagttcagcaccttcagccacaagaccgtgtacttcgacttccaggtgggcgacgagccccccatcctgcccgacatgggcaacagagtgaccgccctgacccagagattcagaggcgcctactggaaggaggtggacaagatggtggactacatgcagcccggcggcacccccgccaccgagggcctgggcagactggcccccagctag

SEQ ID NO: 113589 - DNA, 522 bp, Artificial Sequence
  derived and/or modified sequence
atgggatccacggttcctaggagcgcttctgtcttacttctgctactactactgagacgggctgagcagccatgcggggctgagcttacctttgaactccctgataatgccaaacagtgttttcatgaggaagtggaacagggagttaagtttagcttggactatcaggtaattaccggcggccactacgacgtggactgctacgttgaggacccccagggtaacacaatttatcgggaaaccaaaaaacaatatgattctttcacttaccgcgccgaagtcaagggagtctaccagttctgcttcagtaatgagttttccactttttctcataaaacggtttacttcgatttccaagtgggtgacgagccccccattctgcctgacatggggaaccgggtgaccgcgctcacccagcggttccgaggcgcctattggaaggaggttgacaagatggttgactacatgcagccgggagggacccccgccactgaagggctgggcaggctcgctccttcctag

SEQ ID NO: 113590 - DNA, 522 bp, Artificial Sequence
  derived and/or modified sequence
atgggcagcacagtgcccaggtctgcctctgtgctgctgctgctgctgctgctgcggcgggcagagcagccctgtggggctgagctgacctttgagctgcctgacaatgccaagcagtgcttccacgaggaggtggagcagggcgtgaagttcagcctggactaccaggtgatcactggaggccactatgatgtggactgctacgtggaggacccccagggcaacaccatctaccgggagaccaagaagcagtatgacagcttcacctacagagctgaggtgaagggcgtgtaccagttctgcttcagcaatgagttcagcaccttcagccacaagacagtgtactttgacttccaggtgggagatgagccccccatcctgcctgacatgggcaacagagtgacagccctgacccagcgcttccggggggcctactggaaggaggtggacaagatggtggactacatgcagcccggcggcaccccagccacagagggcctgggccgcctggcccccagctag

SEQ ID NO: 113591 - DNA, 522 bp, Artificial Sequence
  derived and/or modified sequence
atgggcagcaccgtgccccggagcgccagcgtgctgctgctgctgctgttgcttcggcgcgccgagcagccctgtggcgcagaattgacatttgaactgcccgacaacgctaaacagtgctttcacgaggaagtcgagcagggggtgaaattttccctggattatcaggtcataacaggaggtcactacgatgtagactgctatgtggaagatccccagggtaacaccatttaccgcgagacaaaaaagcagtacgattcttttacctacagagcagaggtgaagggggtgtaccagttttgtttttcaaatgaattttccaccttttcccacaagactgtgtattttgactttcaggtgggggatgaaccccccattctccccgatatgggaaatagggtgacggccctgacacagagatttcggggtgcctactggaaagaggtggacaagatggtagattacatgcagcccggggggacgccagccactgagggcctggggagactggcacctagctag

SEQ ID NO: 113592 - DNA, 522 bp, Artificial Sequence
  derived and/or modified sequence
atgggaagcacagtacccaggtctgcgtcagtccttctcctgcttctattactcaggcgggcagagcaaccttgtggagcggaacttaccttcgaattacctgataatgccaaacaatgtttccacgaggaggtggaacaaggggtgaaattctctcttgattatcaagtgattaccggaggccattacgatgtagattgttacgtggaggacccacaaggcaacaccatttatcgagagaccaagaaacagtatgatagcttcacgtaccgcgctgaagtgaaaggtgtctatcaattctgcttcagtaatgagttctcaaccttctcacacaaaacggtgtactttgacttccaggttggcgatgagccaccaatcctgcccgatatgggcaaccgagtgactgcgctgacacagcgttttcggggagcttattggaaggaggttgataagatggtggattacatgcagcctgggggtacacctgctaccgagggtctggggcgtttggccccttcgtag

SEQ ID NO: 113593 - DNA, 1115 bp, Artificial Sequence
  derived and/or modified sequence
gtctatccccttacatcctcctaggacccggtcggtagtcgtcgccccagcccgccgggggcgcagcgcccgagccgcggccctcgagacgggaccgagagcatcatgggcagcactgtcccgcgctccgcctccgtgctgcttctgctgctgctcctgcgccgggccgagcagccctgcggggccgagctcaccttcgagctgccggacaacgccaagcagtgcttccacgaggaggtggagcagggcgtgaagttctccctggattaccaggtcatcactggaggccactacgatgttgactgctatgtggaggacccccaggggaacaccatctacagagaaacgaagaagcagtacgacagcttcacgtaccgggctgaagtcaagggcgtttatcagttttgcttcagtaatgagttttccaccttctctcacaagaccgtctactttgactttcaagtgggcgatgagcctcccattctcccagacatggggaacagggtcacagctctcacccagagattcagaggagcttattggaaggaggtggacaagatggtcgactatatgcagccaggcggaacacctgccaccgagggactgggacgactggcaccctcctaacagattttcagcggggaggcactgagagtggatggagggaagacacagaagctacgctgaagtgggaggaagctgctgcacagagctaccatgcactgggactagctcctggtccccagtgactccaggggaacaggtgagttaaactggcaaggaacaacctgctctcaccacaggcctctggaatcccggcaggaggagactccttgaccaccacagacacttgagctggcagggagagttgcttggagaagtggtaggggcagcacttcagcctgggtggagcccagagggtttggtgtgggagcatttgcaataaagcatagccagggacagccatccctctaggctcgacttgctcccatggcagactttaaccctagggggactgttgaaactaaattcttcagggtggtcttgcctgtcagatgaggccagttcaataacctgagcaccccttggttttctggtctctcctggagccccag

SEQ ID NO: 113594 - protein, 987 aa, Artificial Sequence
  derived and/or modified sequence
MRCRNMFFSFKASLCGCGAATAPSLTAISCTLNCSCQSFKPGKINHRQCDQCKHGWVAHALSKLRIPPMYPTSQVEIVQSNVVFDISSLMLYGTQAIPVRLKILLDRLFSVLKQDEVLQILHALDWTLQDYIRGYVLQDASGKVLDHWSIMTSEEEVATLQQFLRFGETKSIVELMAIQEKEEQSIIIPPSTANVDIRAFIESCSHRSSSLPTPVDKGNPSSIHPFENLISNMTFMLPFQFFNPLPPALIGSLPEQYMLEQGHDQSQDPKQEVHGPFPDSSFLTSSSTPFQVEKDQCLNCPDAITKKEDSTHLSDSSSYNIVTKFERTQLSPEAKVKPERNSLGTKKGRVFCTACEKTFYDKGTLKIHYNAVHLKIKHKCTIEGCNMVFSSLRSRNRHSANPNPRLHMPMNRNNRDKDLRNSLNLASSENYKCPGFTVTSPDCRPPPSYPGSGEDSKGQPAFPNIGQNGVLFPNLKTVQPVLPFYRSPATPAEVANTPGILPSLPLLSSSIPEQLISNEMPFDALPKKKSRKSSMPIKIEKEAVEIANEKRHNLSSDEDMPLQVVSEDEQEACSPQSHRVSEEQHVQSGGLGKPFPEGERPCHRESVIESSGAISQTPEQATHNSERETEQTPALIMVPREVEDGGHEHYFTPGMEPQVPFSDYMELQQRLLAGGLFSALSNRGMAFPCLEDSKELEHVGQHALARQIEENRFQCDICKKTFKNACSVKIHHKNMHVKEMHTCTVEGCNATFPSRRSRDRHSSNLNLHQKALSQEALESSEDHFRAAYLLKDVAKEAYQDVAFTQQASQTSVIFKGTSRMGSLVYPITQVHSASLESYNSGPLSEGTILDLSTTSSMKSESSSHSSWDSDGVSEEGTVLMEDSDGNCEGSSLVPGEDEYPICVLMEKADQSLASLPSGLPITCHLCQKTYSNKGTFRAHYKTVHLRQLHKCKVPGCNTMFSSVRSRNRHSQNPNLHKSLASSPSHLQ

SEQ ID NO: 113595 - DNA, 2964 bp, Artificial Sequence
  derived and/or modified sequence
atgaggtgtcggaacatgtttttttctttcaaagcctcgctgtgtgggtgcggggccgctactgccccatcccttactgcaataagctgtaccctcaattgttcttgtcagagctttaagcctggcaagataaaccacagacaatgtgaccagtgcaagcacggctgggtcgcccatgctctcagcaaactgcggattcctcctatgtatcccacatctcaggtggaaattgtccagtctaatgtggtttttgatataagttccctgatgctttatggcacgcaggcgatccccgtcaggctgaaaatcctgctggatcgcctcttctctgtgctgaagcaggacgaagtgctacagattctacatgccctggactggactctccaggactacatacgggggtacgtgctgcaggacgccagcggcaaggtgctggaccattggtccatcatgaccagtgaggaagaagtggccaccctccagcaattcctgagatttggggagaccaaatccattgttgagttgatggccatacaggaaaaggaggagcagagcataattatccccccaagtactgctaatgtggatatacgtgcttttatagaaagttgctcgcaccgctcatctagcttacctacccccgttgataaaggaaacccgtcttcaatacacccttttgagaacctgattagcaacatgacctttatgctccccttccagtttttcaatcctctcccacctgctctcattggtagtctcccagaacaatatatgctggaacaggggcacgatcagagccaagaccccaaacaagaggtccacgggccctttcctgattcctcctttctgacaagcagctctacgccgtttcaggtcgagaaagatcagtgcttgaactgccctgacgcgatcaccaagaaagaagattccacacatctctccgactccagctcatataacatcgtcacaaaatttgaaagaacccaattgtctcccgaagccaaagtaaaacctgagcggaattcgctcggaactaagaagggcagagtgttttgcacggcctgtgaaaaaaccttttacgataaaggcacgctgaaaattcactacaatgctgtccatctgaagataaaacacaagtgcaccattgagggttgcaatatggtcttctcctcactgcgctctcgtaatagacacagtgcaaacccaaatccacggctccacatgcctatgaatcgcaataatcgtgacaaggatcttaggaattcactgaacctggcttcctccgaaaattacaaatgtccggggtttacggtcacatcaccagactgtcgaccgcctccatcctacccaggttccggcgaagattccaagggtcaaccagccttccccaacattggacaaaacggagtgctcttccccaacctgaagactgtccaacctgtgctccccttttaccggagtcctgccaccccggccgaggttgccaacactcccgggatattgccttctctacccctgttatcaagcagtatccccgagcaactgatcagtaacgagatgccctttgatgccttacccaagaagaagagccggaagtccagtatgccaattaagatcgagaaggaggctgtcgaaatcgccaacgagaagcgccacaacctcagtagcgacgaagatatgccactgcaagtagtgtccgaggacgagcaagaagcctgttctccacagagccacagggtgtctgaggagcagcatgtgcaatctggaggtctgggcaagccattccccgaaggggagcgtccgtgccacagagagagcgtcatcgagagtagcggtgcaatttctcagactcccgagcaggccacacataattcagagcgggagactgaacaaacacccgcccttatcatggtacccagagaagtcgaggatggaggacatgaacattacttcactccagggatggagccccaggtccctttcagcgattacatggaactgcagcagaggctgcttgctggcgggctcttctccgctcttagtaaccggggcatggcctttccttgcctagaggattcaaaggagctcgaacacgtcggtcagcacgcattggctagacagatcgaggagaaccgcttccagtgcgacatctgcaaaaagacgtttaaaaacgcatgtagcgtgaagattcaccataaaaacatgcatgtgaaagaaatgcacacttgcacggtggaagggtgcaatgccacgtttcccagcagaagaagccgggaccggcacagctccaacttgaacctgcaccagaaagccctctcgcaggaggctctagagagttcagaggatcatttccgagccgcatacctcctgaaagacgtagccaaggaagcgtatcaggatgttgcctttacccagcaggcttcgcagaccagcgtgattttcaaaggtaccagccgcatgggctctctggtttaccctatcacacaggtgcactctgcctctctagagtcttataactccgggcctctctccgagggcaccatcctcgatttgtcaaccacaagctctatgaaatcggagtcctcctcacacagctcctgggacagcgacggagtctcagaggaaggtaccgtgcttatggaggattctgacggaaattgcgaaggctcctccttagttccgggcgaagatgagtaccctatatgtgtcttgatggaaaaggccgaccagtcccttgcttccctgcctagcggactccctattacctgtcacctgtgtcagaagacctattcaaacaagggcaccttccgagctcactacaaaaccgtccacctgagacagctgcacaaatgcaaggtgcctgggtgtaatacgatgttttcttcggtaaggtcccggaatagacatagtcagaatcccaacctgcataaaagcttggcgagtagccctagccatttgcaatag

SEQ ID NO: 113596 - DNA, 2964 bp, Artificial Sequence
  derived and/or modified sequence
atgcgctgcaggaacatgttcttctccttcaaggccagcctgtgtggctgtggggccgccacagcccccagcctgacagccatcagctgcaccctgaactgcagctgccagagcttcaagccaggcaagatcaaccaccggcagtgtgaccagtgcaagcacggctgggtggcccacgccctgagcaagctgcgcatcccccccatgtaccccaccagccaggtggagatcgtgcagagcaatgtggtgtttgacatcagcagcctgatgctgtatggcacccaggccatccctgtgcggctgaagatcctgctggacaggctcttctctgtgctgaagcaggatgaggtgctgcagatcctgcacgccctggactggaccctgcaggactacatccggggctacgtgctgcaggatgccagcggcaaggtgctggaccactggagcatcatgaccagcgaggaggaggtggccaccctgcagcagttcctgcgctttggagagaccaagagcatcgtggagctgatggccatccaggagaaggaggagcagagcatcatcatcccccccagcacagccaacgtggacatccgggccttcatcgagagctgcagccacaggagcagcagcctgcccacccctgtggacaagggcaaccccagcagcatccacccctttgaaaatctcatcagcaacatgaccttcatgctgcccttccagttcttcaaccccctgcccccagccctgattggcagcctgcctgagcagtacatgctggagcagggccatgaccagagccaggaccccaagcaggaggtgcacggccccttcccagacagcagcttcctgaccagcagcagcacccccttccaggtggagaaggaccagtgcctgaactgcccagatgccatcaccaagaaggaggacagcacccacctgagtgacagcagcagctacaacatcgtgaccaagtttgagaggacccagctgagccctgaggccaaggtgaagccagagaggaacagcctgggcaccaagaagggccgggtcttctgcacagcctgtgagaagaccttctatgacaagggcaccctgaagatccactacaatgctgtgcacctgaagatcaagcacaagtgcaccatcgagggctgcaacatggtgttcagcagcctgcggagcaggaacagacattctgccaaccccaacccccggctgcacatgcccatgaacagaaacaacagagacaaggacctgaggaacagcctgaacctggccagcagcgagaactacaagtgccccggcttcaccgtgaccagcccagactgccggcccccacccagctacccaggcagcggggaggacagcaagggccagcctgccttccccaacatcggccagaatggagtgctcttccccaacctgaagacagtgcagcctgtgctgcccttctaccgcagccctgccaccccagctgaggtggccaacaccccaggcatcctgcccagcctgcccctgctgagcagcagcatccctgagcagctgatcagcaatgagatgccctttgatgccctgcccaagaagaagagcaggaagagctccatgcccatcaagattgagaaggaggccgtggagatcgccaatgagaagaggcacaacctgagcagtgatgaggacatgcccctgcaggtggtgtctgaagatgagcaggaggcctgcagcccccagagccaccgggtgtctgaggagcagcacgtgcagagcggcggcctgggcaagcccttccctgagggggagcggccctgccaccgggagagcgtcatcgagagcagcggggccatcagccagaccccagagcaggccacccacaacagcgagcgggagacagagcagaccccagccctgatcatggtgccccgggaggtggaggatggcggccacgagcactacttcaccccaggcatggagccccaggtgcccttcagtgactacatggagctgcagcagaggctgctggccggcggcctcttcagcgccctgagcaacagaggcatggccttcccctgcctggaggacagcaaggagctggagcacgtgggccagcacgccctggcccggcagatcgaggagaaccgcttccagtgtgacatctgcaagaagaccttcaagaatgcctgcagcgtgaagatccaccacaagaacatgcacgtgaaggagatgcacacctgcaccgtggagggctgcaatgccaccttccccagcagaagaagccgggacagacacagcagcaacctgaacctgcaccagaaggccctgagccaggaggccctggagagcagcgaggaccacttccgggccgcctacctgctgaaggatgtggccaaggaggcctaccaggatgtggccttcacccagcaggccagccagaccagcgtcatcttcaagggcaccagcaggatgggcagcctggtgtaccccatcacccaggtgcacagcgccagcctggagagctacaacagcggccccctgtctgagggcaccatcctggacctgagcaccaccagctccatgaagtctgagagcagcagccacagctcctgggacagtgatggagtgtctgaggagggcaccgtgctgatggaggacagtgatggcaactgtgagggcagcagcctggtgcctggagaagatgagtaccccatctgtgtgctgatggagaaggctgaccagagcctggccagcctgcccagcggcctgcccatcacctgccacctgtgccagaagacctacagcaacaagggcaccttccgggcccactacaagacagtgcacctgcggcagctgcacaagtgcaaggtgcccggctgcaacaccatgttcagctctgtgcgcagcaggaacagacacagccagaaccccaacctgcacaagagcctggccagcagccccagccacctgcagtag

SEQ ID NO: 113597 - DNA, 2964 bp, Artificial Sequence
  derived and/or modified sequence
atgcggtgccggaacatgttcttcagcttcaaggccagcctgtgcgggtgcggtgctgctactgcaccaagcctcacagcaatctcttgtacactgaactgttcatgtcaatcgttcaaaccaggtaagatcaatcatcgtcagtgtgaccaatgtaaacatggctgggtggcacatgcgcttagcaagttgcgaatccctcctatgtaccccacaagccaggtcgagatcgtacaatctaatgtggtctttgatatctcgagtctgatgctgtatggcactcaggcgattcctgtgaggctgaagatcctgttggaccggctgttcagcgtgctgaaacaggatgaggtgctgcaaattctgcatgcactggattggactctccaggactacatccgaggctatgttcttcaggatgcttctggcaaggtactggatcactggtccatcatgaccagcgaagaggaagttgccacactccagcagttcttgagattcggcgaaaccaagtccatcgtcgaacttatggccattcaagaaaaagaagagcagtcaattatcataccgccgagtacagctaacgtggatattcgcgcttttatcgagagctgttcacaccgttcctcctccttaccaaccccggtcgataagggtaatccctcttcaatccacccctttgagaacctcatctcaaatatgacctttatgctacctttccagttctttaaccctctcccaccagctctgatcggaagtcttcctgaacagtatatgctcgaacagggacacgaccagtcccaggatcctaagcaagaagtgcatggacccttccctgattcatccttcctgacaagttcttcgaccccattccaggtggaaaaagatcagtgtttaaactgccctgacgcaatcaccaagaaggaagactctacccacctctccgacagctcatcctataatatcgtaaccaaatttgagagaacccaacttagcccagaggctaaagttaagcccgaaagaaattctttgggtactaagaagggcagagtcttctgcacggcttgcgaaaagactttctacgataaaggcacattgaaaattcactataacgccgtacatttgaaaataaagcacaagtgtaccattgaggggtgcaacatggttttctcttcgttgcggagtcggaatcggcattccgccaatcctaaccctaggctgcacatgccgatgaaccgtaacaatcgcgataaagaccttcggaacagtctgaatctggccagctccgagaactacaagtgccctggcttcacggtcacttcaccagactgtcgaccgccaccgtcatatcctggcagcggtgaggattctaaaggacaacctgcttttccaaacatcgggcagaacggcgtgctgtttccaaatcttaagacagtccagcccgtccttccattttaccggtctccagccacccctgcagaagttgccaacactcctggaatactcccctccttgcccctcctttcctcaagtattcctgagcagctcatctccaatgagatgcctttcgatgccttgcctaagaagaagagccgcaagtcaagcatgccgattaagatagagaaagaggcggttgagatcgcaaacgagaaaaggcataacctaagctcggatgaagacatgccactgcaggtggtgtctgaagatgagcaagaagcttgctcaccccaaagccaccgcgtctccgaagagcagcatgtacagtccggtggtctggggaaaccgttccccgagggtgagcggccctgccatagggagtctgttattgagagtagtggggcaatctcccaaactcctgaacaggcaactcacaactctgaacgcgaaaccgaacagaccccagccctgatcatggtaccccgcgaagtagaggatggcggtcacgagcactatttcactcctggcatggagccacaggtcccgttcagcgattacatggagttacaacagcgcctgttagcaggggggctgttcagcgcgctttcaaatcggggaatggcttttccttgcctcgaggattcaaaagaactcgagcacgtgggccagcatgctctcgcccgccagattgaggagaatcggtttcagtgtgatatctgtaagaagaccttcaagaatgcatgttctgttaaaatccaccacaaaaacatgcacgtgaaagagatgcacacatgcaccgtcgagggttgcaatgcaacatttcccagtcgcagatcccgcgatagacactcttctaacctgaacctccaccagaaagccttgagccaagaggccctggaaagctccgaggatcatttcagggccgcctatctcctcaaagatgtggcgaaagaggcataccaggacgtggctttcacacagcaggcctcccagacctccgtgatttttaagggaacatctagaatgggtagtctggtctatccaatcacccaggtccactctgcttcgctcgaatcatataactcagggcctctatccgagggcacaatcctcgacctgagcaccacaagtagcatgaaaagtgagtcctcgtcccattctagttgggacagcgatggcgtctctgaggaaggcacagtcttgatggaggacagcgacggcaattgcgaggggagttcactggtcccaggggaagatgaataccctatctgcgtgctaatggagaaggctgaccaaagcctagcctccttgccctccgggctccctataacttgccacctctgccagaagacatacagcaataaggggacctttagggcccattacaaaacagtgcatctgcgccaactgcacaagtgcaaggtgccagggtgcaacactatgttcagcagtgtccgatcacgcaatcgtcattctcagaatcccaacttgcacaagtctctcgcatcatccccctctcacctccaatag

SEQ ID NO: 113598 - DNA, 2964 bp, Artificial Sequence
  derived and/or modified sequence
atgagatgcaggaacatgttcttttctttcaaggccagtctttgtggctgcggagcggctactgccccaagtctgaccgccattagttgtactctcaactgttcttgccagtcattcaagccagggaagataaatcataggcagtgtgatcagtgtaagcatggctgggtggcacatgccctctcaaagctgagaattcctcccatgtatcctacttcccaggtcgagatcgtacaatctaacgtggtatttgacatttccagtcttatgttgtacggaacacaggctatccctgtgcggctcaagatactgctggacagactgttttcagtgttgaaacaagacgaggtgttacagatactccacgctctggactggaccctgcaggattatattaggggatatgttttacaggacgcttccggcaaagtcctggaccattggtccattatgacatccgaggaagaggtagctacactccaacagttcttacggttcggcgagacgaaatctattgttgagttgatggcaattcaggaaaaagaggagcagagcattattatcccaccttctaccgccaacgtggacatcagagccttcatagaatcttgcagccacagaagcagtagtttgccaactcccgttgataagggaaatccatcatctattcatccgttcgaaaatctcatttccaatatgaccttcatgcttccttttcagtttttcaatcccctccctcctgccctgattgggtccctgcctgagcagtacatgctggagcagggacacgatcagtcacaggatcctaaacaggaggtgcatggcccttttccagactcaagttttctgacctcatcaagcacaccgtttcaggtggagaaagatcagtgcttgaactgccctgatgccatcaccaagaaagaagattccacccacctgtccgattcctcttcctacaacattgtcaccaaattcgaaagaacccaactgagccccgaagctaaggttaagcccgagcggaattctctgggaactaaaaaaggccgagtgttctgtacagcctgcgagaaaaccttctacgataagggaacgctcaaaatacattataatgctgtgcacttaaaaattaagcacaagtgtactatcgaaggctgtaacatggtgtttagtagccttagaagcagaaatcgccactccgccaaccccaaccctcgccttcacatgcctatgaaccgcaacaatagggataaggatctaaggaacagcctgaatctggcatcctcagaaaactacaagtgcccaggatttaccgtcacttcaccggattgtagacctcctcctagctaccctggatcaggggaggattccaagggccagcctgctttcccaaatattggacagaacggggtgctgtttcctaacctgaaaacagtgcaaccagtgctaccgttttacaggagcccagctacacctgctgaggtggccaacactccaggtatcctgccttctcttcccttactttctagctctatacctgaacaattgatcagcaacgagatgcctttcgacgccctgccaaaaaagaagtctcgtaagagcagtatgcccatcaaaatcgagaaggaggcagttgaaatcgcgaacgaaaagcgacacaacctcagttccgacgaagacatgcccttgcaggttgtttccgaggatgagcaggaggcctgctcacctcagagccacagggtaagcgaggagcagcacgtacaatctggaggattaggtaagcctttcccagagggtgagaggccatgccaccgggagtctgtcatcgagagctctggagccatcagccaaaccccggagcaggccactcataactccgagcgtgagactgagcagacacctgctctgataatggtgcctcgagaagtggaggacggaggacatgagcattatttcacccctgggatggagccacaggtgccctttagtgactacatggaacttcaacaaagacttctggccggagggctgtttagcgcactgtctaaccgtggaatggcattcccttgcctggaagactctaaggaacttgaacatgtgggtcagcatgccttagccaggcagatcgaagagaatcgcttccaatgtgacatatgcaaaaaaacgtttaaaaacgcatgttctgttaagatccatcacaagaatatgcatgtgaaggaaatgcacacttgtactgtcgagggttgcaacgctacgttcccgagcaggagatcaagggacagacattcttccaatctcaatctgcatcagaaggcgctgagccaggaggctctcgagtcttcagaggaccactttcgcgctgcatatctactgaaagacgttgccaaagaagcgtaccaagatgtagctttcacccaacaagcctctcagaccagtgtgattttcaagggcacttctaggatggggtccctggtatatccgattacccaagttcactcggcctccctcgaaagttacaactctggaccactgtctgaaggaacaattctggatctctccacaacctccagtatgaaaagtgaatcttcttcacacagctcctgggactccgatggcgtgtcagaggagggcaccgtgcttatggaggatagtgacgggaactgtgagggctcctcgctggtgcctggggaggatgaatacccaatttgcgttctcatggagaaagccgaccagagtctggcaagcctcccatctggtttgcctatcacatgccatctttgccagaaaacatattcaaacaaggggacatttcgagcacactataaaactgtgcacctccgccaattgcacaagtgtaaggtccccggatgcaacaccatgtttagtagcgtccgctccagaaaccgtcatagccagaacccaaatctccataaatccctggcctcatccccgtcgcacctgcagtag

SEQ ID NO: 113599 - DNA, 3187 bp, Artificial Sequence
  derived and/or modified sequence
gtcggttccgtgctgggagccggagttcctcgggatttgtcagccagatgtgacaagattgtggcgaggcgagtgaaggagatctgatattaatcagcgcgtagctccgagccaaactttcacaaatgcggtgtagaaacatgttcttctcatttaaggcatctctttgtggctgcggggctgccaccgctccgagtctgacagctatcagctgtactctgaactgtagttgccaaagtttcaaacccgggaaaataaaccaccgtcagtgtgaccaatgcaagcatggatgggtggcccacgctctaagtaagctaaggatcccccccatgtatccaacaagccaggtggagattgtccagtccaatgtagtgtttgatattagcagcctcatgctctatgggacccaggccatccccgttcgcctaaaaatcctactggaccggctcttcagtgtgttgaagcaagatgaggttctccagatcctccatgccttggactggacacttcaggattatatccgtggatacgtactgcaggatgcatcaggaaaggtgttggatcactggagcatcatgaccagtgaggaagaagtggccaccttgcagcagttccttcgttttggagagaccaaatctatagttgaactcatggcaattcaagagaaagaagagcaatccatcatcataccaccttccacagcaaatgtagatatcagggctttcatcgagagctgcagtcacaggagttctagcctccccactcctgtggacaaaggaaaccccagcagtatacacccctttgagaacctcataagcaacatgactttcatgctgcctttccagttcttcaaccctctgcctcctgcactgatagggtcattgcccgaacaatatatgttggagcagggtcatgaccaaagtcaggaccccaaacaggaagtccatgggcccttccctgacagcagcttcttaacttccagttccacaccatttcaggttgaaaaagatcagtgtttaaactgtccggatgctattactaaaaaagaagacagcacccatttaagtgactccagctcatacaacattgtcactaagtttgaaaggacacagttatcccctgaggccaaagtgaagcctgagaggaatagccttggtacaaagaagggccgggtgttctgcactgcatgtgagaagaccttctatgacaaaggcaccctcaaaatccactacaatgccgtccacttgaagatcaagcataagtgcaccatcgaagggtgtaacatggtgttcagctccctaaggagccggaatcgccatagcgccaaccccaaccctcggctgcacatgccaatgaacagaaataaccgggacaaagacctcaggaacagcctgaacctggccagctctgagaactacaagtgcccaggtttcacagtgacgtccccagactgtaggcctcctcccagctaccctggttcaggagaggattccaaaggccaaccagccttcccaaacattgggcaaaatggtgtgctttttcccaacctaaagacagtccagccagtccttcctttctaccgcagtccagccacgcctgccgaggtagcaaacacgcctgggatactcccttccctcccgctgttgtcctcttcaatcccagaacagctcatttcaaacgaaatgccatttgatgcccttcccaagaagaaatccaggaagtccagtatgcctatcaaaatagagaaagaagctgtggaaatagctaatgagaaaagacacaacctcagctcagatgaagacatgcccctacaggtggtcagtgaagatgagcaggaggcctgcagtcctcagtcacacagagtatctgaggagcagcatgtacagtcaggaggcttagggaagcctttccctgaaggggagaggccctgccatcgtgaatcagtaattgagtccagtggagccatcagccaaacccctgagcaggccacacacaattcagagagggagactgagcagacaccagcattgatcatggtgccaagggaggtcgaggatggtggccatgaacactacttcacacctgggatggaaccccaagttcctttttctgactacatggaactgcagcagcgcctgctggctgggggactcttcagtgctttgtccaacaggggaatggcttttccttgtcttgaagattctaaagaactggagcacgtgggtcagcatgcattagcaaggcagatagaagaaaatcgcttccagtgtgacatctgcaagaagacctttaaaaatgcttgtagtgtgaaaattcatcacaagaatatgcatgtcaaagaaatgcacacatgcacagtggagggctgtaatgctacctttccctcccgcaggagcagagacagacacagctcaaacctaaacctccaccaaaaagcattgagccaggaagcattggagagtagtgaagatcatttccgtgcagcttaccttctgaaagatgtggctaaggaagcctatcaggatgtggcttttacacagcaagcctcccagacatctgtcatcttcaaaggaacaagtcgaatgggcagtctggtttacccaataacgcaagtccacagtgccagcctggagagctacaactctggccccttgagcgagggcaccatcctggatttgagcactacctcgagcatgaagtcagagagtagcagccattcttcctgggactctgacggggtgagtgaggaaggcactgtgcttatggaggacagtgatgggaactgtgaagggtcgagccttgtccctggggaagatgagtaccccatctgtgtcctgatggagaaggctgaccagagccttgctagcctgccttctgggttgcccataacctgtcatctctgccaaaagacatacagtaacaaagggacctttagggcccactacaaaactgtgcacctccggcagctccacaaatgcaaagtaccaggctgcaacaccatgttttcgtctgttcgcagtcgaaacagacacagccagaatcccaacctgcacaaaagcctggcctcatctccaagtcacctccagtaacaagatggcaaaccaagtatgctcagataagcttttttcataattcaggaataaagtagtccatagaaatgtttctgtttcatatcatttggggcgag

SEQ ID NO: 113600 - DNA, 2964 bp, Artificial Sequence
  derived and/or modified sequence
atgagatgcagaaacatgttcttcagcttcaaggccagcctgtgcggctgcggcgccgccaccgcccccagcctgaccgccatcagctgcaccctgaactgcagctgccagagcttcaagcccggcaagatcaaccacagacagtgcgaccagtgcaagcacggctgggtggcccacgccctgagcaagctgagaatcccccccatgtaccccaccagccaggtggagatcgtgcagagcaacgtggtgttcgacatcagcagcctgatgctgtacggcacccaggccatccccgtgagactgaagatcctgctggacagactgttcagcgtgctgaagcaggacgaggtgctgcagatcctgcacgccctggactggaccctgcaggactacatcagaggctacgtgctgcaggacgccagcggcaaggtgctggaccactggagcatcatgaccagcgaggaggaggtggccaccctgcagcagttcctgagattcggcgagaccaagagcatcgtggagctgatggccatccaggagaaggaggagcagagcatcatcatcccccccagcaccgccaacgtggacatcagagccttcatcgagagctgcagccacagaagcagcagcctgcccacccccgtggacaagggcaaccccagcagcatccaccccttcgagaacctgatcagcaacatgaccttcatgctgcccttccagttcttcaaccccctgccccccgccctgatcggcagcctgcccgagcagtacatgctggagcagggccacgaccagagccaggaccccaagcaggaggtgcacggccccttccccgacagcagcttcctgaccagcagcagcacccccttccaggtggagaaggaccagtgcctgaactgccccgacgccatcaccaagaaggaggacagcacccacctgagcgacagcagcagctacaacatcgtgaccaagttcgagagaacccagctgagccccgaggccaaggtgaagcccgagagaaacagcctgggcaccaagaagggcagagtgttctgcaccgcctgcgagaagaccttctacgacaagggcaccctgaagatccactacaacgccgtgcacctgaagatcaagcacaagtgcaccatcgagggctgcaacatggtgttcagcagcctgagaagcagaaacagacacagcgccaaccccaaccccagactgcacatgcccatgaacagaaacaacagagacaaggacctgagaaacagcctgaacctggccagcagcgagaactacaagtgccccggcttcaccgtgaccagccccgactgcagacccccccccagctaccccggcagcggcgaggacagcaagggccagcccgccttccccaacatcggccagaacggcgtgctgttccccaacctgaagaccgtgcagcccgtgctgcccttctacagaagccccgccacccccgccgaggtggccaacacccccggcatcctgcccagcctgcccctgctgagcagcagcatccccgagcagctgatcagcaacgagatgcccttcgacgccctgcccaagaagaagagcagaaagagcagcatgcccatcaagatcgagaaggaggccgtggagatcgccaacgagaagagacacaacctgagcagcgacgaggacatgcccctgcaggtggtgagcgaggacgagcaggaggcctgcagcccccagagccacagagtgagcgaggagcagcacgtgcagagcggcggcctgggcaagcccttccccgagggcgagagaccctgccacagagagagcgtgatcgagagcagcggcgccatcagccagacccccgagcaggccacccacaacagcgagagagagaccgagcagacccccgccctgatcatggtgcccagagaggtggaggacggcggccacgagcactacttcacccccggcatggagccccaggtgcccttcagcgactacatggagctgcagcagagactgctggccggcggcctgttcagcgccctgagcaacagaggcatggccttcccctgcctggaggacagcaaggagctggagcacgtgggccagcacgccctggccagacagatcgaggagaacagattccagtgcgacatctgcaagaagaccttcaagaacgcctgcagcgtgaagatccaccacaagaacatgcacgtgaaggagatgcacacctgcaccgtggagggctgcaacgccaccttccccagcagaagaagcagagacagacacagcagcaacctgaacctgcaccagaaggccctgagccaggaggccctggagagcagcgaggaccacttcagagccgcctacctgctgaaggacgtggccaaggaggcctaccaggacgtggccttcacccagcaggccagccagaccagcgtgatcttcaagggcaccagcagaatgggcagcctggtgtaccccatcacccaggtgcacagcgccagcctggagagctacaacagcggccccctgagcgagggcaccatcctggacctgagcaccaccagcagcatgaagagcgagagcagcagccacagcagctgggacagcgacggcgtgagcgaggagggcaccgtgctgatggaggacagcgacggcaactgcgagggcagcagcctggtgcccggcgaggacgagtaccccatctgcgtgctgatggagaaggccgaccagagcctggccagcctgcccagcggcctgcccatcacctgccacctgtgccagaagacctacagcaacaagggcaccttcagagcccactacaagaccgtgcacctgagacagctgcacaagtgcaaggtgcccggctgcaacaccatgttcagcagcgtgagaagcagaaacagacacagccagaaccccaacctgcacaagagcctggccagcagccccagccacctgcagtag

SEQ ID NO: 113601 - protein, 576 aa, Artificial Sequence
  derived and/or modified sequence
MADANKAEVPGATGGDSPHLQPAEPPGEPRREPHPAEAEKQQPQHSSSSNGVKMENDESAKEEKSDLKEKSTGSKKANRFHPYSKDKNSGAGEKKGPNRNRVFISNIPYDMKWQAIKDLMREKVGEVTYVELFKDAEGKSRGCGVVEFKDEEFVKKALETMNKYDLSGRPLNIKEDPDGENARRALQRTGGSFPGGHVPDMGSGLMNLPPSILNNPNIPPEVISNLQAGRLGSTIFVANLDFKVGWKKLKEVFSIAGTVKRADIKEDKDGKSRGMGTVTFEQAIEAVQAISMFNGQFLFDRPMHVKMDDKSVPHEEYRSHDGKTPQLPRGLGGIGMGLGPGGQPISASQLNIGGVMGNLGPGGMGMDGPGFGGMNRIGGGIGFGGLEAMNSMGGFGGVGRMGELYRGAMTSSMERDFGRGDIGINQGFGDSFGRLGGGMGSMNSVTGGMGMGLDRMSSSFDRMGPGIGAILERSIDMDRGFLSGPMGSGMRERIGSKGNQIFVRNLPFDLTWQKLKEKFSQCGHVMFAEIKMENGKSKGCGTVRFDSPESAEKACRIMNGIKISGREIDVRLDRNA

SEQ ID NO: 113602 - protein, 188 aa, Artificial Sequence
  derived and/or modified sequence
MNSMGGFGGVGRMGELYRGAMTSSMERDFGRGDIGINQGFGDSFGRLGGGMGSMNSVTGGMGMGLDRMSSSFDRMGPGIGAILERSIDMDRGFLSGPMGSGMRERIGSKGNQIFVRNLPFDLTWQKLKEKFSQCGHVMFAEIKMENGKSKGCGTVRFDSPESAEKACRIMNGIKISGREIDVRLDRNA

SEQ ID NO: 113603 - protein, 126 aa, Artificial Sequence
  derived and/or modified sequence
  misc_feature (1)..(1): Xaa can be any naturally occurring amino acid
XGLDRMSSSFDRMGPGIGAILERSIDMDRGFLSGPMGSGMRERIGSKGNQIFVRNLPFDLTWQKLKEKFSQCGHVMFAEIKMENGKSKGCGTVRFDSPESAEKACRIMNGIKISGREIDVRLDRNA

SEQ ID NO: 113604 - DNA, 1731 bp, Artificial Sequence
  derived and/or modified sequence
atggccgacgccaacaaggccgaggtgcccggcgccaccggcggcgacagcccccacctgcagcccgccgagccccccggcgagcccagaagagagccccaccccgccgaggccgagaagcagcagccccagcacagcagcagcagcaacggcgtgaagatggagaacgacgagagcgccaaggaggagaagagcgacctgaaggagaagagcaccggcagcaagaaggccaacagattccacccctacagcaaggacaagaacagcggcgccggcgagaagaagggccccaacagaaacagagtgttcatcagcaacatcccctacgacatgaagtggcaggccatcaaggacctgatgagagagaaggtgggcgaggtgacctacgtggagctgttcaaggacgccgagggcaagagcagaggctgcggcgtggtggagttcaaggacgaggagttcgtgaagaaggccctggagaccatgaacaagtacgacctgagcggcagacccctgaacatcaaggaggaccccgacggcgagaacgccagaagagccctgcagagaaccggcggcagcttccccggcggccacgtgcccgacatgggcagcggcctgatgaacctgccccccagcatcctgaacaaccccaacatcccccccgaggtgatcagcaacctgcaggccggcagactgggcagcaccatcttcgtggccaacctggacttcaaggtgggctggaagaagctgaaggaggtgttcagcatcgccggcaccgtgaagagagccgacatcaaggaggacaaggacggcaagagcagaggcatgggcaccgtgaccttcgagcaggccatcgaggccgtgcaggccatcagcatgttcaacggccagttcctgttcgacagacccatgcacgtgaagatggacgacaagagcgtgccccacgaggagtacagaagccacgacggcaagaccccccagctgcccagaggcctgggcggcatcggcatgggcctgggccccggcggccagcccatcagcgccagccagctgaacatcggcggcgtgatgggcaacctgggccccggcggcatgggcatggacggccccggcttcggcggcatgaacagaatcggcggcggcatcggcttcggcggcctggaggccatgaacagcatgggcggcttcggcggcgtgggcagaatgggcgagctgtacagaggcgccatgaccagcagcatggagagagacttcggcagaggcgacatcggcatcaaccagggcttcggcgacagcttcggcagactgggcggcggcatgggcagcatgaacagcgtgaccggcggcatgggcatgggcctggacagaatgagcagcagcttcgacagaatgggccccggcatcggcgccatcctggagagaagcatcgacatggacagaggcttcctgagcggccccatgggcagcggcatgagagagagaatcggcagcaagggcaaccagatcttcgtgagaaacctgcccttcgacctgacctggcagaagctgaaggagaagttcagccagtgcggccacgtgatgttcgccgagatcaagatggagaacggcaagagcaagggctgcggcaccgtgagattcgacagccccgagagcgccgagaaggcctgcagaatcatgaacggcatcaagatcagcggcagagagatcgacgtgagactggacagaaacgcctag

SEQ ID NO: 113605 - DNA, 1731 bp, Artificial Sequence
  derived and/or modified sequence
atggcggacgccaacaaggcagaggtccctggagccactggaggtgacagtccacacctgcaacccgccgaacctccgggagagccccggcgcgagccacatcccgccgaagcagaaaagcagcagccccagcatagcagctcctctaacggcgtaaaaatggaaaacgatgaatctgccaaagaggagaagtccgatttaaaagaaaagagcacaggctctaagaaggccaatcgcttccatccctatagtaaggacaagaactccggagccggcgagaaaaagggccccaaccgcaatcgggtgtttatcagtaacattccttatgacatgaaatggcaggctatcaaggacctgatgcgggaaaaagtcggcgaggttacctacgtggaactctttaaggacgctgagggcaagtctcggggctgtggagtggtcgagtttaaagacgaagaattcgttaaaaaggcgcttgagacgatgaacaaatacgatctttctgggcgacccctgaatattaaggaagatcctgatggtgagaacgctcggagagccctgcagcgaactggaggatccttccccggcggccatgtgccagacatgggatctggcctgatgaatctgccaccttctatacttaacaatcctaacattcctccagaggtgatttctaatcttcaggccggtcgcctggggtctacaatctttgtcgccaatctcgactttaaggttggctggaaaaagctgaaggaagtcttttctatagctggcacggtgaaaagagctgacattaaagaggacaaggacggcaagtcccgggggatgggtacagtcacctttgagcaagccattgaagccgttcaggcaatatcgatgtttaacggccaatttctgttcgatcggcccatgcacgtcaaaatggatgataagtcagtcccccatgaggaatatagatctcacgacgggaaaactccccagctaccaaggggcctgggaggcatcgggatggggctaggacccggtggtcagcccatatcagctagccagttgaatatcggtggcgtgatgggtaatttagggccaggcggaatggggatggatggcccgggttttggcggcatgaacagaatcgggggggggattggcttcggcgggttagaagctatgaatagtatgggagggttcgggggcgtcggacgtatgggcgaactttataggggtgcaatgaccagtagcatggaaagagatttcggacgtggtgacattggaataaatcaggggtttggcgacagtttcggacggctcggcggaggcatgggctccatgaactctgtcaccggcggcatgggaatgggccttgacagaatgtcctctagctttgatcgcatgggccccggaatcggcgcaatcctagagagatctattgacatggaccgcgggttcctctccggacccatgggcagtgggatgcgggagcgaattggatcaaaagggaatcagattttcgtgaggaacctgccatttgacctgacctggcagaaactcaaagagaaattctcccaatgcggccatgtaatgtttgccgaaataaaaatggaaaatggaaagtctaagggctgcgggacggtgcgttttgactctcccgagtcagcggaaaaggcctgccggatcatgaacggaatcaaaatatcaggacgcgaaatcgacgtgcgactagaccggaatgcctag

SEQ ID NO: 113606 - DNA, 1731 bp, Artificial Sequence
  derived and/or modified sequence
atggctgatgccaacaaggccgaggtgcctggggccactggaggagacagcccccacctgcagcctgctgagcccccaggagagccccggcgggagccccaccctgctgaggccgagaagcagcagccccagcacagcagcagcagcaatggagtgaagatggagaatgatgaaagtgccaaggaggagaagagtgacctgaaggagaagagcacaggcagcaagaaggccaaccgcttccacccctacagcaaggacaagaacagcggggccggggagaagaagggccccaacagaaacagagtcttcatcagcaacatcccctatgacatgaagtggcaggccatcaaggacctgatgagggagaaggtgggggaggtgacctacgtggagctgttcaaggatgctgagggcaagagccggggctgcggcgtggtggagttcaaggatgaggagtttgtgaagaaggccctggagaccatgaacaagtatgacctgagcggccggcccctgaacatcaaggaggaccctgatggagaaaatgcccggcgggccctgcagaggactggaggcagcttccctgggggccacgtgcctgacatgggcagcggcctgatgaacctgcccccatccatcctgaacaaccccaacatccccccagaggtgatcagcaacctgcaggccggccgcctgggcagcaccatctttgtggccaacctggacttcaaggtgggctggaagaagctgaaggaggtgttcagcattgctggcaccgtgaagagagctgacatcaaggaggacaaggatggcaagagccggggcatgggcaccgtgacctttgagcaggccatcgaggccgtgcaggccatctccatgttcaacggccagttcctgtttgaccggcccatgcacgtgaagatggatgacaagtctgtgccccatgaggagtaccgcagccatgatggcaagaccccccagctgccccggggcctgggcggcatcggcatgggcctgggccctgggggccagcccatcagcgccagccagctgaacatcggcggcgtgatgggcaacctgggccctgggggcatgggcatggatggccctggctttggaggcatgaacagaattggaggcggcattggatttggaggcctggaggccatgaacagcatgggcggctttggaggagtgggccgcatgggagagctgtacagaggagccatgaccagctccatggagcgggactttggccgcggggacatcggcatcaaccagggctttggagacagctttggccgcctgggcggcggcatgggctccatgaacagcgtgactggaggcatgggcatgggcctggacaggatgagcagcagctttgacaggatgggccctggcattggagccatcctggagaggagcattgacatggaccggggcttcctgagcggccccatgggcagcggcatgagggagcgcatcggcagcaaaggaaaccagatctttgtgaggaacctgccctttgacctgacctggcagaagctgaaggagaagttcagccagtgtggccacgtgatgtttgctgagatcaagatggagaatggcaagagcaagggctgcggcaccgtgcgctttgacagccctgagagcgctgagaaggcctgccgcatcatgaatggcatcaagatcagcggccgggagattgatgtgcggctggacagaaatgcctag

SEQ ID NO: 113607 - DNA, 2958 bp, Artificial Sequence
  derived and/or modified sequence
actgagcgctcggggccttttcaaatcgggatccgttaccgcttccccggcagccgccattgtcgcgctcggagcccctcagctcaggcggccgaggcggaggcagcggcggcgggatggcggacgccaacaaggccgaggtgcccggggccactggtggcgacagcccgcacctgcagcccgcagagccgccgggcgagccgcggcgagagccgcaccccgcggaggcggagaagcagcagccgcagcacagcagcagctccaatggcgttaaaatggagaatgatgaatcagcaaaagaagagaaatctgacttaaaggaaaaatctacaggaagtaagaaggccaatagatttcatccttattcaaaagacaagaattcgggcgctggagaaaagaagggtccaaatcgtaacagagttttcattagcaacatcccatatgacatgaaatggcaagctattaaagatctaatgagagagaaagttggtgaggttacatacgtggagctctttaaggatgcggaaggaaaatcaaggggttgtggtgtggttgaattcaaagatgaagaatttgtaaagaaagccctagaaactatgaacaaatatgatcttagtggaagaccccttaatattaaagaggatcctgatggagaaaatgctcgtagggcattgcagcgaacaggaggatcatttccaggaggacacgtccctgatatgggatcagggttgatgaatttaccaccttccatactcaataatccaaacattcctcctgaagtcatcagtaatttgcaggccggtagacttggttccacaatttttgttgccaatcttgacttcaaagttggttggaagaagctaaaggaagtgttcagcatagctggaactgtgaagcgggcagatattaaagaagacaaagatggcaagagcagaggaatgggcactgtcacttttgagcaagcaattgaagcagttcaagcaatttctatgttcaatgggcagtttttatttgatagacctatgcatgtgaaaatggatgacaagtctgttcctcatgaagagtaccgttcacatgatggtaaaacaccacaattaccacgtggtcttggaggcattgggatgggacttggtccgggtggacagcctattagtgccagccagttgaacataggtggagtaatgggaaatttaggtccaggtggtatgggaatggatggtccaggttttggaggaatgaatagaattggaggaggaatagggtttggtggtctggaagcaatgaatagcatgggaggatttggaggagttggccgaatgggagagctgtaccgtggtgcgatgactagtagcatggagcgagattttggacgtggtgatattggaataaatcaaggctttggagattcctttggtagacttggtggtggaatgggtagcatgaacagtgtgactggaggaatggggatgggactggaccggatgagttccagctttgatagaatgggaccaggtataggagctatactggaaaggagcatcgatatggatcgaggatttttatcgggtccaatgggaagcggaatgagagagagaataggctccaaaggcaaccagatatttgtcagaaatctaccttttgacttgacttggcagaaactaaaagagaaattcagtcagtgtggtcatgtaatgtttgcagaaataaaaatggagaatggaaagtcaaaaggctgtggaacagtcagatttgactccccagaatcagctgaaaaagcctgcagaataatgaatggcataaaaatcagtggcagagaaattgatgttcgcttggatcgtaatgcataatttcaagccatggttggaacattcctacatctgttttgctgaatctcctagtaaaagtcatttttttaaagtaatattgtatgcttacaaaagctgtaaaaatgaacttttaaaactcccaccagcttttaacagtataatgttaaaaatatactgtaatttttgttaatctcaagtttgggtttttaaagacagcaagtctggtcattcagtttaaatgaatggttatactgtttttaatgaaataagccattttcttgttgttttcagtactacatagttggatttgtttgttctagtttctccagtttttgtcaacttattgtatggtaaaacatagattttttccccccaaacttctgttttataatatgtaatttttcatgaaaagaaagggctcagaaaaattaggatgtgattttggttggttttaaattactgtaagttttagattctaaggttcaagatttttaaaatttgatttaaatgaagaaatggatttttctctctgcccctccctgccattcatattttctgcataacactattaataatatcaacctccacagccccttattttattatttccaataattccaagttcatatagaactgataatgtagcaagccccaagtatgataataggcagactattcccaactttctgtctagtttccagccattgaagtgaactgctaaaaaaagaaaaataattgaaatgttgagagagatggttatgtaagttagtcctctgctgtttacttctgcaggagctgatccatttataaatgcagttttaataaaccatggaataccaaggcacaacatatcaaacacattggatcccacgatgttagacatagccatatctcctttccctacaaaagaaaagcatactgttaaaatgtgcttaccaatactgtgttttattaataatcttcataagaaaagaaacactggatacttttttgttgttgattcgttttgaaaaattgttgttagagcaaaagtcttactgaatttgtatttttaaatttttcttgggttagtatttaaagtcttaacatttatttaataattatatttattaaaccatttttcaataaggta

SEQ ID NO: 113608 - DNA, 5331 bp, Artificial Sequence
  derived and/or modified sequence
tccgggttactgagcgctcggggccttttcaaatcgggatccgttaccgcttccccggcagccgccattgtcgcgctcggagcccctcagctcaggcggccgaggcggaggcagcggcggcgggatggcggacgccaacaaggccgaggtgcccggggccactggtggcgacagcccgcacctgcagcccgcagagccgccgggcgagccgcggcgagagccgcaccccgcggaggcggagaagcagcagccgcagcacagcagcagctccaatggcgttaaaatggagaatgatgaatcagcaaaagaagagaaatctgacttaaaggaaaaatctacaggaagtaagaaggccaatagatttcatccttattcaaaagacaagaattcgggcgctggagaaaagaagggtccaaatcgtaacagagttttcattagcaacatcccatatgacatgaaatggcaagctattaaagatctaatgagagagaaagttggtgaggttacatacgtggagctctttaaggatgcggaaggaaaatcaagggtaagtggtgtggttgaattcaaagatgaagaatttgtaaagaaagccctagaaactatgaacaaatatgatcttagtggaagaccccttaatattaaagaggatcctgatggagaaaatgctcgtagggcattgcagcgaacaggaggatcatttccaggaggacacgtccctgatatgggatcagggttgatgaatttaccaccttccatactcaataatccaaacattcctcctgaagtcatcagtaatttgcaggccggtagacttggttccacaatttttgttgccaatcttgacttcaaagttggttggaagaagctaaaggaagtgttcagcatagctggaactgtgaagcgggcagatattaaagaagacaaagatggcaagagcagaggaatgggcactgtcacttttgagcaagcaattgaagcagttcaagcaatttctatgttcaatgggcagtttttatttgatagacctatgcatgtgaaaatggatgacaagtctgttcctcatgaagagtaccgttcacatgatggtaaaacaccacaattaccacgtggtcttggaggcattgggatgggacttggtccgggtggacagcctattagtgccagccagttgaacataggtggagtaatgggaaatttaggtccaggtggtatgggaatggatggtccaggttttggaggaatgaatagaattggaggaggaatagggtttggtggtctggaagcaatgaatagcatgggaggatttggaggagttggccgaatgggagagctgtaccgtggtgcgatgactagtagcatggagcgagattttggacgtggtgatattggaataaatcaaggctttggagattcctttggtagacttggtggtggaatgggtagcatgaacagtgtgactggaggaatggggatgggactggaccggatgagttccagctttgatagaatgggaccaggtataggagctatactggaaaggagcatcgatatggatcgaggatttttatcgggtccaatgggaagcggaatgagagagagaataggctccaaaggcaaccagatatttgtcagaaatctaccttttgacttgacttggcagaaactaaaagagaaattcagtcagtgtggtcatgtaatgtttgcagaaataaaaatggagaatggaaagtcaaaaggctgtggaacagtcagatttgactccccagaatcagctgaaaaagcctgcagaataatgaatggcataaaaatcagtggcagagaaattgatgttcgcttggatcgtaatgcataatttcaagccatggttggaacattcctacatctgttttgctgaatctcctagtaaaagtcatttttttaaagtaatattgtatgcttacaaaagctgtaaaaatgaacttttaaaactcccaccagcttttaacagtataatgttaaaaatatactgtaatttttgttaatctcaagtttgggtttttaaagacagcaagtctggtcattcagtttaaatgaatggttatactgtttttaatgaaataagccattttcttgttgttttcagtactacatagttggatttgtttgttctagtttctccagtttttgtcaacttattgtatggtaaaacatagattttttccccccaaacttctgttttataatatgtaatttttcatgaaaagaaagggctcagaaaaattaggatgtgattttggttggttttaaattactgtaagttttagattctaaggttcaagatttttaaaatttgatttaaatgaagaaatggatttttctctctgcccctccctgccattcatattttctgcataacactattaataatatcaacctccacagccccttattttattatttccaataattccaagttcatatagaactgataatgtagcaagccccaagtatgataataggcagactattcccaactttctgtctagtttccagccattgaagtgaactgctaaaaaaagaaaaataattgaaatgttgagagagatggttatgtaagttagtcctctgctgtttacttctgcaggagctgatccatttataaatgcagttttaataaaccatggaataccaaggcacaacatatcaaacacattggatcccacgatgttagacatagccatatctcctttccctacaaaagaaaagcatactgttaaaatgtgcttaccaatactgtgttttattaataatcttcataagaaaagaaacactggatacttttttgttgttgattcgttttgaaaaattgttgttagagcaaaagtcttactgaatttgtatttttaaatttttcttgggttagtatttaaagtcttaacatttatttaataattatatttattaaaccatttttcaataaggtatatagcttatttgttgcttttcattgtaatttaacatggttaatggttaattactatttaacacacatttcaaatgaatattatttgggggattagattgagtgaaattaacctgctattaaatagtaaacttttcctctggagtcacttttttcccccttcaaagtatgttactgaggaagtaaacttttttttttttttttggtttttgttttttgagacacagtctcgctctgttgcccaggctgctggagtgccgtggcgcaatctcggctcactgcaacctccgcctcctggattcaaacaattctcctgcctcagcctcctgagtagctgggattacaggcacatgccaccacgcccggctaatttttgtatttttagtagagactgggtttcaccatgttggtcaggctggtctcaaactcctgacctcgtgatccacccgcctcggcctcccaaaatcctgggattacaggcgcgagccaccacacccggctggaagtaaacatttttaaagctacttttactcattctagccttgtagaatgaccattgcagcttgagggacctagttcttaccttttcttgcaaccaacacacttgcaattgtgtctggtatgcttgttcctgctgctaataaagtaaggcccattactgtatcgggaatttctagtgtttcccctgtaataaacagatatttcaagttacaaatcttaaagattcactaaccatcctttgcagttattttggatatttccttcgtgaacaaaaataaaataggcacatttagaattcagagccaatatgtgcttgcttattagttttttagctagcaacatatttgaatcaggctggtaattcgggtaacccaggtagcacagatttttaatgacatatctaaagatacgtaacagctaaaattctgccagtgagaaattttcctgtttgatattcttacaaaagatgtttatgtccaccattatctcatcagggctgtgctgaatatttgataatgagactgatcattccgctttttctttcttaaaaatattagtcagagttaagcaaattaattatagctatctttaagctataaatgtgttaacatgtatatataccatttattatgttctactttagtgatataccttaatttagtgggctttggcagggcgggggagggggaacgttcattaatctctgaggaaaacaaaacctgttttctacttgagtctaacatatggtcccaatttattaatacttctgttaaatttgatgtcaggtcaacatttttcagaaatgtatttattctcagaaacagaaccagagagaagttaaacaaaaggttatgtaactgttcctttaatgttgtaattgaaaacttggtttagcgtcttttttttctttctctttttttttcttaaaatgccaactaaaataattagaaagtagcttatttattgcatgcttatacattgatattggaattggaattggttgttaatttctgttactggctttgctagaattcatatgtgcataaataacactaatatttatcatcttgggggctgttctgtgatctattacatgatttttgctctctttttatttttctagtatcaaatgtgttctggctgagtgaatttggatagatataatatgcaagctaattggactttttcatttttctcattaaaaaaaggaagaagtagtccactttttgctagcatactattctgagacttacattaatttgggaaaagtcaagggtcaacaaatttttgtgtctgtgaggggccagatagtaattatttaggctttgcaggctgtgtgatttctgttgcagttattcagctttgccaatgtagtgtgaaaacaatcatagataatatgtaaaaccttactaataaaaacaagctgggttatgttggcacacaggcagtagtttgttcacctctgctgtaagttaatttgggttaacctttgtaggagaaattacagattatttttgtctttgttcatagtttttttgtttagggactgtagtggattatggccaagcagcagtagctagttaagtcttaatcatgaaggtagtagaaacctagaataaaattattatgcccttttcactcatttcataatatgtttgtattgccgtgttgaaaagccaaataaaatacaatccagttaagcagtgagcacccattgttttcccaaaaatagagctccttgctttgtttttgtttttttgttcttttttttttttattatggaatggaattcaatataaagagtttattgtggaccccatggaatgtgattaaattattagcataataaaaagacatcctatgaa

SEQ ID NO: 113609 - DNA, 1731 bp, Artificial Sequence
  derived and/or modified sequence
atggccgacgccaacaaggccgaggtgcccggcgccaccggcggcgacagcccacacctgcagcccgcagagcccccaggagaacctaggcgggaaccccatccagccgaggcggagaaacagcagcctcaacacagctcaagcagtaatggcgtgaaaatggagaatgatgagtctgcgaaagaagagaagtcggacttaaaggaaaaatctaccggctcgaagaaggcaaatcgtttccacccttactctaaggacaaaaattccggcgcaggcgaaaagaaggggcctaaccgtaatcgagtctttatatccaacatcccctacgatatgaaatggcaggctatcaaagatctgatgcgcgagaaggtcggtgaggtaacatacgtggagttgttcaaagatgccgaaggtaaatcgcgcggttgcggagtggtggaatttaaagatgaggagttcgtgaagaaagctcttgaaactatgaataaatatgatctttcaggcagaccactgaacattaaggaggacccagacggagaaaacgcaagacgtgctcttcagagaaccggcggctcgttccccggtggccacgtgcccgatatgggcagtgggctcatgaacctaccaccatcaatactgaacaacccgaacattccccctgaggtcatttccaacctccaggccggtcggctgggaagtaccatcttcgtggctaatctggattttaaagtgggatggaagaagcttaaggaggtgtttagtatcgcgggcacagtgaaacgcgccgacatcaaggaggacaaggacggaaagtcgagagggatgggtaccgtgacattcgaacaagctattgaagcagtccaggctatatccatgttcaacggccagtttctctttgatcggcctatgcatgtgaaaatggatgacaagtccgtcccacacgaggagtatcgatcacatgacggcaaaactccacagctgcctcgcgggctggggggcattggaatgggcctcggaccgggtggtcaacccatctctgccagccagctaaacattggcggcgtcatggggaacttggggcccggaggcatgggtatggacggcccaggatttggtgggatgaaccggattggcggaggaatcggcttcggggggctggaagcaatgaattctatgggcggttttggaggggtcggccgcatgggggagctgtatcgcggggcaatgacgagtagcatggaaagggatttcggtcgcggggatatcggcatcaatcagggatttggggattccttcggtcggctcggggggggcatgggatcgatgaactcagtgacagggggcatgggtatggggctggacagaatgtcgtcgagctttgatcgaatgggcccagggattggggctatcctagaaagatctatagatatggacaggggattcttatctggccctatgggctctgggatgagggagcgcattggcagcaagggcaatcagatatttgttcggaacttaccatttgatctgacctggcagaagttaaaagagaagttctcccagtgtggccacgtgatgttcgcagagattaaaatggagaacggcaaatcgaaggggtgcggaacggtacgatttgacagccctgagtctgcagaaaaagcctgtagaattatgaacggaattaagatttcagggcgggaaattgacgtcagactggaccgcaatgcctag

SEQ ID NO: 113610 - DNA, 1731 bp, Artificial Sequence
  derived and/or modified sequence
atggccgacgcaaacaaggccgaggtgcctggcgcaaccgggggagatagcccacaccttcagcccgctgaaccaccgggagagcccagacgtgagccacatcctgcggaagcggaaaaacaacagccccagcacagctctagctcaaacggtgttaaaatggagaacgatgaaagcgcgaaggaggagaaaagcgatctcaaggaaaaatctaccgggtctaaaaaggccaaccgctttcacccctacagtaaggacaagaactcgggcgcaggcgagaaaaagggtccaaatcgtaatcgggtgtttataagcaacatcccttatgatatgaagtggcaggccattaaggatctcatgagggagaaggtcggcgaggtgacgtatgtggagttgtttaaagacgctgagggcaagagcagggggtgcggggtggttgaattcaaagatgaggagttcgttaaaaaagccctcgaaaccatgaacaagtacgatctctccgggagacctttgaacattaaagaagaccctgatggggagaatgcacggagagccctacagcgcacaggagggagtttccctggcggtcacgtcccagacatggggagcgggctgatgaacctccccccatctatcctgaataacccaaacattcctcccgaggtgattagcaatcttcaagccggtagactgggcagtacgatttttgttgccaatctggatttcaaggttggctggaaaaagctcaaagaggtcttttctatcgcaggcaccgtgaaaagagccgatataaaggaggacaaagacggtaaatcgcgtggaatgggaacagtaacattcgagcaggctatcgaggccgtgcaggccatttctatgttcaacggccagttcctttttgataggcccatgcatgtcaagatggatgacaaaagcgtcccgcatgaagaatacagatcccacgatggtaaaactccacagcttccgcgtgggttaggtgggataggaatgggcctcggcccaggaggccagcctatttccgctagtcagctcaatatcggcggtgtgatggggaatctgggccctggcggaatggggatggacggtcccggattcggcggaatgaaccgcatcggcggtggcatcgggttcggtggccttgaggccatgaatagcatgggcggattcggcggagttgggagaatgggcgaactttataggggcgcaatgacgagcagtatggagcgcgattttggccgtggggacatcgggatcaatcagggattcggcgactcttttgggaggctcggtgggggtatgggctccatgaactcagtgaccggcggtatgggcatgggcctggaccggatgagctcatctttcgatcggatgggccctgggatcggcgcaattttagagcgcagtatcgatatggacaggggttttctgtccggtcctatgggaagtggcatgcgggagagaataggcagcaagggcaatcaaatctttgttagaaacctgccgttcgatcttacatggcagaagttgaaggaaaagttcagtcagtgtgggcacgtgatgttcgctgaaattaagatggaaaatggaaaatctaaggggtgtggaaccgtgcgttttgactctccagagagcgccgaaaaagcatgtcggatcatgaacggaatcaaaatatccggacgggaaattgacgtgagattggatagaaacgcctag

SEQ ID NO: 113611 - DNA, 2247 bp, Artificial Sequence
  derived and/or modified sequence
atgaactaccaggaggccgccatctacctgcaggagggcgagaacaacgacaagttcttcacccaccccaaggacgccaaggccctggccgcctacctgttcgcccacaaccacctgttctacctgatggagctggccaccgccctgctgctgctgctgctgagcctgtgcgaggcccccgccgtgcccgccctgagactgggcatctacgtgcacgccaccctggagctgttcgccctgatggtggtggtgttcgagctgtgcatgaagctgagatggctgggcctgcacaccttcatcagacacaagagaaccatggtgaagaccagcgtgctggtggtgcagttcgtggaggccatcgtggtgctggtgagacagatgagccacgtgagagtgaccagagccctgagatgcatcttcctggtggactgcagatactgcggcggcgtgagaagaaacctgagacagatcttccagagcctgccccccttcatggacatcctgctgctgctgctgttcttcatgatcatcttcgccatcctgggcttctacctgttcagccccaaccccagcgacccctacttcagcaccctggagaacagcatcgtgagcctgttcgtgctgctgaccaccgccaacttccccgacgtgatgatgcccagctacagcagaaacccctggagctgcgtgttcttcatcgtgtacctgagcatcgagctgtacttcatcatgaacctgctgctggccgtggtgttcgacaccttcaacgacatcgagaagagaaagttcaagagcctgctgctgcacaagagaaccgccatccagcacgcctacagactgctgatcagccagagaagacccgccggcatcagctacagacagttcgagggcctgatgagattctacaagcccagaatgagcgccagagagagatacctgaccttcaaggccctgaaccagaacaacacccccctgctgagcctgaaggacttctacgacatctacgaggtggccgccctgaagtggaaggccaagaagaacagagagcactggttcgacgagctgcccagaaccgccctgctgatcttcaagggcatcaacatcctggtgaagagcaaggccttccagtacttcatgtacctggtggtggccgtgaacggcgtgtggatcctggtggagaccttcatgctgaagggcggcaacttcttcagcaagcacgtgccctggagctacctggtgttcctgaccatctacggcgtggagctgttcctgaaggtggccggcctgggccccgtggagtacctgagcagcggctggaacctgttcgacttcagcgtgaccgtgttcgccttcctgggcctgctggccctggccctgaacatggagcccttctacttcatcgtggtgctgagacccctgcagctgctgagactgttcaagctgaaggagagatacagaaacgtgctggacaccatgttcgagctgctgcccagaatggccagcctgggcctgaccctgctgatcttctactacagcttcgccatcgtgggcatggagttcttctgcggcatcgtgttccccaactgctgcaacaccagcaccgtggccgacgcctacagatggagaaaccacaccgtgggcaacagaaccgtggtggaggagggctactactacctgaacaacttcgacaacatcctgaacagcttcgtgaccctgttcgagctgaccgtggtgaacaactggtacatcatcatggagggcgtgaccagccagaccagccactggagcagactgtacttcatgaccttctacatcgtgaccatggtggtgatgaccatcatcgtggccttcatcctggaggccttcgtgttcagaatgaactacagcagaaagaaccaggacagcgaggtggacggcggcatcaccctggagaaggagatcagcaaggaggagctggtggccgtgctggagctgtacagagaggccagaggcgccagcagcgacgtgaccagactgctggagaccctgagccagatggagagataccagcagcacagcatggtgttcctgggcagaagaagcagaaccaagagcgacctgagcctgaagatgtaccaggaggagatccaggagtggtacgaggagcacgccagagagcaggagcagcagagacagctgagcagcagcgccgcccccgccgcccagcagccccccggcagcagacagagaagccagaccgtgacctag

SEQ ID NO: 113612 - DNA, 2247 bp, Artificial Sequence
  derived and/or modified sequence
atgaactaccaggaagccgctatctatctccaggaaggtgagaacaatgacaagtttttcactcaccctaaggacgcgaaggctttggccgcctacctgtttgcacacaaccacctgttctatctgatggagctcgcaacagccctcctgttactgctgctgtcactgtgtgaagcccccgcagtaccagcgctgcgtctgggaatctatgtccacgcgacccttgagcttttcgctctgatggtagtggtgttcgaactctgtatgaagctgcggtggctgggcctccacaccttcatcaggcataaacgaactatggttaagacttcagtgctggttgtccagttcgtggaggctattgtcgtcctggttcgccaaatgagccatgtcagggtgacccgggccctgaggtgtatttttctcgtagactgcagatattgcggaggtgtgcgaagaaatctgaggcagattttccagagcctgcccccctttatggatatcctcctgctgctactcttttttatgatcatcttcgctattctcggcttttatctgttttcaccaaatccaagtgatccctacttctccaccctagagaattctattgtctctctattcgtcctgctcacgaccgccaattttccggacgtgatgatgccctcgtacagcaggaacccgtggagttgtgtgtttttcatcgtctacctttctatcgaactatactttatcatgaacctccttttggctgtcgtgttcgacacctttaacgacatagagaaaagaaagttcaagtccctgctcctgcataagcgcacggctatccagcatgcttatcggcttctcatcagccagcgcagacctgccgggatctcttatagacagttcgaaggtttaatgcgtttttacaagcctcggatgagcgcccgcgagcggtatcttacattcaaggctctgaaccaaaacaacacacctctgctgtctttgaaggacttctacgatatttacgaagtggccgcgcttaagtggaaagccaaaaaaaacagggagcactggttcgacgagctaccccggactgcactcctgatttttaaaggcatcaacatactggtgaaatccaaggccttccaatatttcatgtatctggtggtggcagttaatggtgtttggatcctggttgagacctttatgctgaaaggcggtaacttcttcagtaaacacgtgccgtggtcttatctcgtattcttaacgatttacggggtggagctattcctcaaggtcgctggactgggtccagtcgagtatctcagttcagggtggaacttgtttgatttctctgtcacggtctttgcgttcctcggactgctggctctggccctgaacatggaacccttctacttcatcgtcgtcttaagacccctccagctgctgagactgttcaagctgaaagagagatacagaaacgtcctggacacaatgtttgagctgctcccccggatggcctcactgggactaaccctgctgattttctattactcctttgcgattgtcggtatggaattcttctgtgggatcgtgtttcctaattgctgtaacacctccacagttgccgacgcctacagatggaggaatcataccgtggggaatcggaccgtagtggaggaaggatactattacctgaataacttcgacaatatactgaacagtttcgtgacattgtttgaactgactgtggtgaacaactggtatataattatggagggcgttacatcccagacatcccactggagtcgactctacttcatgaccttttacatcgtcacaatggttgtgatgacaatcatcgtggcgtttatattggaggcctttgtgttccggatgaactactcaaggaagaatcaggactctgaggtcgacggaggaattaccctcgagaaagagattagtaaagaggagctcgttgctgtgctcgagttatatcgcgaagcgcgcggggcctcttctgacgtcacacggctcctggagacactgagtcagatggaaaggtaccaacagcacagtatggtcttcctggggcggaggagcagaactaagtctgacctgagtctcaagatgtaccaggaggagattcaagagtggtatgaggaacacgcacgggaacaggaacagcagagacagctaagtagcagtgctgcacctgctgcgcagcagcccccaggatcacggcaacgttctcagacggtgacctag

SEQ ID NO: 113613 - DNA, 2247 bp, Artificial Sequence
  derived and/or modified sequence
atgaactaccaggaggccgccatctacctgcaggagggggagaacaatgacaagttcttcacccaccccaaggatgccaaggccctggccgcctacctgtttgcccacaaccacctgttctacctgatggagctggccacagccctgctgctgctgctgctgagcctgtgtgaggccccagctgtgcctgccctgcggctgggcatctacgtgcacgccaccctggagctgtttgccctgatggtggtggtgtttgagctgtgcatgaagctgcgctggctgggcctgcacaccttcatccgccacaagaggaccatggtgaagacctctgtgctggtggtgcagtttgtggaggccatcgtggtgctggtgcggcagatgagccacgtgcgggtgacccgggccctgcgctgcatcttcctggtggactgccgctactgcggcggcgtgagaagaaacctgcggcagatcttccagagcctgccccccttcatggacatcctgctgctgctgctcttcttcatgatcatctttgccatcctgggcttctacctgttcagccccaaccccagcgacccctacttcagcaccctggagaacagcatcgtgtccctgtttgtgctgctgaccacagccaacttcccagatgtgatgatgcccagctacagcaggaacccctggagctgtgtgttcttcatcgtgtacctgagcattgagctgtacttcatcatgaacctgctgctggccgtggtgtttgacaccttcaatgacatcgagaagaggaagttcaagagcctgctgctgcacaagaggacagccatccagcacgcctaccgcctgctgatcagccagaggaggcctgctggcatctcctaccggcagtttgagggcctgatgaggttctacaagcccaggatgtctgcccgggagcgctacctgaccttcaaggccctgaaccagaacaacacccccctgctgagcctgaaggacttctatgacatctatgaggtggccgccctgaagtggaaggccaagaagaaccgggagcactggtttgatgagctgcccaggacagccctgctgatcttcaagggcatcaacatcctggtgaagagcaaggccttccagtacttcatgtacctggtggtggccgtgaatggagtgtggatcctggtggagaccttcatgctgaagggcggcaacttcttcagcaagcacgtgccctggagctacctggtgttcctgaccatctacggcgtggagctgttcctgaaggtggccggcctgggccctgtggagtacctgagcagcggctggaacctgtttgacttctctgtgacagtgtttgccttcctgggcctgctggccctggccctgaacatggagcccttctacttcatcgtggtgctgcggcccctgcagctgctgcggctcttcaagctgaaggagcgctacagaaatgtgctggacaccatgtttgagctgctgcccaggatggccagcctgggcctgaccctgctgatcttctactacagctttgccatcgtgggcatggagttcttctgtggcatcgtgttccccaactgctgcaacaccagcacagtggctgatgcctaccgctggaggaaccacacagtgggcaacagaacagtggtggaggagggctactactacctgaacaactttgacaacatcctgaacagctttgtgaccctgtttgagctgactgtggtgaacaactggtacatcatcatggagggcgtgaccagccagaccagccactggagccggctgtacttcatgaccttctacatcgtgaccatggtggtgatgaccatcatcgtggccttcatcctggaggcctttgtgttcaggatgaactacagcaggaagaaccaggacagcgaggtggatggcggcatcaccctggagaaggagatcagcaaggaggagctggtggccgtgctggagctgtaccgggaggcccggggggccagcagtgatgtgacccggctgctggagaccctgagccagatggagcgctaccagcagcacagcatggtgttcctgggccgccgcagcaggaccaagagtgacctgagcctgaagatgtaccaggaggagatccaggagtggtatgaggagcacgcccgggagcaggagcagcagaggcagctgagcagcagcgctgccccagctgcccagcagcccccaggcagccggcagaggagccagacagtgacctag

SEQ ID NO: 113614 - DNA, 2247 bp, Artificial Sequence
  derived and/or modified sequence
atgaactaccaggaggccgccatctacctgcaggagggcgagaacaacgataaattcttcacccacccaaaagatgccaaagcattggcagcatacttgttcgcacacaatcacctgttctatcttatggagctggcaacagcgctcctgttattactgctctctctttgtgaggcccccgccgtccctgccctgcgtttaggcatctacgttcacgcaaccctggaattgtttgccctcatggtcgttgtgttcgaactctgcatgaaattgagatggcttggactccatacatttataagacacaaacggaccatggttaaaaccagtgtgcttgtagttcagtttgtagaggccattgttgtgctggttcggcagatgagccatgtgagggtaaccagggccctgaggtgcatcttcctggtagactgtcgctactgcggcggggtgagacggaatctaaggcagatcttccagtctttacccccctttatggatatcttgcttctgctgctctttttcatgatcatatttgctattctgggtttctacctattctctcccaatcctagcgacccctattttagcacactggagaatagcatcgtgtccctttttgttctgctcacgacggccaacttccccgacgtaatgatgcccagctacagtcggaacccttggagttgtgttttcttcattgtatacttgagtatcgaactgtactttataatgaacctcctcctagccgtcgtatttgatacgttcaacgacatcgagaagcggaagttcaaatcactattgttacacaaaaggactgccatccagcatgcctacagacttctcatatcacagagacggcctgcgggaatcagttatcggcagtttgagggactgatgagattttataaacctcggatgtccgctagggagagatatcttactttcaaggctctaaatcagaataatacacctcttctatccttgaaagacttttacgatatctatgaggtggcagctcttaagtggaaggcaaaaaagaaccgcgaacactggtttgacgagttacctcggacagcactactcattttcaagggaataaatatcttggtgaaatccaaagcattccagtacttcatgtatctcgtcgtcgctgtgaatggggtctggatcctcgtggagactttcatgctcaagggcggcaatttctttagtaagcacgtgccatggtcctacctggtctttcttacaatctacggtgtggaactttttctcaaagtggcaggacttgggcccgtcgaatacctgtcttctggatggaatctcttcgacttctccgttacagtttttgctttcctgggcctgctcgctctggctctgaacatggagcctttctatttcatcgttgtgcttcggcccctgcagctcctgaggttattcaaactgaaagaaaggtatcggaatgtccttgataccatgtttgagttgctgcctaggatggctagcctgggactgaccctattgatattttattacagcttcgcgatcgtgggaatggagtttttttgcgggatcgtgttcccaaactgttgcaatacctctacagtggccgatgcctatcggtggaggaatcatacagtgggcaatagaaccgtggtcgaggagggatattactacctcaacaatttcgacaatatcctgaacagtttcgtcacactctttgagctgaccgtagtaaacaactggtatattatcatggagggtgtgacgtcccagacttctcactggtcccgtttatattttatgactttttatatcgtgacaatggtcgtgatgacaatcatcgtagcattcattctcgaggcctttgtgtttaggatgaactacagtcgcaagaaccaggactcagaggttgacggcggaatcacacttgagaaagagatctctaaagaagagctggtagctgtcctcgagctctatcgggaggcccggggggcctcctccgatgtgacacgactattggaaacactttcccagatggagagatatcagcagcatagcatggtgtttctggggcggagatccagaacgaaatccgacctgtccctaaaaatgtaccaagaggagatacaggagtggtacgaagagcacgccagggagcaggaacaacaaaggcagctgagcagttctgctgctccagcggctcaacagccccctgggagccggcagagatcgcagactgttacatag

SEQ ID NO: 113615 - DNA, 2247 bp, Artificial Sequence
  derived and/or modified sequence
atgaattaccaggaagccgcaatataccttcaggaaggcgagaataatgataaattttttactcatcccaaggacgcaaaggcgctggcagcatacctgtttgcgcataaccatttgttttatctgatggaattagccacagcactgcttttattactcctttccctgtgcgaggccccagccgtcccagcactgcgactgggtatttacgtccatgctaccctggagttgttcgcgctaatggtggttgtttttgaactgtgtatgaagttacgctggctggggctccacacattcattaggcacaagagaacaatggtcaagacaagtgtcctggtggtgcagtttgtcgaagcaatagtggttcttgtgcgacagatgtctcatgttcgtgtcacaagagccctgagatgcattttcctcgtcgattgtaggtactgtgggggagtgcgtcgaaacctgcgacaaatcttccagtccttacctcccttcatggacatattgctcctcctgctcttctttatgatcatatttgccatcctcggattctatcttttctccccgaatccttcggacccctacttcagcacgctcgagaactcaatcgtgtccctgtttgtgctactgacgacagccaatttcccagacgtgatgatgccatcctacagccgaaacccctggagctgtgttttttttatagtctatctcagtattgagctgtacttcataatgaacctactgctagccgtcgtctttgataccttcaatgatatcgaaaagaggaagtttaaatccttgctgttgcacaagcgtaccgcaattcagcacgcttatagattactgatttcccaaagacggcctgcagggattagctatcgccagtttgaaggcctgatgcggttctacaaaccgagaatgagcgccagggaacgctatctgacattcaaggccctgaaccagaacaacacgcccctcctgtcactgaaagatttctatgacatctatgaggtcgctgcactaaagtggaaggcgaagaagaatcgagagcactggtttgatgagttacctcgcactgccctgcttatttttaaaggcattaacattctcgttaaaagtaaggccttccagtacttcatgtatcttgtggtcgctgtcaatggcgtgtggattctcgtggaaacttttatgttgaaggggggaaactttttttccaagcacgtcccgtggtcatacctggtgttcctgactatttatggggtggagcttttccttaaggtcgccggactcgggcctgttgaatatctatcgagcggctggaacttattcgatttcagcgtcactgtatttgccttcttgggactattagcattggcactgaatatggaaccattctactttatcgtcgtactcagaccgttgcagcttctgcggcttttcaaactgaaggagagatatagaaatgtactggatacaatgtttgaactgctgccacggatggcctctctcggcctgaccctgctcattttttactacagctttgctatcgtgggcatggaattcttttgtggaatcgtgtttccgaattgctgtaacacgtccactgtcgccgacgcctacagatggcgcaatcatacagtgggaaaccggactgtcgttgaggagggctattattatctcaataatttcgataacatcctgaattcatttgtgactttgtttgaactcactgtggtcaataactggtacatcatcatggagggcgtgacatctcagacctcgcattggagtaggctgtactttatgacattctacatcgtcaccatggtcgttatgactatcatcgttgcatttatcctggaagcattcgtctttagaatgaactattcacggaagaaccaggactccgaggtcgacgggggaatcacgttggagaaagagatctccaaggaggagcttgtggcggtgctggaactctacagggaagccagaggcgcatcatcagatgtgactcggctgcttgagacgctctcacaaatggagaggtaccagcagcattcgatggtctttttaggtagaaggtcccggaccaagtcagacctctcactgaaaatgtatcaggaggaaatccaggagtggtatgaggagcatgctcgcgaacaggagcagcaaagacagctgtcttcaagtgctgctcccgcagcccagcaacctccaggatcccgccagcgatcccagaccgtcacttag

SEQ ID NO: 113616 - protein, 284 aa, Artificial Sequence
  derived and/or modified sequence
MDAIKKKMQMLKLDKENAIDRAEQAEADKKQAEDRCKQLEEEQQALQKKLKGTEDEVEKYSESVKEAQEKLEQAEKKATDAEADVASLNRRIQLVEEELDRAQERLATALQKLEEAEKAADESERGMKVIENRAMKDEEKMELQEMQLKEAKHIAEDSDRKYEEVARKLVILEGELERSEERAEVAESKCGDLEEELKIVTNNLKSLEAQADKYSTKEDKYEEEIKLLEEKLKEAETRAEFAERSVAKLEKTIDDLEETLASAKEENVEIHQTLDQTLLELNNL

SEQ ID NO: 113617 - protein, 322 aa, Artificial Sequence
  derived and/or modified sequence
MDAIKKKMQMLKLDKENAIDRAEQAEADKKQAEDRCKQLEEEQQALQKKLKGTEDEVEKYSESVKEAQEKLEQAEKKATDAEADVASLNRRIQLVEEELDRAQERLATALQKLEEAEKAADESERGMKVIENRAMKDEEKMELQEMQLKEAKHIAEDSDRKYEEVARKLVILEGELERSEERAEVAESKCGDLEEELKIVTNNLKSLEAQADKYSTKEDKYEEEIKLLEEKLKEAETRAEFAERSVAKLEKTIDDLEESTSIATTEHWFTPDTLALTDTPSPCTEPTHKTPWPTLKPLCTGTPWLSLSDSPLHVGTCGPIKP

SEQ ID NO: 113618 - DNA, 855 bp, Artificial Sequence
  derived and/or modified sequence
atggacgccatcaagaagaagatgcagatgctgaagctggacaaggagaacgccatcgacagagccgagcaggccgaggccgacaagaagcaggccgaggacagatgcaagcagctggaggaggagcagcaggccctgcagaagaagctgaagggcaccgaggacgaggtggagaagtacagcgagagcgtgaaggaggcccaggagaagctggagcaggccgagaagaaggccaccgacgccgaggccgacgtggccagcctgaacagaagaatccagctggtggaggaggagctggacagagcccaggagagactggccaccgccctgcagaagctggaggaggccgagaaggccgccgacgagagcgagagaggcatgaaggtgatcgagaacagagccatgaaggacgaggagaagatggagctgcaggagatgcagctgaaggaggccaagcacatcgccgaggacagcgacagaaagtacgaggaggtggccagaaagctggtgatcctggagggcgagctggagagaagcgaggagagagccgaggtggccgagagcaagtgcggcgacctggaggaggagctgaagatcgtgaccaacaacctgaagagcctggaggcccaggccgacaagtacagcaccaaggaggacaagtacgaggaggagatcaagctgctggaggagaagctgaaggaggccgagaccagagccgagttcgccgagagaagcgtggccaagctggagaagaccatcgacgacctggaggagaccctggccagcgccaaggaggagaacgtggagatccaccagaccctggaccagaccctgctggagctgaacaacctgtag

SEQ ID NO: 113619 - DNA, 969 bp, Artificial Sequence
  derived and/or modified sequence
atggacgccatcaagaagaagatgcagatgctgaagctggacaaggagaacgccatcgacagagccgagcaggccgaggccgacaagaagcaggccgaggacagatgcaagcagctggaggaggagcagcaggccctgcagaagaagctgaagggcaccgaggacgaggtggagaagtacagcgagagcgtgaaggaggcccaggagaagctggagcaggccgagaagaaggccaccgacgccgaggccgacgtggccagcctgaacagaagaatccagctggtggaggaggagctggacagagcccaggagagactggccaccgccctgcagaagctggaggaggccgagaaggccgccgacgagagcgagagaggcatgaaggtgatcgagaacagagccatgaaggacgaggagaagatggagctgcaggagatgcagctgaaggaggccaagcacatcgccgaggacagcgacagaaagtacgaggaggtggccagaaagctggtgatcctggagggcgagctggagagaagcgaggagagagccgaggtggccgagagcaagtgcggcgacctggaggaggagctgaagatcgtgaccaacaacctgaagagcctggaggcccaggccgacaagtacagcaccaaggaggacaagtacgaggaggagatcaagctgctggaggagaagctgaaggaggccgagaccagagccgagttcgccgagagaagcgtggccaagctggagaagaccatcgacgacctggaggagagcaccagcatcgccaccaccgagcactggttcacccccgacaccctggccctgaccgacacccccagcccctgcaccgagcccacccacaagaccccctggcccaccctgaagcccctgtgcaccggcaccccctggctgagcctgagcgacagccccctgcacgtgggcacctgcggccccatcaagccctag

SEQ ID NO: 113620 - DNA, 855 bp, Artificial Sequence
  derived and/or modified sequence
atggatgctatcaagaagaagatgcagatgctgaaacttgataaggaaaacgcaatagatcgagcggaacaggctgaagccgataagaagcaggcagaggatcgctgtaagcaactggaggaggaacaacaggccctgcagaaaaagttgaagggtaccgaggacgaagtagaaaagtatagcgaaagtgtgaaggaagctcaggaaaaattggagcaggcagagaagaaggccacggacgctgaggcggatgtggccagtctgaaccggcggattcagctggtggaagaggaattagaccgggcccaggagagactcgcaacagccctgcagaagctcgaggaggctgagaaagcagccgatgagtccgagagaggcatgaaggtgattgaaaaccgcgccatgaaggatgaggaaaagatggagctgcaggaaatgcagcttaaggaggccaagcatatcgccgaagacagcgacagaaagtacgaagaggtcgctagaaaacttgtaatcttggaaggcgagctcgagagatccgaagagcgcgctgaggtcgcagagagcaagtgtggagacctcgaagaggagctgaagatcgtgaccaacaatctcaaatctcttgaggcgcaggccgataagtactctacaaaggaagacaagtatgaggaggagatcaaactcctcgaagaaaaactgaaagaggcagagacacgcgcggagttcgccgaaaggagtgtggcaaaactggaaaagacaatcgacgacttggaagagaccctcgcctccgccaaagaagaaaacgtcgagattcatcagaccttagaccaaacattgctggagctgaacaacctgtag

SEQ ID NO: 113621 - DNA, 969 bp, Artificial Sequence
  derived and/or modified sequence
atggacgcaatcaaaaagaaaatgcagatgctgaagctggataaagaaaatgccatagatcgggcagaacaagcagaggcggataagaagcaggccgaagaccggtgcaagcagctcgaagaggagcagcaggcgctgcagaagaaactgaaaggaacagaagacgaagtcgaaaaatattctgaatcggtaaaggaagcccaggagaagttagagcaggcagagaaaaaagccactgacgccgaggctgacgtggcctccttgaaccgtcgaattcagttagtcgaagaagaactggatagagcacaggaaagacttgccaccgccctgcagaaactcgaggaggccgaaaaagccgccgacgagtctgagagaggaatgaaagtcattgaaaatagggctatgaaggacgaggaaaaaatggagctgcaggaaatgcagctgaaagaggcaaagcacattgctgaggatagtgacagaaaatatgaggaagttgcccggaagctagttattcttgagggagaacttgaaaggtctgaggagagagctgaggtggctgagtccaaatgcggcgacctagaagaagaattgaaaattgtaaccaataatcttaagtctctcgaagcgcaggcggataaatattccaccaaggaggacaaatacgaagaagagattaagctgctcgaggagaagttaaaagaggctgaaaccagagccgagttcgcagagcgatcagtggctaaactagaaaagaccatcgacgacctggaggagagcacatcaattgccacgactgagcactggtttactcccgatacgctggcactgactgacacacccagcccatgcaccgagcccacccataagactccctggccaacattgaagcccctgtgtacgggcactccctggctgtccctcagcgactcccccctgcatgttggcacatgtggaccgattaagccctag

SEQ ID NO: 113622 - DNA, 855 bp, Artificial Sequence
  derived and/or modified sequence
atggatgccatcaagaagaagatgcagatgctgaagctggacaaggaaaatgccatcgacagagctgagcaggccgaggccgacaagaagcaggctgaagatcgctgcaagcagctggaggaggagcagcaggccctgcagaagaagctgaagggcacagaagatgaggtggagaagtacagcgagagcgtgaaggaggcccaggagaagctggagcaggccgagaagaaggccacagatgctgaggctgatgtggccagcctgaacagacgcatccagctggtggaggaggagctggaccgggcccaggagcggctggccacagccctgcagaagctggaggaggccgagaaggccgcagatgaaagtgagcggggcatgaaggtgattgaaaatagagccatgaaggatgaggagaagatggagctgcaggagatgcagctgaaggaggccaagcacatcgccgaggacagcgacagaaaatatgaggaggtggccaggaagctggtgatcctggagggggagctggagaggtctgaggagagagctgaggtggccgagagcaaatgtggggacctggaggaggagctgaagatcgtgaccaacaacctgaagagcctggaggcccaggccgacaagtacagcaccaaggaggacaagtatgaggaggagatcaagctgctggaggagaagctgaaggaggccgagaccagggctgagtttgctgagaggtctgtggccaagctggagaagaccattgatgacctggaggagaccctggccagcgccaaggaggagaatgtggagatccaccagaccctggaccagaccctgctggagctgaacaacctgtag

SEQ ID NO: 113623 - DNA, 969 bp, Artificial Sequence
  derived and/or modified sequence
atggatgccatcaagaagaagatgcagatgctgaagctggacaaggaaaatgccatcgacagagctgagcaggccgaggccgacaagaagcaggctgaagatcgctgcaagcagctggaggaggagcagcaggccctgcagaagaagctgaagggcacagaagatgaggtggagaagtacagcgagagcgtgaaggaggcccaggagaagctggagcaggccgagaagaaggccacagatgctgaggctgatgtggccagcctgaacagacgcatccagctggtggaggaggagctggaccgggcccaggagcggctggccacagccctgcagaagctggaggaggccgagaaggccgcagatgaaagtgagcggggcatgaaggtgattgaaaatagagccatgaaggatgaggagaagatggagctgcaggagatgcagctgaaggaggccaagcacatcgccgaggacagcgacagaaaatatgaggaggtggccaggaagctggtgatcctggagggggagctggagaggtctgaggagagagctgaggtggccgagagcaaatgtggggacctggaggaggagctgaagatcgtgaccaacaacctgaagagcctggaggcccaggccgacaagtacagcaccaaggaggacaagtatgaggaggagatcaagctgctggaggagaagctgaaggaggccgagaccagggctgagtttgctgagaggtctgtggccaagctggagaagaccattgatgacctggaggagagcaccagcatcgccaccacagagcactggttcaccccagacaccctggccctgacagacacccccagcccctgcacagagcccacccacaagaccccctggcccaccctgaagcccctgtgcaccggcaccccctggctgagcctgagtgacagccccctgcacgtgggcacctgtggccccatcaagccctag

SEQ ID NO: 113624 - DNA, 855 bp, Artificial Sequence
  derived and/or modified sequence
atggacgccatcaagaagaagatgcagatgctgaagctggacaaggagaacgcaattgatcgcgccgaacaggccgaggcagacaagaagcaggccgaagataggtgtaagcaattagaagaagaacagcaagcactgcagaagaagctcaagggtacagaggatgaggtggagaaatattcagagtccgttaaggaagcccaagaaaagctggagcaggccgagaaaaaggcaacagatgcggaagcagatgtagcatcgctgaaccgccgcattcagcttgtcgaagaggagctcgatcgcgcacaggaaaggctggcaaccgcgctacagaaactggaagaagccgaaaaggccgcagacgagtcagaacgggggatgaaggtcatcgaaaatagagccatgaaagacgaggaaaagatggaactgcaagagatgcagctgaaagaagctaaacatatagcagaggactcagacaggaagtatgaggaagtggccagaaagctggttatcttggagggagagttagagcgtagtgaggaaagggccgaagtcgcagagtccaagtgcggcgacctggaggaggaactgaagattgtgaccaataacctgaagtcattagaagcacaggccgacaagtattccaccaaggaggataagtatgaggaggagatcaaactgctggaggaaaagctcaaggaggccgagactcgggccgagtttgccgaaaggagcgtcgctaaactggagaagactattgatgatttggaagagaccttagcttctgccaaagaagagaatgtcgagatccaccagacgctcgaccagaccctgctggaactgaacaacctctag

SEQ ID NO: 113625 - DNA, 969 bp, Artificial Sequence
  derived and/or modified sequence
atggacgccatcaagaagaagatgcagatgctgaagctggacaaggagaacgccatagaccgtgctgagcaggctgaggccgataaaaagcaggccgaggaccgatgcaaacaacttgaggaggaacagcaagctctccagaaaaaactcaaaggaaccgaggatgaagtggaaaaatattcagaatctgtgaaggaggcgcaggaaaagcttgagcaggcggagaaaaaagccacagacgcggaggcggacgtggcctcccttaaccggagaattcagttggtcgaagaggaattggatagggcccaggagcggctcgctacagccctgcagaaattggaggaagcagagaaagccgccgatgagtctgagagaggtatgaaggtcatcgagaatcgagctatgaaggatgaggagaagatggagctgcaggaaatgcaactgaaagaggctaagcatattgccgaagactcagaccggaaatacgaagaggtagctaggaagctggtcatcctggaaggtgagttggagcgctctgaagagcgggccgaggtggcagagagcaagtgtggagacctggaggaagagttgaagatcgttacgaacaatctgaagtccctcgaagctcaggcagataaatatagcacaaaggaagataagtacgaggaggaaatcaagctgctggaggaaaagctgaaggaagccgaaactagagccgagttcgccgagcggtccgttgccaaactggagaaaacgatcgacgacctagaggagagtacatctatagcaacaacagaacattggttcacgcccgacacgctagcattgaccgatacacccagtccatgtacagagcccacacacaaaaccccatggcccactctgaagccattgtgtaccgggacaccttggctgtccctatcggattctcctttgcacgtcggcacctgtggtccaataaagccttag

SEQ ID NO: 113626 - DNA, 855 bp, Artificial Sequence
  derived and/or modified sequence
atggatgccattaaaaaaaagatgcaaatgctgaaactggataaagaaaacgcaatcgatcgggctgagcaagccgaagcggataagaaacaggctgaagacagatgcaaacagctggaggaggagcaacaagccctgcagaagaagctgaagggtaccgaggatgaagtggaaaagtactctgaatctgttaaagaggcgcaggagaagctggagcaggccgagaagaaggcaaccgatgccgaagcggatgtggccagtctaaacagaagaatccaacttgtcgaagaagagcttgacagagcacaggaaaggctcgccactgctcttcaaaaactggaggaggcagagaaagctgcggacgagagtgagaggggtatgaaagttatcgaaaatcgtgcgatgaaggatgaagagaagatggaactccaagaaatgcagctcaaggaagctaagcatatcgctgaggatagcgaccggaagtacgaggaggtcgcgaggaagctggtcatccttgagggcgaattggaacgatctgaggaacgggctgaagtcgctgagtcaaagtgcggtgatcttgaggaggaattaaagatcgtcaccaataatttaaagagtcttgaagcccaggccgacaaatattcaacaaaagaagacaagtacgaggaagagattaagcttctggaggagaagctcaaagaggccgagacccgagccgagtttgcagaacggagcgtcgcgaagctcgagaagacaatagacgacctggaggaaacgctggcttctgctaaggaggagaatgtggaaattcatcagacgctggaccagactctcctagagctgaacaacctgtag

SEQ ID NO: 113627 - DNA, 969 bp, Artificial Sequence
  derived and/or modified sequence
atggacgctatcaaaaagaaaatgcaaatgctcaagctggacaaggagaatgctatagaccgcgctgaacaggccgaggctgataagaaacaggccgaggacagatgtaagcagctcgaagaagaacaacaagctctgcagaagaagctcaaagggactgaggacgaggtcgaaaagtacagtgagtccgtgaaagaggcccaggagaaactggaacaggctgagaaaaaagcaacggacgccgaggctgacgtcgcctcactcaatcggcgaatccagctggtagaagaggaactggatcgggcacaggaacgcctggccactgcactccagaagctagaagaggcggagaaagctgcagatgagagcgagcgcggaatgaaagtcattgagaaccgggctatgaaggacgaggagaaaatggagctccaagaaatgcagttgaaggaggctaagcacatcgccgaggattccgatagaaaatacgaggaagtcgcgagaaagctagtaattcttgagggagaactggagagatccgaggagcgagccgaagtggcggagagtaagtgcggggatctcgaggaggaactgaaaatagtgactaataacctgaagtccctggaggcccaggctgacaagtactcaaccaaggaagataagtatgaagaggaaataaaactattagaagagaaactgaaagaggcagagacccgggctgagtttgcggaaaggagcgtcgcaaaactcgaaaaaaccatagacgatttggaggaatccacttcaattgcaactactgaacattggtttacccctgatacgcttgcacttacagataccccttctccttgtactgaaccaacccacaaaaccccctggccaaccttaaaacctctgtgcacagggactccttggctcagtctctccgatagccccttgcacgtgggtacgtgtggcccaattaagccatag

SEQ ID NO: 113628 - DNA, 1018 bp, Artificial Sequence
  derived and/or modified sequence
tcctcctcgcctgccaccggtgcacccagtccgctcacccagcccagtccgtccggtcctcaccgcctgccggccggcccaccccccaccgcagccatggacgccatcaagaagaagatgcagatgctgaagctggacaaggagaacgccatcgaccgcgccgagcaggccgaagccgacaagaagcaagctgaggaccgctgcaagcagctggaggaggagcagcaggccctccagaagaagctgaaggggacagaggatgaggtggaaaagtattctgaatccgtgaaggaggcccaggagaaactggagcaggccgagaagaaggccactgatgctgaggcagatgtggcctccctgaaccgccgcattcagctggttgaggaggagctggaccgggcccaggagcgcctggctacagccctgcagaagctggaggaggccgagaaggcggctgatgagagcgagagaggaatgaaggtcatcgaaaaccgggccatgaaggatgaggagaagatggaactgcaggagatgcagctgaaggaggccaagcacatcgctgaggattcagaccgcaaatatgaagaggtggccaggaagctggtgatcctggaaggagagctggagcgctcggaggagagggctgaggtggccgagagtaaatgtggggacctagaggaggagctgaaaattgttaccaacaacttgaaatccctggaggcccaggcggacaagtattccaccaaagaagataaatatgaagaggagatcaaactgttggaggagaagctgaaggaggctgagacccgagcagagtttgccgagaggtctgtggcaaagttggagaaaaccatcgatgacctagaagagaccttggccagtgccaaggaggagaacgtcgagattcaccagaccttggaccagaccctgctggaactcaacaacctgtgagggccagccccacccccagccaggctatggttgccaccccaacccaataaaactgatgttactagcc

SEQ ID NO: 113629 - DNA, 1771 bp, Artificial Sequence
  derived and/or modified sequence
ctgccaccggtgcacccagtccgctcacccagcccagtccgtccggtcctcaccgcctgccggccggcccaccccccaccgcagccatggacgccatcaagaagaagatgcagatgctgaagctggacaaggagaacgccatcgaccgcgccgagcaggccgaagccgacaagaagcaagctgaggaccgctgcaagcagctggaggaggagcagcaggccctccagaagaagctgaaggggacagaggatgaggtggaaaagtattctgaatccgtgaaggaggcccaggagaaactggagcaggccgagaagaaggccactgatgctgaggcagatgtggcctccctgaaccgccgcattcagctggttgaggaggagctggaccgggcccaggagcgcctggctacagccctgcagaagctggaggaggccgagaaggcggctgatgagagcgagagaggaatgaaggtcatcgaaaaccgggccatgaaggatgaggagaagatggaactgcaggagatgcagctgaaggaggccaagcacatcgctgaggattcagaccgcaaatatgaagaggtggccaggaagctggtgatcctggaaggagagctggagcgctcggaggagagggctgaggtggccgagagtaaatgtggggacctagaggaggagctgaaaattgttaccaacaacttgaaatccctggaggcccaggcggacaagtattccaccaaagaagataaatatgaagaggagatcaaactgttggaggagaagctgaaggaggctgagacccgagcagagtttgccgagaggtctgtggcaaagttggagaaaaccatcgatgacctagaagagagcacctctatcgccaccacggagcactggttcactcctgacaccctggcacttactgacacccccagcccctgcactgagcccacccacaaaacaccatggcccacgctgaaacccctctgcacaggcactccctggctgtcgctctctgattcaccactgcatgtgggcacgtgtggccccatcaaaccatgaccgcctctggtgccaatccctgacctcagagcacttagctggggttccaggatcaaacagagtgactggaaaggaagtagggtggtgaggtgcaggacaggggcaagaaggttgcaaaaggtctggaatggagcttggaaaaatgttggatatcagcaacatggggctttcactgcagcagcaggtctgttttctacctcaagtctgtctgtctggcccttcctttcctggcgcagtctttgtcttaccttctgtctccaacttccttaaaccttctaaagaagaggataaagtagtttatgactcagccctccccaccccacctctatgaccccaaggccttgagtgaggcatccacgtccgtcctgttcccctcatcctagtcagtccatctgtttgtccctgccaaggggccctgaggtccgtgaatgcatgtgtcttccttgacccactccatgtctatatgtcaccttcccctggccctgcctccccacgtctcccccttgtgtctcccttctccctcacctgctgcttcccctcacagagaccttggccagtgccaaggaggagaacgtcgagattcaccagaccttggaccagaccctgctggaactcaacaacctgtgagggccagccccacccccagccaggctatggttgccaccccaacccaataaaactgatgttactagcctctcaaggccctttaatccttt

SEQ ID NO: 113630 - protein, 153 aa, Artificial Sequence
  derived and/or modified sequence
MAKGDPKKPKGKMSAYAFFVQTCREEHKKKNPEVPVNFAEFSKKCSERWKTMSGKEKSKFDEMAKADKVRYDREMKDYGPAKGGKKKKDPNAPKRPPSGFFLFCSEFRPKIKSTNPGISIGDVAKKLGEMWNNLNDSEKQPYITKAAKLKEKY

SEQ ID NO: 113631 - DNA, 603 bp, Artificial Sequence
  derived and/or modified sequence
atggccaagggcgaccccaagaagcccaagggcaagatgagcgcctacgccttcttcgtgcagacctgcagagaggagcacaagaagaagaaccccgaggtgcccgtgaacttcgccgagttcagcaagaagtgcagcgagagatggaagaccatgagcggcaaggagaagagcaagttcgacgagatggccaaggccgacaaggtgagatacgacagagagatgaaggactacggccccgccaagggcggcaagaagaagaaggaccccaacgcccccaagagaccccccagcggcttcttcctgttctgcagcgagttcagacccaagatcaagagcaccaaccccggcatcagcatcggcgacgtggccaagaagctgggcgagatgtggaacaacctgaacgacagcgagaagcagccctacatcaccaaggccgccaagctgaaggagaagtacgagaaggacgtggccgactacaagagcaagggcaagttcgacggcgccaagggccccgccaaggtggccagaaagaaggtggaggaggaggacgaggaggaggaggaggaggaggaggaggaggaggaggaggaggacgagtag

SEQ ID NO: 113632 - DNA, 603 bp, Artificial Sequence
  derived and/or modified sequence
atggctaagggagacccgaagaagcctaaggggaagatgtccgcgtatgccttctttgtgcaaacatgtagggaggagcacaagaaaaaaaacccagaggtgcctgttaatttcgcagagtttagcaagaagtgtagcgaaagatggaaaactatgagcggaaaggagaagtctaagttcgatgagatggccaaagccgacaaagttcgctacgatcgcgaaatgaaagactacggccctgctaagggggggaaaaagaagaaggaccctaacgccccaaaacgacctccttctggctttttcctgttctgttccgagtttcgccccaagataaagtccacaaatccaggcatcagtatcggggatgtggcgaaaaagctgggggagatgtggaacaatttgaatgatagcgaaaagcaaccctacatcaccaaggccgccaagttgaaggaaaagtacgagaaggacgtcgccgattataaatctaaaggcaagttcgacggcgctaagggacccgctaaggtggcacgaaagaaggtcgaagaggaggatgaggaagaagaggaagaggaggaggaggaggaggaagaggaggacgagtag

SEQ ID NO: 113633 - DNA, 603 bp, Artificial Sequence
  derived and/or modified sequence
atggccaagggggaccccaagaagcccaagggcaagatgtctgcctatgccttctttgtgcagacctgccgggaggagcacaagaagaagaaccctgaggtgcctgtgaactttgctgagttcagcaagaagtgcagcgagcgctggaagaccatgtctgggaaggagaagagcaagtttgatgagatggccaaggctgacaaggtgcgctatgaccgggagatgaaggactatggccctgccaagggcggcaagaagaagaaggaccccaatgcccccaagaggcctcccagcggcttcttcctgttctgcagcgagttccggcccaagatcaagagcaccaaccctggcatcagcattggagatgtggccaagaagctgggggagatgtggaacaacctgaatgattctgagaagcagccctacatcaccaaggccgccaagctgaaggagaagtatgagaaggatgtggccgactacaagagcaagggcaagtttgatggagccaagggccctgccaaggtggccaggaagaaggtggaggaggaggatgaggaggaggaggaggaggaggaggaggaggaggaggaggaggatgaatag

SEQ ID NO: 113634 - DNA, 603 bp, Artificial Sequence
  derived and/or modified sequence
atggccaagggcgaccccaagaagcccaagggcaagatgagcgcctacgccttctttgtccaaacttgtagggaggagcataaaaaaaagaatcctgaggtgcccgttaatttcgcagaatttagcaagaaatgcagcgaaaggtggaaaaccatgtctgggaaagagaaatcaaaattcgatgaaatggctaaggcggataaggtaagatacgatagggagatgaaagattatgggcctgctaagggcggaaagaagaaaaaggaccctaatgccccaaaacgcccgccatctggcttctttctgttctgctctgaatttcgtccaaaaatcaagagtactaatcccggcatcagcatcggtgacgtggctaaaaagttgggggagatgtggaacaacttgaatgacagtgagaagcagccttatattactaaggctgcaaaacttaaagagaagtacgagaaggacgtggcagattacaagtcgaaagggaaattcgatggggccaaagggcccgccaaagttgctcgcaagaaggtggaggaagaggacgaggaagaggaagaagaggaggaggaggaagaagaggaagaggatgagtag

SEQ ID NO: 113635 - DNA, 603 bp, Artificial Sequence
  derived and/or modified sequence
atggccaagggcgatccaaaaaagccaaagggaaagatgtccgcctatgcttttttcgtgcaaacatgccgcgaggagcacaagaagaaaaaccctgaggtccccgtgaacttcgcagaattctctaagaagtgtagcgaacgttggaaaaccatgtcaggaaaggaaaagagtaagtttgacgagatggctaaggccgacaaagttaggtatgatcgtgaaatgaaagattacggtccagccaaaggcggaaaaaagaaaaaggatcctaacgcccctaaacgccctccatcgggctttttcctgttttgctccgagtttcggcctaagatcaagagcactaatccaggcataagcataggcgacgtcgcgaagaagctgggagagatgtggaacaacctgaatgactcagaaaaacaaccctacatcacaaaggccgcaaaattaaaagagaagtatgagaaggacgttgccgactacaaaagtaaagggaagttcgacggagctaaggggcctgctaaggtcgctagaaaaaaagtcgaggaggaagatgaggaagaagaggaagaggaagaagaagaagaggaggaagaggacgagtag

SEQ ID NO: 113636 - DNA, 603 bp, Artificial Sequence
  derived and/or modified sequence
atggccaaaggggaccccaaaaaacctaagggcaaaatgtcagcctatgcattctttgttcagacctgtcgggaggaacataaaaaaaaaaaccctgaggtgccagttaattttgccgagtttagtaagaagtgcagcgaacgatggaagacaatgtcgggaaaggagaagtcgaaattcgatgaaatggctaaagctgataaagtgcgctatgaccgggaaatgaaggactatggcccagcaaagggtggtaaaaagaaaaaggatcctaatgctcctaaaagacctccatcaggattcttcctattttgtagcgaatttagacccaaaattaaaagcacaaatcccggtatctcgatcggcgatgtcgcaaaaaagctgggcgaaatgtggaataatctcaatgatagcgagaaacagccatacataaccaaagcagcaaaacttaaggaaaagtatgaaaaagatgttgcagactacaagagcaagggaaagttcgacggggccaagggacccgccaaggtagcacgaaagaaggtggaagaggaggacgaagaagaagaggaggaagaggaggaggaggaggaggaggaagatgagtag

SEQ ID NO: 113637 - DNA, 567 bp, Artificial Sequence
  derived and/or modified sequence
atggccaaaggagacccaaaaaagcccaaaggcaagatgtccgcgtacgcgttcttcgtacaaacctgcagagaggaacacaaaaaaaagaaccctgaggtgccagtgaacttcgctgaattctctaaaaagtgctccgaaagatggaagactatgagtggcaaggaaaagtcaaaattcgacgagatggccaaggccgataaagtccgctacgatagagaaatgaaagattacggccccgcaaagggagggaagaaaaagaaggacccgaacgcccctaaacggccaccctctggattctttctcttttgctccgagtttagaccgaaaattaagagcaccaatcctggaatctccatcggcgatgtggcgaaaaagctgggagagatgtggaacaacttaaacgattcagaaaaacagccctatattaccaaggccgcaaagcttaaggagaagtacgagaaggatgtcgctgactataaatccaaaggtaaatttgatggggcaaaggggcccgccaaggtagctcggaaaaaggtggaggaggaggatgaggaagaggaatag

SEQ ID NO: 113638 - DNA, 462 bp, Artificial Sequence
  derived and/or modified sequence
atggccaagggagatccgaagaagcctaagggaaagatgtctgcctacgccttctttgttcagacatgtcgagaagaacataagaagaaaaacccagaagtcccagtgaactttgcggagtttagcaagaagtgctcggagcgctggaaaaccatgtccggcaaggagaagtccaaatttgatgaaatggctaaggcagacaaggttcgatacgacagggagatgaaagactacggccctgctaaaggcggtaagaaaaagaaagatcccaatgcacccaagcgccctccttccggatttttcctgttttgttctgaattccggccgaaaattaaatccaccaacccaggtattagcattggcgatgtagccaagaaactgggtgagatgtggaataacctaaacgactccgagaaacagccctacatcactaaggcggcaaagctgaaggaaaagtactag

SEQ ID NO: 113639 - DNA, 603 bp, Artificial Sequence
  derived and/or modified sequence
atggcaaagggagatccgaaaaagcccaaaggaaaaatgtcagcttatgcattttttgttcaaacgtgccgggaagaacacaagaagaaaaaccccgaagtcccagtgaactttgcagaatttagcaagaagtgtagcgagcggtggaagacgatgtccgggaaagagaagtcaaaattcgatgagatggccaaagctgataaggtgaggtacgacagggagatgaaagactacggaccagccaagggagggaagaagaaaaaggaccccaatgcacctaaaaggcccccttccggattttttctattctgtagcgaatttagaccaaagataaaaagcaccaaccccgggatttctatcggggatgtggcaaagaaacttggcgagatgtggaacaacctgaacgactccgagaagcagccgtatatcacaaaggcggctaagctgaaggaaaaatatgaaaaagatgtggccgactacaaaagcaagggcaagttcgatggggccaaggggcccgcaaaggtggctagaaagaaggttgaagaggaggatgaggaggaagaagaggaagaggaggaagaggaagaggaggaagatgaatag

SEQ ID NO: 113640 - DNA, 582 bp, Artificial Sequence
  derived and/or modified sequence
atggccaaaggagacccaaagaaacccaaggggaagatgtcagcttacgccttcttcgtccagacttgtcgagaggaacacaagaagaaaaaccccgaggtcccggttaactttgcagaattcagcaagaagtgctctgaaaggtggaagacaatgtccgggaaggagaagtccaagttcgacgagatggcgaaagctgacaaagtgcgatacgaccgtgaaatgaaggattacggtccagccaaaggcggcaagaagaagaaagaccctaacgccccaaaaaggcctccctccgggtttttcctcttctgttctgaattccggcccaaaatcaagtccaccaatcccgggatctcaatcggcgatgtggccaaaaaactgggggagatgtggaacaatctgaatgattcagaaaaacagccctacataactaaggcagcaaaactgaaagagaaatatgaaaaggacgttgctgattacaaatccaaaggaaagtttgacggcgccaaggggcccgccaaagtcgcaaggaaaaaagttgaggaggaagatgaggaggaagaggaagaagaggaggagtag

SEQ ID NO: 113641 - DNA, 567 bp, Artificial Sequence
  derived and/or modified sequence
atggccaagggggaccccaagaagcccaagggcaagatgtctgcctatgccttctttgtgcagacctgccgggaggagcacaagaagaagaaccctgaggtgcctgtgaactttgctgagttcagcaagaagtgcagcgagcgctggaagaccatgtctgggaaggagaagagcaagtttgatgagatggccaaggctgacaaggtgcgctatgaccgggagatgaaggactatggccctgccaagggcggcaagaagaagaaggaccccaatgcccccaagaggcctcccagcggcttcttcctgttctgcagcgagttccggcccaagatcaagagcaccaaccctggcatcagcattggagatgtggccaagaagctgggggagatgtggaacaacctgaatgattctgagaagcagccctacatcaccaaggccgccaagctgaaggagaagtatgagaaggatgtggccgactacaagagcaagggcaagtttgatggagccaagggccctgccaaggtggccaggaagaaggtggaggaggaggatgaggaggaggagtag

SEQ ID NO: 113642 - DNA, 462 bp, Artificial Sequence
  derived and/or modified sequence
atggccaagggggaccccaagaagcccaagggcaagatgtctgcctatgccttctttgtgcagacctgccgggaggagcacaagaagaagaaccctgaggtgcctgtgaactttgctgagttcagcaagaagtgcagcgagcgctggaagaccatgtctgggaaggagaagagcaagtttgatgagatggccaaggctgacaaggtgcgctatgaccgggagatgaaggactatggccctgccaagggcggcaagaagaagaaggaccccaatgcccccaagaggcctcccagcggcttcttcctgttctgcagcgagttccggcccaagatcaagagcaccaaccctggcatcagcattggagatgtggccaagaagctgggggagatgtggaacaacctgaatgattctgagaagcagccctacatcaccaaggccgccaagctgaaggagaagtactag

SEQ ID NO: 113643 - DNA, 582 bp, Artificial Sequence
  derived and/or modified sequence
atggccaagggggaccccaagaagcccaagggcaagatgtctgcctatgccttctttgtgcagacctgccgggaggagcacaagaagaagaaccctgaggtgcctgtgaactttgctgagttcagcaagaagtgcagcgagcgctggaagaccatgtctgggaaggagaagagcaagtttgatgagatggccaaggctgacaaggtgcgctatgaccgggagatgaaggactatggccctgccaagggcggcaagaagaagaaggaccccaatgcccccaagaggcctcccagcggcttcttcctgttctgcagcgagttccggcccaagatcaagagcaccaaccctggcatcagcattggagatgtggccaagaagctgggggagatgtggaacaacctgaatgattctgagaagcagccctacatcaccaaggccgccaagctgaaggagaagtatgagaaggatgtggccgactacaagagcaagggcaagtttgatggagccaagggccctgccaaggtggccaggaagaaggtggaggaggaggatgaggaggaggaggaggaggaggaggagtag

SEQ ID NO: 113644 - DNA, 603 bp, Artificial Sequence
  derived and/or modified sequence
atggccaagggcgaccccaagaagcccaagggcaagatgagcgcctacgccttcttcgtgcagacctgcagagaggagcataagaagaaaaaccctgaagtccccgtaaatttcgccgaattttctaagaagtgttccgagcggtggaagactatgagcggtaaggagaagtcaaaattcgatgaaatggctaaggcagataaggtgcgttacgaccgagaaatgaaggattatgggccagccaaaggtggcaagaagaagaaggacccaaacgccccaaagcgtccccctagtgggtttttcctgttctgctcagaatttcgcccaaagattaagtccacaaatcctggcatcagtattggggacgtggcaaagaaactcggagagatgtggaacaacctcaacgatagtgagaagcaaccgtatatcacaaaggctgctaagctgaaggagaaatatgaaaaggatgtcgctgactataagtcaaagggcaagtttgatggcgcgaaaggacccgccaaagtggcccggaagaaggtcgaggaagaggacgaagaagaagaagaagaagaggaagaagaggaggaggaagaggacgagtag

SEQ ID NO: 113645 - DNA, 567 bp, Artificial Sequence
  derived and/or modified sequence
atggccaagggcgaccccaagaagcccaagggcaagatgagcgcctacgccttctttgtccagacatgtagggaggagcacaagaagaagaatccggaggttcctgttaattttgcagagttcagcaaaaagtgttccgagcgctggaagaccatgtctgggaaagagaagtcaaaattcgatgaaatggcgaaggccgacaaggtacgatatgaccgagaaatgaaggactatggcccagctaaggggggcaagaaaaaaaaggatccaaacgctcctaagcggcctccctcaggctttttcctcttttgctcagaatttcgaccaaaaatcaaaagcactaaccctggaattagcatcggggacgtggccaaaaagttgggcgagatgtggaataacctgaacgatagtgagaagcagccatacattacaaaagccgctaagctgaaagaaaaatacgaaaaggacgtcgcagattacaagtccaaaggcaagttcgacggggcaaaaggcccagccaaagtagcacgcaagaaagtggaagaggaggatgaagaggaagaatag

SEQ ID NO: 113646 - DNA, 462 bp, Artificial Sequence
  derived and/or modified sequence
atggccaagggcgaccccaagaagcccaagggcaagatgagcgcctatgctttcttcgtccaaacttgccgggaagagcacaagaaaaagaatcccgaagtccccgtgaatttcgcagagttctccaaaaaatgttcagaaaggtggaaaaccatgagtgggaaggaaaaatctaaatttgatgagatggcgaaagcagataaagtacggtacgatagggagatgaaagattatgggcccgcaaaagggggcaaaaagaagaaagacccaaatgccccgaagaggcccccctccgggttttttctgttttgttcagaatttaggcccaagataaaatccacaaatcccggcatcagtatcggtgacgtggcaaagaaattgggagaaatgtggaacaacctgaatgactctgaaaagcagccatacatcaccaaggccgccaagctcaaagaaaagtattag

SEQ ID NO: 113647 - DNA, 603 bp, Artificial Sequence
  derived and/or modified sequence
atggccaagggcgaccccaagaagcccaagggcaagatgagcgcctatgcctttttcgtacaaacgtgtcgcgaggagcataaaaagaagaaccccgaggtgcctgttaattttgcagaatttagtaagaaatgttccgagaggtggaagacaatgtctgggaaggaaaaatccaaattcgacgagatggccaaggccgataaggtccgatacgaccgcgaaatgaaggattatggtcccgccaagggggggaaaaaaaaaaaggaccctaacgctcccaagagacctcccagcggcttcttcctcttttgtagcgaattccggcccaagattaagtctacaaatcccggaatcagcataggggacgtggctaaaaaactgggtgagatgtggaataacctgaacgattctgagaagcagccctacatcacaaaggcagcaaaactaaaagagaaatacgaaaaggatgtggctgactacaaaagcaaagggaaattcgacggcgctaaaggtccagcgaaagtcgcccggaaaaaggtcgaagaagaggacgaggaagaggaggaggaagaggaggaggaggaggaggaggaagatgagtag

SEQ ID NO: 113648 - DNA, 582 bp, Artificial Sequence
  derived and/or modified sequence
atggccaagggcgaccccaagaagcccaagggcaagatgagcgcctacgccttttttgtacagacgtgtcgcgaggagcataaaaaaaagaatcccgaggtaccagtgaacttcgcagagttctccaaaaaatgcagcgaacggtggaagaccatgagtggaaaggagaaaagtaagtttgacgagatggcgaaagccgataaggtaaggtacgatcgtgaaatgaaggactacggccctgccaaaggaggtaagaagaagaaggaccctaatgctcccaagcggccacccagcgggttctttctcttctgcagtgagtttaggcccaagattaaatccaccaatcctggcatcagtattggcgacgtagccaaaaaactcggagaaatgtggaacaatctgaatgattctgaaaaacagccctatatcactaaagctgccaagcttaaagagaagtatgagaaagacgtcgccgactacaaaagcaaggggaagtttgacggagcaaaagggcctgcaaaagttgctagaaaaaaggtcgaagaagaggatgaggaggaggaagaggaggaggaggagtag

SEQ ID NO: 113649 - DNA, 603 bp, Artificial Sequence
  derived and/or modified sequence
atggctaaaggcgatccgaagaaaccaaagggtaaaatgagtgcctatgcattctttgttcagacgtgcagggaagaacacaagaagaaaaaccccgaagtaccggtaaattttgccgagttcagcaagaagtgttccgaaagatggaagactatgagcggcaaggaaaagagtaagtttgatgagatggctaaagcagacaaagtgcgctacgatagggaaatgaaagattatggcccagccaagggtggtaagaaaaaaaaagatccaaatgcaccaaagaggcccccttctggttttttccttttttgctcagaatttaggcctaaaattaaaagtacgaaccccggaatttcaataggcgacgttgcaaaaaagctcggtgaaatgtggaacaatctgaatgattccgaaaagcaaccctacataaccaaagccgcaaaactcaaggaaaagtacgaaaaggatgttgcagactataagtccaagggcaagtttgacggcgctaaaggaccagccaaggtggcccgaaaaaaagtggaagaggaggacgaggaggaagaggaagaggaggaggaggaggaggaggaggaggacgaatag

SEQ ID NO: 113650 - DNA, 567 bp, Artificial Sequence
  derived and/or modified sequence
atggcaaagggtgaccccaaaaagccaaaagggaagatgtcagcctatgccttctttgtgcagacctgcagagaggagcataagaagaaaaacccggaagtccccgtgaacttcgctgaatttagtaagaagtgttcggaacggtggaaaaccatgtcggggaaagaaaagtctaaattcgatgagatggcaaaggccgacaaagttcgttatgatagggagatgaaagattacggcccagctaaaggcggaaaaaagaaaaaggatccgaacgctcctaagcgcccaccttctggtttttttctgttttgcagcgagtttcgaccaaagatcaaatcaaccaacccaggaatctccatcggcgatgtggccaaaaaactcggtgagatgtggaacaatctgaatgattctgagaagcagccttacatcacgaaagccgcaaaactgaaggagaagtacgaaaaagacgttgctgattataaaagtaagggcaagtttgacggggctaaaggaccagccaaggtggcccgaaaaaaagtcgaggaagaggatgaggaggaggaatag

SEQ ID NO: 113651 - DNA, 462 bp, Artificial Sequence
  derived and/or modified sequence
atggcgaagggcgaccctaagaaacccaaaggcaaaatgtctgcgtacgcatttttcgtgcagacctgccgtgaggaacataaaaagaagaaccccgaagtccccgtgaacttcgcagaattttccaaaaagtgttctgaacggtggaagaccatgtccggcaaggaaaagagcaaattcgatgagatggccaaagctgacaaggtgcgctacgatagagaaatgaaggattacggcccagcaaaaggcggaaagaaaaagaaagacccaaatgcccctaaaagaccacccagcgggttctttctcttttgctctgagtttagacccaagataaagagcaccaacccaggcatctccattggcgatgtcgcaaagaaactcggggagatgtggaataaccttaacgattcagagaagcagccatatattacaaaagcagccaagctgaaggagaagtactag

SEQ ID NO: 113652 - DNA, 603 bp, Artificial Sequence
  derived and/or modified sequence
atggcaaaaggtgacccaaagaagcccaaggggaaaatgtccgcatatgcattcttcgttcaaacctgtcgggaggagcacaaaaaaaaaaatcctgaggtgcctgtgaattttgctgaattttcgaaaaaatgcagtgagcgctggaaaaccatgtcaggtaaggaaaagagcaaattcgacgagatggccaaggccgacaaagtgcgctatgacagagagatgaaagactacggccctgccaaggggggtaaaaaaaaaaaggatccaaacgcccctaagcggcctccctctgggttttttctgttttgctctgagttccgacctaagatcaagtccacgaacccaggcatctcaattggcgacgtcgccaaaaaactgggggaaatgtggaataatttgaatgattccgaaaagcagccttacatcacaaaggccgctaaactcaaagagaagtatgagaaggacgtcgctgactataagtctaagggtaagttcgatggggcaaaaggtcccgctaaagtggccagaaaaaaggtcgaggaagaagacgaggaggaggaagaagaggaagaggaggaagaggaagaggaagatgagtag

SEQ ID NO: 113653 - DNA, 582 bp, Artificial Sequence
  derived and/or modified sequence
atggccaagggcgaccccaagaagcccaaaggcaaaatgtctgcgtacgccttttttgtccagacctgccgtgaggagcataagaagaaaaaccccgaggtgccagttaacttcgccgaattttccaagaaatgttccgagcggtggaaaacaatgtcgggcaaagagaagagcaagttcgatgagatggccaaggcggataaggtgcgatacgacagggagatgaaggattacggtcccgcaaagggtggcaagaagaagaaggatcccaatgctccgaaacggcctccctcgggattttttcttttctgctccgagttccgccctaaaatcaagtctaccaaccccggtatatcaatcggcgatgtcgctaaaaagctgggtgagatgtggaataatctgaacgatagtgagaaacaaccttacattactaaggctgcaaagctcaaggagaagtacgagaaggatgtggccgactacaagtcaaaggggaagtttgacggggcaaagggccctgcaaaggtggcaaggaagaaggtggaagaggaggatgaagaagaggaggaagaggaggaggaatag

SEQ ID NO: 113654 - DNA, 567 bp, Artificial Sequence
  derived and/or modified sequence
atggccaagggcgaccccaagaagcccaagggcaagatgagcgcctacgccttcttcgtgcagacctgcagagaggagcacaagaagaagaaccccgaggtgcccgtgaacttcgccgagttcagcaagaagtgcagcgagagatggaagaccatgagcggcaaggagaagagcaagttcgacgagatggccaaggccgacaaggtgagatacgacagagagatgaaggactacggccccgccaagggcggcaagaagaagaaggaccccaacgcccccaagagaccccccagcggcttcttcctgttctgcagcgagttcagacccaagatcaagagcaccaaccccggcatcagcatcggcgacgtggccaagaagctgggcgagatgtggaacaacctgaacgacagcgagaagcagccctacatcaccaaggccgccaagctgaaggagaagtacgagaaggacgtggccgactacaagagcaagggcaagttcgacggcgccaagggccccgccaaggtggccagaaagaaggtggaggaggaggacgaggaggaggagtag

SEQ ID NO: 113655 - DNA, 462 bp, Artificial Sequence
  derived and/or modified sequence
atggccaagggcgaccccaagaagcccaagggcaagatgagcgcctacgccttcttcgtgcagacctgcagagaggagcacaagaagaagaaccccgaggtgcccgtgaacttcgccgagttcagcaagaagtgcagcgagagatggaagaccatgagcggcaaggagaagagcaagttcgacgagatggccaaggccgacaaggtgagatacgacagagagatgaaggactacggccccgccaagggcggcaagaagaagaaggaccccaacgcccccaagagaccccccagcggcttcttcctgttctgcagcgagttcagacccaagatcaagagcaccaaccccggcatcagcatcggcgacgtggccaagaagctgggcgagatgtggaacaacctgaacgacagcgagaagcagccctacatcaccaaggccgccaagctgaaggagaagtactag

SEQ ID NO: 113656 - DNA, 582 bp, Artificial Sequence
  derived and/or modified sequence
atggccaagggcgaccccaagaagcccaagggcaagatgagcgcctacgccttcttcgtgcagacctgcagagaggagcacaagaagaagaaccccgaggtgcccgtgaacttcgccgagttcagcaagaagtgcagcgagagatggaagaccatgagcggcaaggagaagagcaagttcgacgagatggccaaggccgacaaggtgagatacgacagagagatgaaggactacggccccgccaagggcggcaagaagaagaaggaccccaacgcccccaagagaccccccagcggcttcttcctgttctgcagcgagttcagacccaagatcaagagcaccaaccccggcatcagcatcggcgacgtggccaagaagctgggcgagatgtggaacaacctgaacgacagcgagaagcagccctacatcaccaaggccgccaagctgaaggagaagtacgagaaggacgtggccgactacaagagcaagggcaagttcgacggcgccaagggccccgccaaggtggccagaaagaaggtggaggaggaggacgaggaggaggaggaggaggaggaggagtag

SEQ ID NO: 113657 - protein, 200 aa, Artificial Sequence
  derived and/or modified sequence
MAKGDPKKPKGKMSAYAFFVQTCREEHKKKNPEVPVNFAEFSKKCSERWKTMSGKEKSKFDEMAKADKVRYDREMKDYGPAKGGKKKKDPNAPKRPPSGFFLFCSEFRPKIKSTNPGISIGDVAKKLGEMWNNLNDSEKQPYITKAAKLKEKYEKDVADYKSKGKFDGAKGPAKVARKKVEEEDEEEEEEEEEEEEEEDE

SEQ ID NO: 113658 - protein, 188 aa, Artificial Sequence
  derived and/or modified sequence
MAKGDPKKPKGKMSAYAFFVQTCREEHKKKNPEVPVNFAEFSKKCSERWKTMSGKEKSKFDEMAKADKVRYDREMKDYGPAKGGKKKKDPNAPKRPPSGFFLFCSEFRPKIKSTNPGISIGDVAKKLGEMWNNLNDSEKQPYITKAAKLKEKYEKDVADYKSKGKFDGAKGPAKVARKKVEEEDEEEE

SEQ ID NO: 113659 - protein, 193 aa, Artificial Sequence
  derived and/or modified sequence
MAKGDPKKPKGKMSAYAFFVQTCREEHKKKNPEVPVNFAEFSKKCSERWKTMSGKEKSKFDEMAKADKVRYDREMKDYGPAKGGKKKKDPNAPKRPPSGFFLFCSEFRPKIKSTNPGISIGDVAKKLGEMWNNLNDSEKQPYITKAAKLKEKYEKDVADYKSKGKFDGAKGPAKVARKKVEEEDEEEEEEEEE

SEQ ID NO: 113660 - DNA, 3556 bp, Artificial Sequence
  derived and/or modified sequence
ggctctcgtggaggcagctagcgcgaggctggggagcgctgagccgcgcgtcgtgccctgcgctgcccagactagcgaacaatacagtcaggatggctaaaggtgaccccaagaaaccaaagggcaagatgtccgcttatgccttctttgtgcagacatgcagagaagaacataagaagaaaaacccagaggtccctgtcaattttgcggaattttccaagaagtgctctgagaggtggaagacgatgtccgggaaagagaaatctaaatttgatgaaatggcaaaggcagataaagtgcgctatgatcgggaaatgaaggattatggaccagctaagggaggcaagaagaagaaggatcctaatgctcccaaaaggccaccgtctggattcttcctgttctgttcagaattccgccccaagatcaaatccacaaaccccggcatctctattggagacgtggcaaaaaagctgggtgagatgtggaataatttaaatgacagtgaaaagcagccttacatcactaaggcggcaaagctgaaggagaagtatgagaaggatgttgctgactataagtcgaaaggaaagtttgatggtgcaaagggtcctgctaaagttgcccggaaaaaggtggaagaggaagatgaagaagaggaggaggaagaagaggaggaggaggaggaggaggatgaataaagaaactgtttatctgtctccttgtgaatacttagagtaggggagcgccgtaattgacacatctcttatttgagaagtgtctgttgccctcattaggtttaattacaaaatttgatcacgatcatattgtagtctctcaaagtgctctagaaattgtcagtggtttacatgaagtggccatgggtgtctggagcaccctgaaactgtatcaaagttgtacatatttccaaacatttttaaaatgaaaaggcactctcgtgttctcctcactctgtgcactttgctgttggtgtgacaaggcatttaaagatgtttctggcattttctttttatttgtaaggtggtggtaactatggttattggctagaaatcctgagttttcaactgtatatatctatagtttgtaaaaagaacaaaacaaccgagacaaacccttgatgctccttgctcggcgttgaggctgtggggaagatgccttttgggagaggctgtagctcagggcgtgcactgtgaggctggacctgttgactctgcagggggcatccatttagcttcaggttgtcttgtttctgtatatagtgacatagcattctgctgccatcttagctgtggacaaaggggggtcagctggcatgagaatattttttttttttaagtgcggtagtttttaaactgtttgtttttaaacaaactatagaactcttcattgtcagcaaagcaaagagtcactgcatcaatgaaagttcaagaacctcctgtacttaaacacgattcgcaacgttctgttattttttttgtatgtttagaatgctgaaatgtttttgaagttaaataaacagtattacatttttaaaactcttctctattataacagtcaatttctgactcacagcagtgaacaaacccccactccattgtatttggagactggcctccctataaatgtggtagcttcttttattactcagtggccagctcacttagggctgagatgaaggagagggctacttgaagctactgtgtgattttgtttgtgtctgagtggcattcagatgaagtctggaggagttaggagaacgacataggcaaggttcagcagccttccaaggtataggaaggtgggtgattaggactgaggctatctaggtttaacttttgtcccacctccaccccctattttgtggggccaaatgcattgctaaacagcaatttcagagtgtatggtgtgtcaaaaattaaggccttattgtttttctctttcacccctaccccccgtgctcctggcacatatcacattatttgtggtgcccaacatttggggtcttgagcctgctgctggtctcctggatgccagtgagggtatgtgggatggggtggtggggtaggggacggtatcctttttttgctcctacttggaaacaccaaacaccccaaggaagatgataggctccatcttgggccacctgagctatagggcaggctaatggaatcaaccatttctgagcactaaatgtatcatgaaaagttgaatggcctgctcataagtttagctcattcactggaaatgtagattgatgttcaatgttaaactggaaggagcttggtttgtgtgtcagtggttatattagtgggtagtgtaacattttatccaggttggggtgaggggagatggccacagtagcaagtggtgacactaaataccattttgaaggctgatgtgtatatacatcattactgtccgtagcaatgaaggatacagtactgtgttgtgggtgagtgttgctattgcccagcattaatatttgggtgtgtatgtttgaggctatgaaacacgcaggagtgtttttgtgctattaattttaagagaaagcagctttttcttaaaattcactgttgagaaacttgcatgtctggaggcggtgtcctctccgccctgtcgggtcctggatgagtacgagttatggtcacggtcacagcctgatctcttatgtgttcatagccattcgctctcccatcagaactgtttgtcctgaatgtgttcctctagttctagaaaatgaccactaatttaaaaaactcggttgtgaggtttgcccagaggcacttgttccagaatttcccctcctgcttcagccatgtccttgtcacttggcattctaagctaaagctttagcttcccaattcgtgatgtgctaggccaagattcgggagctgttgccagcctcgtcaaatatggaagagaaacaacctgcggtcaaaagggagtgatttgttaagtggtgcgcgtctatctcataactagatgtaccaaccagggaagggccaaggatggaaaggggtaacttttgtgcttccaaagtagctaagcagaagtgggggagcagtttagccagatgatctttgattaggcaaacattgagttttaaagaggctgtcaagttgaggccacttggtccattagctggggcagcaagatcactactcaacgttttcacactgtggcaagattgctcttctagtggaataatgccctagtttctctgagatgatgtaagtggcatgatgttacctaaggcttaggcttagcttgatttctgggcccactgtctgtgttcttaagatgccaacctgttgctttttttttttttttcccccatttaaaaggatagtacctactccctctaaccacctcaccccattcttgaatgacattttatccttcggaaagaacaaggctgtgatgtagtgactattgtctgtgtctcctgtgtgtgtctgttcttgtcacaaatgtatttggggacgttggatgcattcattttctgtaataaagtttcttaatcactcttcccaaaaagtaa

SEQ ID NO: 113661 - DNA, 3560 bp, Artificial Sequence
  derived and/or modified sequence
aggcggctctcgtggaggcagctagcgcgaggctggggagcgctgagccgcgcgtcgtgccctgcgctgcccagactagcgaacaatacagtcaggatggctaaaggtgaccccaagaaaccaaagggcaagatgtccgcttatgccttctttgtgcagacatgcagagaagaacataagaagaaaaacccagaggtccctgtcaattttgcggaattttccaagaagtgctctgagaggtggaagacgatgtccgggaaagagaaatctaaatttgatgaaatggcaaaggcagataaagtgcgctatgatcgggaaatgaaggattatggaccagctaagggaggcaagaagaagaaggatcctaatgctcccaaaaggccaccgtctggattcttcctgttctgttcagaattccgccccaagatcaaatccacaaaccccggcatctctattggagacgtggcaaaaaagctgggtgagatgtggaataatttaaatgacagtgaaaagcagccttacatcactaaggcggcaaagctgaaggagaagtatgagaaggatgttgctgactataagtcgaaaggaaagtttgatggtgcaaagggtcctgctaaagttgcccggaaaaaggtggaagaggaagatgaagaagaggaggaggaagaagaggaggaggaggaggaggaggatgaataaagaaactgtttatctgtctccttgtgaatacttagagtaggggagcgccgtaattgacacatctcttatttgagaagtgtctgttgccctcattaggtttaattacaaaatttgatcacgatcatattgtagtctctcaaagtgctctagaaattgtcagtggtttacatgaagtggccatgggtgtctggagcaccctgaaactgtatcaaagttgtacatatttccaaacatttttaaaatgaaaaggcactctcgtgttctcctcactctgtgcactttgctgttggtgtgacaaggcatttaaagatgtttctggcattttctttttatttgtaaggtggtggtaactatggttattggctagaaatcctgagttttcaactgtatatatctatagtttgtaaaaagaacaaaacaaccgagacaaacccttgatgctccttgctcggcgttgaggctgtggggaagatgccttttgggagaggctgtagctcagggcgtgcactgtgaggctggacctgttgactctgcagggggcatccatttagcttcaggttgtcttgtttctgtatatagtgacatagcattctgctgccatcttagctgtggacaaaggggggtcagctggcatgagaatattttttttttttaagtgcggtagtttttaaactgtttgtttttaaacaaactatagaactcttcattgtcagcaaagcaaagagtcactgcatcaatgaaagttcaagaacctcctgtacttaaacacgattcgcaacgttctgttattttttttgtatgtttagaatgctgaaatgtttttgaagttaaataaacagtattacatttttaaaactcttctctattataacagtcaatttctgactcacagcagtgaacaaacccccactccattgtatttggagactggcctccctataaatgtggtagcttcttttattactcagtggccagctcacttagggctgagatgaaggagagggctacttgaagctactgtgtgattttgtttgtgtctgagtggcattcagatgaagtctggaggagttaggagaacgacataggcaaggttcagcagccttccaaggtataggaaggtgggtgattaggactgaggctatctaggtttaacttttgtcccacctccaccccctattttgtggggccaaatgcattgctaaacagcaatttcagagtgtatggtgtgtcaaaaattaaggccttattgtttttctctttcacccctaccccccgtgctcctggcacatatcacattatttgtggtgcccaacatttggggtcttgagcctgctgctggtctcctggatgccagtgagggtatgtgggatggggtggtggggtaggggacggtatcctttttttgctcctacttggaaacaccaaacaccccaaggaagatgataggctccatcttgggccacctgagctatagggcaggctaatggaatcaaccatttctgagcactaaatgtatcatgaaaagttgaatggcctgctcataagtttagctcattcactggaaatgtagattgatgttcaatgttaaactggaaggagcttggtttgtgtgtcagtggttatattagtgggtagtgtaacattttatccaggttggggtgaggggagatggccacagtagcaagtggtgacactaaataccattttgaaggctgatgtgtatatacatcattactgtccgtagcaatgaaggatacagtactgtgttgtgggtgagtgttgctattgcccagcattaatatttgggtgtgtatgtttgaggctatgaaacacgcaggagtgtttttgtgctattaattttaagagaaagcagctttttcttaaaattcactgttgagaaacttgcatgtctggaggcggtgtcctctccgccctgtcgggtcctggatgagtacgagttatggtcacggtcacagcctgatctcttatgtgttcatagccattcgctctcccatcagaactgtttgtcctgaatgtgttcctctagttctagaaaatgaccactaatttaaaaaactcggttgtgaggtttgcccagaggcacttgttccagaatttcccctcctgcttcagccatgtccttgtcacttggcattctaagctaaagctttagcttcccaattcgtgatgtgctaggccaagattcgggagctgttgccagcctcgtcaaatatggaagagaaacaacctgcggtcaaaagggagtgatttgttaagtggtgcgcgtctatctcataactagatgtaccaaccagggaagggccaaggatggaaaggggtaacttttgtgcttccaaagtagctaagcagaagtgggggagcagtttagccagatgatctttgattaggcaaacattgagttttaaagaggctgtcaagttgaggccacttggtccattagctggggcagcaagatcactactcaacgttttcacactgtggcaagattgctcttctagtggaataatgccctagtttctctgagatgatgtaagtggcatgatgttacctaaggcttaggcttagcttgatttctgggcccactgtctgtgttcttaagatgccaacctgttgctttttttttttttttcccccatttaaaaggatagtacctactccctctaaccacctcaccccattcttgaatgacattttatccttcggaaagaacaaggctgtgatgtagtgactattgtctgtgtctcctgtgtgtgtctgttcttgtcacaaatgtatttggggacgttggatgcattcattttctgtaataaagtttcttaatcactcttcccaaaaagtaa

SEQ ID NO: 113662 - DNA, 707 bp, Artificial Sequence
  derived and/or modified sequence
tttgtagttcagcttcaggccaagtgcttcagctccatataagaggtagctttcttgagagcagagatcgaaatatttcctatgcaaaggatggaaatacttcctgcgcgtaagcgcaatcctttcatcattcgaatcaggatggctaaaggtgaccccaagaaaccaaagggcaagatgtccgcttatgccttctttgtgcagacatgcagagaagaacataagaagaaaaacccagaggtccctgtcaattttgcggaattttccaagaagtgctctgagaggtggaagacgatgtccgggaaagagaaatctaaatttgatgaaatggcaaaggcagataaagtgcgctatgatcgggaaatgaaggattatggaccagctaagggaggcaagaagaagaaggatcctaatgctcccaaaaggccaccgtctggattcttcctgttctgttcagaattccgccccaagatcaaatccacaaaccccggcatctctattggagacgtggcaaaaaagctgggtgagatgtggaataatttaaatgacagtgaaaagcagccttacatcactaaggcggcaaagctgaaggagaagtatgagaaggatgttgctgactataagtcgaaaggaaagtttgatggtgcaaagggtcctgctaaagttgcccggaaaaaggtggaagaggaagatgaagaagaggagga

SEQ ID NO: 113663 - DNA, 529 bp, Artificial Sequence
  derived and/or modified sequence
gtacttcttgtcaattcctccttgcttttcctcattgtatttctttgtttctcttttatcacagtcaggatggctaaaggtgaccccaagaaaccaaagggcaagatgtccgcttatgccttctttgtgcagacatgcagagaagaacataagaagaaaaacccagaggtccctgtcaattttgcggaattttccaagaagtgctctgagaggtggaagacgatgtccgggaaagagaaatctaaatttgatgaaatggcaaaggcagataaagtgcgctatgatcgggaaatgaaggattatggaccagctaagggaggcaagaagaagaaggatcctaatgctcccaaaaggccaccgtctggattcttcctgttctgttcagaattccgccccaagatcaaatccacaaaccccggcatctctattggagacgtggcaaaaaagctgggtgagatgtggaataatttaaatgacagtgaaaagcagccttacatcactaaggcggcaaagctgaaggagaagtatg

SEQ ID NO: 113664 - DNA, 812 bp, Artificial Sequence
  derived and/or modified sequence
cgccgccgccgccgccgccgccgccgccgccgccgccgccgccgccgcagcgcccgcacaactttccggcccgcgccgccgtgagcgcgccctgccgccgcctccccctgcctctactccccattcccttcccgccccctccgccttccctcctgctaggcggccgggaaggaagaagcaattcagtcaggatggctaaaggtgaccccaagaaaccaaagggcaagatgtccgcttatgccttctttgtgcagacatgcagagaagaacataagaagaaaaacccagaggtccctgtcaattttgcggaattttccaagaagtgctctgagaggtggaagacgatgtccgggaaagagaaatctaaatttgatgaaatggcaaaggcagataaagtgcgctatgatcgggaaatgaaggattatggaccagctaagggaggcaagaagaagaaggatcctaatgctcccaaaaggccaccgtctggattcttcctgttctgttcagaattccgccccaagatcaaatccacaaaccccggcatctctattggagacgtggcaaaaaagctgggtgagatgtggaataatttaaatgacagtgaaaagcagccttacatcactaaggcggcaaagctgaaggagaagtatgagaaggatgttgctgactataagtcgaaaggaaagtttgatggtgcaaagggtcctgctaaagttgcccggaaaaaggtggaagaggaagatgaagaagaggaggaggaagaagaggaggaggaggaggaggaggatgaataaagaaactgtttatctgtc

SEQ ID NO: 113665 - DNA, 793 bp, Artificial Sequence
  derived and/or modified sequence
cgcaccgcccgctcccgccgccgccgccgccgccgccgccgccgccgccgccgccgccgccgccgccgcagcgcccgcacaactttccggcccgcgccgccgtgagcgcgccctgccgccgcctccccctgcctctactccccattcccttcccgccccctccgccttccctcctgctaggcggccgggaaggaagaagcaattcagtcaggatggctaaaggtgaccccaagaaaccaaagggcaagatgtccgcttatgccttctttgtgcagacatgcagagaagaacataagaagaaaaacccagaggtccctgtcaattttgcggaattttccaagaagtgctctgagaggtggaagacgatgtccgggaaagagaaatctaaatttgatgaaatggcaaaggcagataaagtgcgctatgatcgggaaatgaaggattatggaccagctaagggaggcaagaagaagaaggatcctaatgctcccaaaaggccaccgtctggattcttcctgttctgttcagaattccgccccaagatcaaatccacaaaccccggcatctctattggagacgtggcaaaaaagctgggtgagatgtggaataatttaaatgacagtgaaaagcagccttacatcactaaggcggcaaagctgaaggagaagtatgagaaggatgttgctgactataagtcgaaaggaaagtttgatggtgcaaagggtcctgctaaagttgcccggaaaaaggtggaagaggaagatgaagaagaggaggaggaagaagaggagga

SEQ ID NO: 113666 - DNA, 1083 bp, Artificial Sequence
  derived and/or modified sequence
atgttctgccacgtggagcctgagcaggtcatctgtgtgcatgacgttagctccatttatagagttcccctgctgttagaggagcagggagtcgtggattatttcctgcgccgcttagatctgcctatcgagcgacaacctcgaaagatgctcatgaagtggaaagaaatggcagataggtatgaccggctcctggagacgtgcagtattgccctcgtgggcaagtacactaagtttagtgatagctatgcctcagtgatcaaggctttagagcatagtgccctggctatcaaccataagcttgaaattaagtatattgactcggcagacctcgagccaattactagtcaagaagagcctgtcaggtaccacgaggcgtggcaaaaactatgttctgcgcacggagtcttggtcccaggcggctttggagtgcgaggaaccgagggaaagattcaggccattgcatgggcgcggaaccagaagaaacccttcttgggcgtctgtctgggcatgcagctcgccgtggttgagttcagccgaaacgtgctgggctggcaggacgccaacagtactgagtttgaccctacaactagccatccagttgtcgttgacatgccagagcataatcccggtcaaatgggtggcaccatgaggcttggtaaacggcggacactgttccagactaaaaacagcgtgatgaggaaactatatggagacgccgattacctggaagagaggcacagacaccgcttcgaggtgaatcctgtttggaagaagtgtctcgaggagcagggcctgaaattcgttggtcaggatgtggagggagagaggatggaaatcgtagagctggaagaccatccgttcttcgttggggtgcagtatcatcctgaattcttgtccaggcccatcaagcccagtccaccgtatttcggtctgctgctggcttcggtggggaggctttcccactatctccaaaagggttgcagactgtctccacgtgatacctatagtgaccggagcggtagttcaagccctgacagcgagataaccgaacttaagttcccttctatcaaccacgactag

SEQ ID NO: 113667 - DNA, 1083 bp, Artificial Sequence
  derived and/or modified sequence
atgttctgccacgtggagcctgagcaggtgatctgtgtgcatgatgtgagcagcatctacagagtgcccctgctgctggaggagcagggcgtggtggactacttcctgcggcggctggacctgcccatcgagcggcagcccaggaagatgctgatgaagtggaaggagatggctgacagatatgaccggctgctggagacctgcagcatcgccctggtgggcaagtacaccaagttcagtgacagctatgccagcgtcatcaaggccctggagcacagcgccctggccatcaaccacaagctggagatcaagtacatcgacagcgctgacctggagcccatcaccagccaggaggagcctgtgcgctaccacgaggcctggcagaagctgtgcagcgcccacggcgtgctggtgcctgggggcttcggcgtgcggggcacagagggcaagatccaggccatcgcctgggccaggaaccagaagaagcccttcctgggcgtgtgcctgggcatgcagctggccgtggtggagttcagcagaaatgtgctgggctggcaggatgccaacagcacagaatttgaccccaccaccagccaccctgtggtggtggacatgcctgagcacaaccctggccagatgggcggcaccatgaggctgggcaagaggaggaccctcttccagaccaagaacagcgtgatgaggaagctgtatggagatgctgactacctggaggagcggcaccgccacagatttgaggtgaaccctgtgtggaagaagtgcctggaggagcagggcctgaagtttgtgggccaggatgtggagggggagaggatggagatcgtggagctggaggaccaccccttctttgtgggcgtgcagtaccaccctgagttcctgagccggcccatcaagcccagccccccctacttcggcctgctgctggcctctgtgggccgcctgagccactacctgcagaagggctgccgcctgagcccccgggacacctacagcgacaggagcggcagcagcagcccagattctgagatcacagagctgaagttccccagcatcaaccacgactag

SEQ ID NO: 113668 - DNA, 1083 bp, Artificial Sequence
  derived and/or modified sequence
atgttctgccacgtggagcccgagcaggtgatctgcgtgcacgacgtgtcaagcatttaccgcgtgcctctcttgctggaggagcagggtgtagttgactatttccttaggagattggacctccctattgaacgccaaccaagaaaaatgcttatgaagtggaaagagatggcagacagatacgatagactcctggagacctgctccattgcactagtcggcaagtacacaaaattcagcgactcttacgcctccgtaattaaagctctagaacactcggcgttagccatcaaccacaagctggagatcaagtacattgacagcgccgaccttgagccaattacaagccaggaagagccagttaggtaccacgaagcatggcaaaagctctgttctgcgcacggggtgctcgtacccggcggcttcggcgtgcgaggcaccgaaggaaaaattcaggcgatcgcctgggcacggaatcaaaaaaagccgttcctgggggtttgtctcggcatgcagctcgcggtcgtggagttctctcgcaatgtcctggggtggcaggacgctaatagcactgaatttgaccctactacatcacatcccgtggtggttgatatgcccgaacacaatcctgggcagatgggcggaacaatgcggctagggaagcggagaactttgtttcagaccaaaaattccgtcatgcgtaagctgtatggggacgccgattatttggaagagcgccataggcacaggttcgaggtgaaccccgtctggaaaaagtgcttagaagagcagggcttaaaattcgtaggtcaggacgttgaaggggaacgcatggagatcgtggaattagaggaccaccccttcttcgttggtgtgcagtatcatccagagttcctgtcacggcccatcaagccctcaccaccttatttcggactgctgttggccagtgtaggacggctctcccactacctgcagaagggctgccgactatctcctcgagacacatattcagaccggtccggcagctcttcacccgattccgagatcactgaattaaagtttccatcgataaaccatgactag

SEQ ID NO: 113669 - DNA, 1083 bp, Artificial Sequence
  derived and/or modified sequence
atgttttgtcatgtggaacccgaacaggtgatctgcgttcatgacgtctcttctatatatcgggtcccattactcctggaggagcagggtgtggtagactacttcctacggcgactggacctgcccatcgagcggcagccacgcaagatgttgatgaagtggaaagagatggcagatcggtacgatagactgctagagacatgtagcattgcccttgtcggcaaatataccaagttcagcgatagttatgccagcgttatcaaggcacttgaacactccgctttggcaattaatcacaaactggagattaagtacattgactcagccgatctcgaacctattacttcgcaagaggagcctgtgcgctaccatgaggcgtggcagaagctctgcagcgctcacggggttctcgtccctgggggtttcggtgtacgaggcactgagggcaagattcaggcgattgcttgggcccgaaatcagaagaaacctttcctgggggtgtgcctggggatgcagcttgcagtagtggaatttagtagaaacgtgctgggctggcaagacgcaaacagcaccgagttcgaccctactacttcccacccggtcgttgtagacatgcccgagcacaatccgggacagatgggaggaacgatgcgcctaggcaagagaagaactctttttcagacaaaaaactccgtaatgcgcaagctgtatggcgacgccgattaccttgaagagcgccacagacatagattcgaagttaaccccgtctggaagaagtgcctggaggagcaaggcttaaagttcgtgggtcaggacgtggagggcgagcgcatggaaatcgtggaattggaggaccaccccttcttcgtgggcgtacaataccaccctgagttcctttcgcggccaattaagccatctcctccctacttcggccttttactcgccagcgtggggcgtctgtcgcattatctccagaagggatgtagactttctccacgggatacttatagtgatcgaagtggctcttcctcccctgacagcgaaatcaccgagctcaagtttccttctatcaatcatgactag

SEQ ID NO: 113670 - DNA, 1712 bp, Artificial Sequence
  derived and/or modified sequence
actggctgtccggggctccgcgcgcgtcgccggcccagctctgtcgctgacgggaggatctgaagccggccgcagccaagttcaacaggggaacagaagactaaacctacccagaatagtgttcgggaacttagaggacttgggctttccccagatctggttgtatgcaggtgctcaaatccacttgacacatcagtgaaggagaaaatatcaatgttctgccatgttgagcctgaacaagtgatctgtgtccacgatgtctcatccatctaccgagtccccttgttgttagaggagcaaggggttgtagattattttcttcgaagacttgaccttcctattgagaggcagccaagaaaaatgctgatgaaatggaaagagatggctgacagatatgatcgcttgctggagacctgctctattgcccttgtgggcaaatacacgaagttctcagactcctatgcctctgtcattaaggctctggagcattctgcactggccatcaaccacaaattggaaatcaagtacatagattctgcggacttggagcccatcacctcgcaagaagagcccgtgcgctaccacgaagcttggcagaagctctgtagtgctcatggagtgctggttccaggaggatttggtgttcgaggaacagaaggaaaaatccaagcaattgcctgggctcggaatcagaaaaagccttttttgggcgtgtgcttagggatgcagttggcagtggttgaattctcaagaaacgtgctgggatggcaagatgccaattctacagagtttgaccctacgaccagtcatcccgtggtcgtagacatgccagaacacaacccagggcagatgggcggaaccatgaggctgggcaagaggagaaccctgttccagaccaagaactcagtcatgaggaaactctatggagacgcagactacttggaagagaggcaccgccaccgatttgaggtgaatccagtctggaaaaagtgtttggaagaacaaggcttgaagtttgttggccaagatgttgaaggagagagaatggaaattgtggagttagaagatcatcccttttttgttggggttcagtaccaccctgagttcctgtccaggcctatcaagccctccccaccatactttggcctcctcctggcctctgtggggcggctctcacattacctccagaaaggctgcaggctctcacccagggacacctatagtgacaggagtggaagcagctcccctgactctgaaatcaccgaactgaagtttccatcaataaatcatgactgatcttgtagcggatgattcttcaagagacccttcaaacttgggtagagtttacagctctgactttacactcggctttggagactttctttaaattatgtttttattaagattattttattatgcggaaaggtatttgggaaacttgtcacttgcatgtcccatcacgtgtactggctcctctgtggtgtctgcctgttgcgtgacactctccttgcagttcttgagttgcggcagaacatcgcgatgggaaccgatggtgggtggggctgcagagtgccccatcggtcaccttgtttctcaactacctcgcatcattgcagatgctagcgcgttgcctgtcgctttcccttggatacctagaccgttataaagtgtgccacatggacttaccgagcatggagagaggattttagcta

SEQ ID NO: 113671 - DNA, 1083 bp, Artificial Sequence
  derived and/or modified sequence
atgttctgccacgtggagcccgagcaggtgatctgcgtgcacgacgtgagcagcatctacagagtgcccctgctgctggaggagcagggcgtggtggactacttcctgagaagactggacctgcccatcgagagacagcccagaaagatgctgatgaagtggaaggagatggccgacagatacgacagactgctggagacctgcagcatcgccctggtgggcaagtacaccaagttcagcgacagctacgccagcgtgatcaaggccctggagcacagcgccctggccatcaaccacaagctggagatcaagtacatcgacagcgccgacctggagcccatcaccagccaggaggagcccgtgagataccacgaggcctggcagaagctgtgcagcgcccacggcgtgctggtgcccggcggcttcggcgtgagaggcaccgagggcaagatccaggccatcgcctgggccagaaaccagaagaagcccttcctgggcgtgtgcctgggcatgcagctggccgtggtggagttcagcagaaacgtgctgggctggcaggacgccaacagcaccgagttcgaccccaccaccagccaccccgtggtggtggacatgcccgagcacaaccccggccagatgggcggcaccatgagactgggcaagagaagaaccctgttccagaccaagaacagcgtgatgagaaagctgtacggcgacgccgactacctggaggagagacacagacacagattcgaggtgaaccccgtgtggaagaagtgcctggaggagcagggcctgaagttcgtgggccaggacgtggagggcgagagaatggagatcgtggagctggaggaccaccccttcttcgtgggcgtgcagtaccaccccgagttcctgagcagacccatcaagcccagccccccctacttcggcctgctgctggccagcgtgggcagactgagccactacctgcagaagggctgcagactgagccccagagacacctacagcgacagaagcggcagcagcagccccgacagcgagatcaccgagctgaagttccccagcatcaaccacgactag

SEQ ID NO: 113672 - DNA, 477 bp, Artificial Sequence
  derived and/or modified sequence
atgctgaacaacctgctgctgttcagcctgcagatcagcctgatcggcaccaccctgggcggcaacgtgctgatctggcccatggagggcagccactggctgaacgtgaagatcatcatcgacgagctgatcaagaaggagcacaacgtgaccgtgctggtggccagcggcgccctgttcatcacccccaccagcaaccccagcctgaccttcgagatctacagagtgcccttcggcaaggagagaatcgagggcgtgatcaaggacttcgtgctgacctggctggagaacagacccagccccagcaccatctggagattctaccaggagatggccaaggtgatcaaggacttccacatggtgagccaggagatctgcgacggcgtgctgaagaaccagcagctgatggccaagctgaagaagagcaagttcgaggtgctggtgagcgaccccgtgttcccctgcggcgacatctag

SEQ ID NO: 113673 - DNA, 477 bp, Artificial Sequence
  derived and/or modified sequence
atgttgaacaatctcctgctgttctccctgcagatcagcctgattggcaccacactgggtggaaacgtgctgatttggccaatggagggttcccactggctgaatgtgaaaataattatcgacgaactcatcaaaaaggagcacaatgtgaccgttctggtggcatccggcgctcttttcatcacacccacatcaaatccctcactcacattcgagatctaccgagtccctttcggtaaggagagaatagagggggttatcaaggactttgtgttgacctggctggaaaaccgcccaagtcctagtactatttggcggttctaccaagagatggcgaaggtgattaaggattttcacatggtctctcaagagatttgcgacggagtcctgaaaaaccagcaacttatggcaaaactgaagaagtctaagtttgaggttcttgtgagcgaccctgttttcccttgcggagatatttag

SEQ ID NO: 113674 - DNA, 477 bp, Artificial Sequence
  derived and/or modified sequence
atgctgaacaacctgctgctcttcagcctgcagatcagcctgattggcaccaccctgggcggcaatgtgctgatctggcccatggagggcagccactggctgaatgtgaagatcatcattgatgagctgatcaagaaggagcacaacgtgacagtgctggtggccagcggggccctcttcatcacccccaccagcaaccccagcctgacctttgagatctacagagtgccctttgggaaggagagaattgaaggagtcatcaaggactttgtgctgacctggctggagaaccggcccagccccagcaccatctggaggttctaccaggagatggccaaggtgatcaaggacttccacatggtgtcccaggagatctgtgatggagtgctgaagaaccagcagctgatggccaagctgaagaagagcaagtttgaggtgctggtgtctgaccctgtgttcccctgtggggacatctag

SEQ ID NO: 113675 - DNA, 477 bp, Artificial Sequence
  derived and/or modified sequence
atgctgaacaacctgctgctgttcagcctgcagatcagcctgatcggaacgaccctggggggtaatgttttaatatggcctatggaggggtcccactggctgaacgtgaagatcatcatagatgaactcataaagaaagagcacaacgtgacggtactcgtggcctccggggccctgtttatcacccccacatctaacccgtctctgacctttgaaatttatcgcgttcctttcggaaaggagcggatcgaaggggtcataaaagacttcgttctgacctggctggagaaccggccctccccttccactatctggcggttttaccaagagatggccaaagttatcaaagattttcacatggtgtcccaggagatttgtgacggagtgttaaaaaatcagcagttaatggccaagttaaagaagagcaagtttgaggtactggtttctgaccccgtgttcccctgcggcgatatttag

SEQ ID NO: 113676 - DNA, 477 bp, Artificial Sequence
  derived and/or modified sequence
atgctgaataatctccttctattctcgctgcagataagtctgataggaactacactgggcggtaacgtattaatttggcccatggaggggagccactggctcaatgttaaaatcattatcgacgaactcatcaagaaagagcataatgtgactgttctggtcgcttccggtgccttgtttataaccccaactagcaacccatctctgacattcgagatctatcgcgtcccatttgggaaggaaagaatcgagggcgtgattaaggatttcgttttgacctggctcgagaataggccgagcccaagcaccatttggaggttttaccaagagatggcaaaggtaattaaagactttcacatggtttcgcaagaaatatgcgacggggtgctgaaaaaccaacagcttatggcgaagctcaagaagtccaaattcgaggtcctggtgagtgaccccgtttttccttgtggcgatatttag

SEQ ID NO: 113677 - DNA, 586 bp, Artificial Sequence
  derived and/or modified sequence
acattcggcttcttcctaatgtcaaatgagtgctgttaaagttcctccaggaaacttcagagaaaaacatttgcttcacatctcatcaaatcttctgcatcaagccacatcatgttaaacaaccttctgctgttctcccttcagataagtctcataggaaccactcttggtgggaatgttttgatttggccaatggaaggtagtcattggctaaatgttaagataattatagatgagctcattaaaaaggagcataatgtgactgtcctagttgcctctggtgcacttttcatcacaccaacctctaacccatctctgacatttgaaatatatagggtgccctttggcaaagaaagaatagaaggagtaattaaggacttcgttttgacatggctggaaaatagaccatctccttcaaccatttggagattctatcaggagatggccaaagtaatcaaggacttccacatggtgtctcaggagatctgtgatggcgttcttaaaaaccaacagctgatggcaaagctaaagaaaagcaagtttgaagtcctggtgtctgatccagtatttccttgtggcgatatag

SEQ ID NO: 113678 - DNA, 1482 bp, Artificial Sequence
  derived and/or modified sequence
acgttcgtcatttagtgcgggagggatcctgaaccgcgcggccgaaccctccggtgtcccgacccaggctaagcttgagcatggctgagcaggagcccacagccgagcagctggcccagattgcagcggagaacgaggaggatgagcactcggtcaactacaagcccccggcccagaagagcatccaggagatccaggagctggacaaggacgacgagagcctgcgaaagtacaaggaggccctgctgggccgcgtggccgtttccgcagaccccaacgtccccaacgtcgtggtgactggcctgaccctggtgtgcagctcggccccgggccccctggagctggacctgacgggcgacctggagagcttcaagaagcagtcgtttgtgctgaaggagggtgtggagtaccggataaaaatctctttccgggttaaccgagagatagtgtccggcatgaagtacatccagcatacgtacaggaaaggcgtcaagattgacaagactgactacatggtaggcagctacagcatcaagtcccgcttcacagacgacgacaagaccgaccacctgtcctgggagtggaatctcaccatcaagaaggactggaaggactgagcccagccagaggcgggcagggcagactgacggacggacgacggacaggcggatgtgtcccccccagcccctcccctccccataccaaagtgctgacaggccctccgtgcccctcccaccctggtccgcctccctggcctggctcaaccgagtgcctccgacccccctcctcagccctcccccacccacaggcccagcctcctcggtctcctgtctcgttgctgcttctgcctgtgctgtgggggagagaggccgcagccaggcctctgctgccctttctgtgccccccaggttctatctccccgtcacacccgaggcctggcttcaggagggagcggagcagccattctccaggccccgtggttgcccctggacgtgtgcgtctgctgctccggggtggagctggggtgtgggatgcacggcctcgtgggggccgggccgtcctccagccccgctgctccctggccagcccccttgtcgctgtcggtcccgtctaaccatgatgccttaacatgtggagtgtaccgtggggcctcactagcctctaactccctgtgtctgcatgagcatgtggcctccccgtcccttccccggtggcgaacccagtgacccagggacacgtggggtgtgctgctgctgctccccagcccaccagtgcctggccagcctgcccccttccctggacagggctgtggagatggctccggcggcttggggaaagccaaattgccaaaactcaagtcacctcagtaccatccaggaggctgggtattgtcctgcctctgccttttctgtctcagcgggcagtgcccagagcccacacccccccaagagccctcgatggacagcctcactcaccccacct

SEQ ID NO: 113679 - DNA, 237 bp, Artificial Sequence
  derived and/or modified sequence
atggcccccctggccgaggtgggcggcttcctgggcggcctggagggcctcgggcaacaggttgggagccacttccttctgcccccagcaggagagcggccccctgccgcgctgttaccccaccgactacctcccgcagatcctgccagacggcagcgcgctggtcacccagccggaccccagcctctgcgctacctgggcatccaccagtgcggctcaggcaccggccagtattag

SEQ ID NO: 113680 - DNA, 234 bp, Artificial Sequence
  derived and/or modified sequence
atggtgagagagctgtggatgtggaacgtggaggaggaggagcacgaggtgggcatcagcacctggggcggccagcactgcggctgccccgccaagagcctgcccggcccccaccccggcggcgtgagcgccccccagagcgccagccagctgatggtgaagctgctggtgtggcagaagagcgtgcacaagctgagaaagaacagaaacgcctacagctgcggccccctgtag

SEQ ID NO: 113681 - DNA, 1365 bp, Artificial Sequence
  derived and/or modified sequence
atgcccgcccacagagaccccgacgtgcagggccacagactgcagcacgacagctacgcccagcccgacggccccagagagcccgccagaggcagccaccccgtggccagagtgagagccgccggcggcgtgagactgcccagacccccccccctgctgcccgtgctggccgtgagagccgacgtgcacagagccggcctgtacccccaccccagactgcccggccacgtgagagccggccccgcccaggtgctgcccgactacggcgccgtgcagctgcaggtggccagactgcccggcctgcccgagaccccccagcaggagagaccccagctgcccgtgcacggcggcgcccagcagagactgggcagagcccaccccggcctgggccccgtgcccgccgccgtgcccgccgccgccgccccccagagagccggcgcccccgccgagggcagaggccccagagccagaagactgagacagcccggccaggtgccccccagaggcgaggagagagtggtgagagccgccctgcacgccagaagaggcagagtgctggagcccagaggccaggccctgagaagcggcctggccggccacctgggcggcgccgtgctgctgctgcagagactgcacagagcccacctgccccacagacccggccccctgcccctgcccagagccccccaccacctgcccctgcacgtgctgctgagactgctgagaggcctgccccacccccccctgagaagaagaagagagcacagactgagacccggccagagacccgccctgtgccaccccggcggcaccggcgagcacagactgcacgccggcctgcccggccccctgctgctgagacacggccagctggccgtggtgggcggcccccacgcccacctggtgcccggcagaagacaggaggtgggccccagaggccacagaagccagcagcagctgctgccccccggcagcctgggccaccccggcggcgaggaccaccccgaccccggccacgcccagggcggcggcggcagagcccacagaggcctgctgagaggccagcacggcagacagagagcccacagactgagagcccacagccccggcctgctgcccggccacagacacgtgctgcaccccctgggcctgagaggccccgtgccccaccccgagggcgacgaggacggcagaagagagcacggccaggccggcgaggcccacggcgcctacagagccctgctgtgcgccgtgcacagagccggccacctgtgcgacagactgctgctgctgagaaccccccagcacggcctgctggaggaccccggcggcgccgcccaggtgcagaacgagcagcccgactag

SEQ ID NO: 113682 - protein, 416 aa, Artificial Sequence
  derived and/or modified sequence
MTKEEAMIAYVEEMKKIIETMPMTEKVEELLRVIGPFYEIVEDKKSGRSSDITSDLGNVLTSTPNAKTVNGKAESSDSGAESEEEEAQEEVKGAEQSDNDKKMMKKSADHKNLEVIVTNGYDKDGFVQDIQNDIHASSSLNGRSTEEVKPIDENLGQTGKSAVCIHQDINDDHVEDVTGIQHLTSDSDSEVYCDSMEQFGQEESLDSFTSNNGPFQYYLGGHSSQPMENSGFREDIQVPPGNGNIGNMQVVAVEGKGEVKHGGEDGRNNSGAPHREKRGGETDEFSNVRRGRGHRMQHLSEGTKGRQVGSGGDGERWGSDRGSRGSLNEQIALVLMRLQEDMQNVLQRLQKLETLTALQAKSSTSTLQTAPQPTSQRPSWWPFEMSPGVLTFAIIWPFIAQWLVYLYYQRRRRKLN

SEQ ID NO: 113683 - DNA, 1251 bp, Artificial Sequence
  derived and/or modified sequence
atgaccaaggaggaggccatgatcgcctacgtggaggagatgaagaagatcatcgagaccatgcccatgaccgagaaggtggaggagctgctgagagtgatcggccccttctacgagatcgtggaggacaagaagagcggcagaagcagcgacatcaccagcgacctgggcaacgtgctgaccagcacccccaacgccaagaccgtgaacggcaaggccgagagcagcgacagcggcgccgagagcgaggaggaggaggcccaggaggaggtgaagggcgccgagcagagcgacaacgacaagaagatgatgaagaagagcgccgaccacaagaacctggaggtgatcgtgaccaacggctacgacaaggacggcttcgtgcaggacatccagaacgacatccacgccagcagcagcctgaacggcagaagcaccgaggaggtgaagcccatcgacgagaacctgggccagaccggcaagagcgccgtgtgcatccaccaggacatcaacgacgaccacgtggaggacgtgaccggcatccagcacctgaccagcgacagcgacagcgaggtgtactgcgacagcatggagcagttcggccaggaggagagcctggacagcttcaccagcaacaacggccccttccagtactacctgggcggccacagcagccagcccatggagaacagcggcttcagagaggacatccaggtgccccccggcaacggcaacatcggcaacatgcaggtggtggccgtggagggcaagggcgaggtgaagcacggcggcgaggacggcagaaacaacagcggcgccccccacagagagaagagaggcggcgagaccgacgagttcagcaacgtgagaagaggcagaggccacagaatgcagcacctgagcgagggcaccaagggcagacaggtgggcagcggcggcgacggcgagagatggggcagcgacagaggcagcagaggcagcctgaacgagcagatcgccctggtgctgatgagactgcaggaggacatgcagaacgtgctgcagagactgcagaagctggagaccctgaccgccctgcaggccaagagcagcaccagcaccctgcagaccgccccccagcccaccagccagagacccagctggtggcccttcgagatgagccccggcgtgctgaccttcgccatcatctggcccttcatcgcccagtggctggtgtacctgtactaccagagaagaagaagaaagctgaactag

SEQ ID NO: 113684 - DNA, 1251 bp, Artificial Sequence
  derived and/or modified sequence
atgacaaaagaggaagcaatgatcgcttacgtggaagagatgaaaaaaattatcgaaacaatgccgatgacagagaaggtcgaagagctgctgcgcgttattggcccgttctacgaaattgtcgaggacaaaaaatcaggtcgctcatcagacattacaagcgacttgggtaatgttttaacctctacacccaacgccaaaacagtcaatggtaaggccgagagttctgattctggagcggagtctgaggaagaggaagcgcaggaagaggttaagggcgccgagcagagcgataatgacaagaagatgatgaaaaagtccgctgaccataagaatctcgaggtgatagtgacaaatggctacgacaaggatggttttgtccaggacattcagaacgacattcatgcttcatccagtctcaacgggagatcaaccgaagaagtgaagcctatagatgaaaatttgggacaaacaggcaaatctgcagtgtgcatacaccaggatatcaacgacgaccacgtggaggatgtcacaggtattcagcatttgacctccgactccgattctgaggtatattgcgatagtatggaacagtttggacaggaagaaagcctcgatagcttcacgtcgaataacgggcccttccagtactacctgggcggacactccagccaacccatggaaaattctggatttcgtgaggatatccaggtcccacctggaaacggtaacatcggcaacatgcaggtcgtggccgtagaagggaagggcgaggtgaagcatggtggagaggacggaagaaacaatagcggagctccacaccgtgaaaaacgagggggtgagaccgatgagtttagtaatgtcaggagggggcgcggccacaggatgcagcatctgagtgagggaaccaaaggtaggcaggtaggttctgggggcgacggagaacggtggggcagtgatagaggctccagggggtcccttaacgaacagatcgcactggttctgatgaggctccaagaggatatgcagaatgtgctgcagcgtcttcagaagctcgaaacacttactgccctgcaggctaagtctagcactagtacgcttcagacggccccccagccaactagccagagaccatcgtggtggccgttcgaaatgagccctggcgtcttgacctttgccatcatctggcctttcatcgcgcagtggttggtctacctgtattaccagagacgccggagaaagctcaattag

SEQ ID NO: 113685 - DNA, 1251 bp, Artificial Sequence
  derived and/or modified sequence
atgaccaaggaggaggccatgattgcctacgtggaggagatgaagaagatcatcgagaccatgcccatgacagagaaggtggaggagctgctgcgggtcatcggccccttctatgagatcgtggaggacaagaagagcggccgcagcagtgacatcaccagtgacctgggcaatgtgctgaccagcaccccaaatgccaagacagtgaatggcaaggccgagagcagtgacagcggggctgagagcgaggaggaggaggcccaggaggaggtgaagggagctgagcagagcgacaatgacaagaagatgatgaagaagtctgctgaccacaagaacctggaggtgattgtgaccaacggctatgacaaggatggctttgtgcaggacatccagaatgacatccacgccagcagcagcctgaatggccgcagcacagaggaggtgaagcccattgatgagaacctgggccagacaggcaagtctgctgtgtgcatccaccaggacatcaatgatgaccacgtggaggatgtgacaggcatccagcacctgaccagtgacagcgacagcgaggtgtactgtgacagcatggagcagtttggccaggaggagagcctggacagcttcaccagcaacaacggccccttccagtactacctgggcggccacagcagccagcccatggagaacagcggcttccgggaggacatccaggtgcccccaggaaatggaaatattggcaacatgcaggtggtggccgtggagggcaagggggaggtgaagcatggaggagaagatggaagaaacaacagcggggccccccaccgggagaagagaggaggagaaacagatgagttcagcaatgtgagaagaggccggggccacaggatgcagcacctgtctgagggcaccaagggccggcaggtgggcagcggaggagatggagagcgctggggcagtgaccggggcagccggggcagcctgaatgagcagatcgccctggtgctgatgaggctgcaggaggacatgcagaatgtgctgcagaggctgcagaagctggagaccctgacagccctgcaggccaagagcagcaccagcaccctgcagacagccccccagcccaccagccagaggcccagctggtggccctttgagatgagccctggggtgctgacctttgccatcatctggcccttcatcgcccagtggctggtgtacctgtactaccagaggagaagaaggaagctgaactag

SEQ ID NO: 113686 - DNA, 1251 bp, Artificial Sequence
  derived and/or modified sequence
atgaccaaggaggaggccatgatcgcctacgtggaggagatgaagaaaattattgagaccatgcccatgaccgaaaaagtcgaggaactgttacgagtcatcgggccattttatgagatcgtggaggacaagaagtccggcagatcctctgatataacaagtgatctgggcaatgttcttacatccaccccaaacgccaagactgtaaatggcaaggctgagtcatcagacagtggcgccgagtcggaggaggaggaagctcaggaagaagtgaagggggcagagcagtctgacaatgataaaaagatgatgaaaaaatcggcagatcataaaaatttggaagtgatcgtgaccaatggctatgacaaagacggattcgtgcaagacatccagaacgatatccacgccagttcgagtctgaatggtaggagtacagaggaggtgaaacctattgatgagaatttgggccagacaggaaagtctgccgtttgcatacatcaggacatcaacgatgatcacgtggaagatgtgacaggtatccagcacctgaccagcgatagcgactcagaagtctactgcgactctatggaacaatttgggcaggaggagagccttgattcctttacaagcaacaatggcccgttccagtattacctcggggggcactctagccagcccatggaaaactccggattccgggaggatatccaggtcccacccggcaatggaaatatcggcaatatgcaggtggttgctgtggaggggaaaggcgaggtcaaacacggaggtgaagatgggcgcaataattcaggagctccccatcgggagaagcggggcggggagactgacgagttttctaacgtgcgacgagggcgcgggcacagaatgcagcatctgtccgagggaaccaagggtcggcaagtgggctctggaggcgatggtgaaagatgggggagcgatcggggatctagaggcagcctgaatgagcagatcgccctggtattgatgagactacaggaggacatgcagaatgtgttgcagcgactgcaaaaactagagactttgacagcactccaggcgaagtcctccacatcaactctgcagaccgcaccacaacccactagtcagcggccctcttggtggccttttgagatgagtccaggggtcttgacctttgcaattatctggcctttcatcgcccaatggctggtgtatttatattaccagaggcggcggaggaaattgaattag

SEQ ID NO: 113687 - DNA, 1251 bp, Artificial Sequence
  derived and/or modified sequence
atgacaaaggaggaggctatgatcgcttatgtggaggagatgaagaaaataatcgagacgatgccgatgaccgaaaaagtagaagagctcttaagagttatcggccctttttatgagattgtggaagataagaaaagcggccgaagctctgatattacatctgatctgggcaacgtgctcacctctacaccgaacgctaagacagtgaacgggaaggcagagtcgtcagactcaggagctgagtctgaggaagaagaggctcaggaggaagttaagggagctgaacagtctgataatgataaaaagatgatgaagaagtcagcagaccacaagaaccttgaggtaattgttaccaacggttatgataaagacggcttcgtccaggacatccagaacgacatccatgcctcctcaagtcttaacggacggtctactgaagaagttaagcccatagatgagaacttaggccagacgggaaagagtgccgtgtgtattcatcaggatattaacgacgaccatgtggaggatgtcacaggtattcagcacctcaccagcgacagcgattctgaggtgtattgcgacagcatggagcagtttggccaggaggagtctttggactcattcacatccaacaacggaccattccagtactatctaggtggccactctagccaacccatggagaacagcgggttcagggaagacatacaggtgcctccaggcaacggtaacatcgggaatatgcaggttgttgccgtagagggtaagggcgaggtgaaacatgggggtgaggatggtcggaacaactcaggggctccccacagggagaagaggggaggagagaccgacgagttcagcaacgtgcgtcgcggacgtggccaccggatgcagcacctgtccgaaggaacgaaaggcagacaggtgggctcaggcggagatggggagaggtggggctccgatcgcggaagtcgcggttctctcaacgagcagatcgctctggtgctaatgcgcctgcaggaggatatgcagaacgtcctgcagagactccagaaattggaaaccctaactgccttgcaggctaaaagcagcacctccacactgcagaccgcccctcagccaaccagtcagcggccatcttggtggcccttcgaaatgtctcccggagtacttacctttgctatcatctggcctttcatagctcaatggctggtctacctgtactatcagcgcaggcggcgaaaactcaactag

SEQ ID NO: 113688 - protein, 348 aa, Artificial Sequence
  derived and/or modified sequence
MTKEEAMIAYVEEMKKIIETMPMTEKVEELLRVIGPFYEIVEDKKSGRSSDITSDLGNVLTSTPNAKTVNGKAESSDSGAESEEEEAQEEVKGAEQSDNDINDDHVEDVTGIQHLTSDSDSEVYCDSMEQFGQEESLDSFTSNNGPFQYYLGGHSSQPMENSGFREDIQVPPGNGNIGNMQVVAVEGKGEVKHGGEDGRNNSGAPHREKRGGETDEFSNVRRGRGHRMQHLSEGTKGRQVGSGGDGERWGSDRGSRGSLNEQIALVLMRLQEDMQNVLQRLQKLETLTALQAKSSTSTLQTAPQPTSQRPSWWPFEMSPGVLTFAIIWPFIAQWLVYLYYQRRRRKLN

SEQ ID NO: 113689 - DNA, 1047 bp, Artificial Sequence
  derived and/or modified sequence
atgaccaaggaggaggccatgatcgcctacgtggaggagatgaagaagatcatcgagaccatgcccatgaccgagaaggtggaggagctgctgagagtgatcggccccttctacgagatcgtggaggacaagaagagcggcagaagcagcgacatcaccagcgacctgggcaacgtgctgaccagcacccccaacgccaagaccgtgaacggcaaggccgagagcagcgacagcggcgccgagagcgaggaggaggaggcccaggaggaggtgaagggcgccgagcagagcgacaacgacatcaacgacgaccacgtggaggacgtgaccggcatccagcacctgaccagcgacagcgacagcgaggtgtactgcgacagcatggagcagttcggccaggaggagagcctggacagcttcaccagcaacaacggccccttccagtactacctgggcggccacagcagccagcccatggagaacagcggcttcagagaggacatccaggtgccccccggcaacggcaacatcggcaacatgcaggtggtggccgtggagggcaagggcgaggtgaagcacggcggcgaggacggcagaaacaacagcggcgccccccacagagagaagagaggcggcgagaccgacgagttcagcaacgtgagaagaggcagaggccacagaatgcagcacctgagcgagggcaccaagggcagacaggtgggcagcggcggcgacggcgagagatggggcagcgacagaggcagcagaggcagcctgaacgagcagatcgccctggtgctgatgagactgcaggaggacatgcagaacgtgctgcagagactgcagaagctggagaccctgaccgccctgcaggccaagagcagcaccagcaccctgcagaccgccccccagcccaccagccagagacccagctggtggcccttcgagatgagccccggcgtgctgaccttcgccatcatctggcccttcatcgcccagtggctggtgtacctgtactaccagagaagaagaagaaagctgaactag

SEQ ID NO: 113690 - DNA, 1047 bp, Artificial Sequence
  derived and/or modified sequence
atgacgaaagaggaagctatgatagcctatgtggaagagatgaaaaaaataattgagacaatgcccatgaccgaaaaggttgaggaactgctgagggtaatcggccccttttatgagatcgtggaggataagaaaagtggacgaagtagcgacatcacgagtgacctcgggaacgttctgacttcgacacccaacgccaagacagttaacgggaaagcagagagctctgatagcggagccgaatccgaagaggaagaagcccaagaagaggtcaagggagcggaacagtccgataatgatatcaacgatgaccacgtggaggacgttacaggaattcagcatttgacctctgatagcgacagcgaggtatattgcgattcaatggagcagttcggtcaggaggagtctttagactcattcactagtaacaacggaccattccaatactacttggggggccattcctcccaaccaatggagaattccgggttcagggaggatatccaggtcccacccggaaacgggaatattggcaacatgcaagtggtggctgtagaagggaaaggcgaagttaagcatggaggtgaggatgggcggaataactctggcgctccgcatagggagaagcggggtggcgaaactgatgagtttagtaacgtgagacgtggaagaggacataggatgcagcacctgtctgaggggactaaaggtcggcaggtcgggtctggcggcgacggggaaaggtggggcagtgatcggggcagccgtggctcactgaatgaacagatcgccctggtgctcatgagactgcaggaggacatgcagaacgtactgcaaaggctgcaaaaattggagaccctcacagctttacaggccaaaagcagtacttctaccttacagactgcgcctcagcctacgagccagcggccgagttggtggccatttgagatgagtcctggagttctgacctttgcaatcatctggccattcatcgcccagtggttagtctacctgtactatcaacgacgacgtagaaaactcaactag

SEQ ID NO: 113691 - DNA, 1047 bp, Artificial Sequence
  derived and/or modified sequence
atgaccaaggaggaggccatgattgcctacgtggaggagatgaagaagatcatcgagaccatgcccatgacagagaaggtggaggagctgctgcgggtcatcggccccttctatgagatcgtggaggacaagaagagcggccgcagcagtgacatcaccagtgacctgggcaatgtgctgaccagcaccccaaatgccaagacagtgaatggcaaggccgagagcagtgacagcggggctgagagcgaggaggaggaggcccaggaggaggtgaagggagctgagcagagcgacaatgacatcaatgatgaccacgtggaggatgtgacaggcatccagcacctgaccagtgacagcgacagcgaggtgtactgtgacagcatggagcagtttggccaggaggagagcctggacagcttcaccagcaacaacggccccttccagtactacctgggcggccacagcagccagcccatggagaacagcggcttccgggaggacatccaggtgcccccaggaaatggaaatattggcaacatgcaggtggtggccgtggagggcaagggggaggtgaagcatggaggagaagatggaagaaacaacagcggggccccccaccgggagaagagaggaggagaaacagatgagttcagcaatgtgagaagaggccggggccacaggatgcagcacctgtctgagggcaccaagggccggcaggtgggcagcggaggagatggagagcgctggggcagtgaccggggcagccggggcagcctgaatgagcagatcgccctggtgctgatgaggctgcaggaggacatgcagaatgtgctgcagaggctgcagaagctggagaccctgacagccctgcaggccaagagcagcaccagcaccctgcagacagccccccagcccaccagccagaggcccagctggtggccctttgagatgagccctggggtgctgacctttgccatcatctggcccttcatcgcccagtggctggtgtacctgtactaccagaggagaagaaggaagctgaactag

SEQ ID NO: 113692 - DNA, 1047 bp, Artificial Sequence
  derived and/or modified sequence
atgaccaaggaggaggccatgatcgcctacgtggaggagatgaagaagattattgagacaatgccaatgacagagaaagtggaagaactgctgagggtgattggccccttctacgagatcgttgaggataaaaagagcgggaggtcctccgatataacatcagacctggggaacgtcctgacaagcacaccaaacgccaaaaccgtgaacggcaaagccgaaagcagcgattctggagccgagtccgaggaagaagaagctcaggaagaagtgaaaggtgccgagcagtctgacaacgacatcaatgacgatcatgtggaagatgtgactggaatacagcatttgacctctgatagtgatagcgaagtgtattgcgactcaatggagcaatttggccaggaagagtctctggactcctttactagcaataacgggccttttcagtactatttgggcgggcactctagccaacctatggaaaactctggattccgggaggatatccaggttccccctgggaacggcaacatcggcaatatgcaggttgttgccgtggaagggaaaggcgaggtcaagcacgggggagaggatgggagaaacaacagcggcgcaccgcaccgcgagaagagaggtggcgaaacagacgagttttcgaatgtcaggagaggtagaggccatcggatgcagcatctgtccgaagggaccaaagggagacaggtcggttctggcggcgacggcgagaggtgggggagcgatcgaggctccagaggatccctaaacgaacagatcgcactggtgctcatgcgtctgcaagaggatatgcagaacgtgctccagagattgcagaagttagaaacacttacggccctgcaagctaaatcttctacctcaaccctgcagaccgccccccagccaacctcccagagaccctcatggtggccgttcgagatgagccccggggtgctgactttcgccattatctggccgttcattgcccagtggctggtttatctgtattatcagagaaggcgacggaagttgaactag

SEQ ID NO: 113693 - DNA, 1047 bp, Artificial Sequence
  derived and/or modified sequence
atgaccaaagaagaagccatgatcgcctacgtcgaggaaatgaaaaagatcattgagaccatgcctatgacagagaaagtcgaggaactgctgcgcgtgatcggaccattttacgagatagtggaagataaaaaatcggggaggagctcggatatcactagtgacctcggaaatgtccttacttccacacctaacgcaaagaccgttaatggcaaggcagagagtagcgattctggagccgagagcgaggaagaagaagctcaagaagaagtaaagggggcagagcagagtgataatgatatcaatgacgatcacgtcgaggacgtcacagggattcaacatctgaccagcgacagtgactccgaagtgtattgtgactccatggaacagttcgggcaggaggaatcactcgacagctttacttctaacaatggccctttccagtattacctgggcggacacagcagccaacctatggagaacagtggcttccgtgaggacatacaagtgccccctggcaacggcaatatcggcaacatgcaggtggtggcagtagaagggaaaggcgaggtgaagcacgggggagaagatggcagaaacaactccggcgcacctcaccgagaaaagcgtggaggcgaaacagacgagttttcaaacgtacgccgaggacgtggtcatcgaatgcaacatctctccgaaggtacaaagggacggcaagtgggttccgggggtgatggagaaagatggggatcggaccggggttctcgtggatcattaaacgagcagattgctttggtgctgatgaggctacaagaagacatgcagaatgtgttacagcgattacagaaacttgaaaccctgaccgcactgcaagctaagagctccacaagtaccctccagactgcaccacagccaacatcacaacgccctagttggtggccatttgagatgtcaccaggggtgcttaccttcgcgataatctggcccttcatagctcaatggctggtgtatttgtactaccagagacggcgaagaaagctgaattag

SEQ ID NO: 113694 - protein, 62 aa, Artificial Sequence
  derived and/or modified sequence
MDPNCSCAAAGVSCTCAGSCKCKECKCTSCKKSCCSCCPVGCSKCAQGCVCKGASEKCSCCD

SEQ ID NO: 113695 - protein, 62 aa, Artificial Sequence
  derived and/or modified sequence
MDPNCSCAAAGVSCTCASSCKCKECKCTSCKKSCCSCCPVGCAKCAQGCICKGASEKCSCCA

SEQ ID NO: 113696 - DNA, 189 bp, Artificial Sequence
  derived and/or modified sequence
atggaccccaattgttcttgtgccgcagcaggcgtttcttgcacctgtgccggaagctgcaaatgcaaagagtgtaaatgcactagctgcaagaaaagttgctgcagctgttgccccgttggttgcagtaagtgcgctcagggatgtgtgtgtaaaggggcctccgagaagtgcagctgctgcgattag

SEQ ID NO: 113697 - DNA, 189 bp, Artificial Sequence
  derived and/or modified sequence
atggaccctaactgttcttgcgcggcagctggcgtgagctgcacatgcgcgagttcctgcaagtgcaaagaatgcaagtgcacctcttgcaaaaaaagttgctgctcttgttgcccagtcggctgcgccaaatgcgcccaaggctgtatttgtaagggagcctccgagaagtgttcatgctgcgcctag

SEQ ID NO: 113698 - DNA, 189 bp, Artificial Sequence
  derived and/or modified sequence
atggaccccaactgcagctgtgccgccgccggcgtgtcctgcacctgtgccggcagctgcaagtgcaaggagtgcaagtgcaccagctgcaagaagagctgctgcagctgctgccctgtgggctgcagcaaatgtgcccagggctgtgtgtgcaagggggccagcgagaagtgcagctgctgtgactag

SEQ ID NO: 113699 - DNA, 189 bp, Artificial Sequence
  derived and/or modified sequence
atggaccccaactgcagctgtgccgccgccggcgtgtcctgcacctgtgccagcagctgcaagtgcaaggagtgcaagtgcaccagctgcaagaagagctgctgcagctgctgccctgtgggctgtgccaagtgtgcccagggctgcatctgcaagggggccagcgagaagtgcagctgctgtgcctag

SEQ ID NO: 113700 - DNA, 443 bp, Artificial Sequence
  derived and/or modified sequence
gccccctcccctgactatcaaagcagcggccggctgttggggtccaccacgccttccacctgccccactgcttcttcgcttctctcttggaaagtccagtctctcctcggcttgcaatggaccccaactgctcctgcgccgctgcaggtgtctcctgcacctgcgctggttcctgcaagtgcaaagagtgcaaatgcacctcctgcaagaagagctgctgctcctgctgccccgtgggctgtagcaagtgtgcccagggctgtgtttgcaaaggggcgtcagagaagtgcagctgctgcgactgatgccaggacaacctttctcccagatgtaaacagagagacatgtacaaacctggattttttttttataccaccttgacccatttgctacattccttttcctgtgaaatatgtgagtgataattaaacactttagacctg

SEQ ID NO: 113701 - DNA, 405 bp, Artificial Sequence
  derived and/or modified sequence
actccgccttccacgtgcacccactgcctcttcccttctcgcttgggaactctagtctcgcctcgggttgcaatggaccccaactgctcctgtgccgctgcaggtgtctcctgcacctgcgccagctcctgcaagtgcaaagagtgcaaatgcacctcctgcaagaagagctgctgctcctgctgccctgtgggctgtgccaagtgtgcccagggctgcatctgcaaaggggcatcggagaagtgcagctgctgcgcctgatgtcgggacagccctgctcccaagtacaaatagagtgacccgtaaaatccaggattttttgttttttgctacaatcttgacccctttgctacattcctttttttctgtgaaatatgtgaataataattaaacacttagacttga

SEQ ID NO: 113702 - DNA, 189 bp, Artificial Sequence
  derived and/or modified sequence
atggaccccaactgcagctgcgccgccgccggcgtgagctgcacctgcgccgggtcctgcaagtgcaaggaatgtaaatgcactagttgtaagaaatcatgttgcagttgctgtcctgtggggtgtagtaagtgtgcccaggggtgcgtctgtaagggtgccagtgagaagtgttcctgttgcgactag

SEQ ID NO: 113703 - DNA, 189 bp, Artificial Sequence
  derived and/or modified sequence
atggaccccaactgcagctgcgccgccgccggcgtgagctgcacctgcgcgtcctcatgcaagtgcaaggagtgcaagtgcaccagttgcaagaaatcttgctgctcttgttgcccggtcggctgtgccaagtgtgcccagggctgcatttgcaagggtgcgtccgaaaaatgtagctgttgtgcatag

SEQ ID NO: 113704 - DNA, 189 bp, Artificial Sequence
  derived and/or modified sequence
atggacccaaattgtagttgcgccgcagccggtgttagttgtacttgcgcgggatcctgcaaatgcaaggaatgtaagtgcaccagctgtaagaaaagctgctgctcctgctgtcccgttggctgtagcaagtgcgctcaaggctgcgtgtgcaaaggggcaagtgagaaatgctcttgctgcgattag

SEQ ID NO: 113705 - DNA, 189 bp, Artificial Sequence
  derived and/or modified sequence
atggatcctaactgcagctgcgctgcagctggcgtgtcatgtacatgcgccagttcttgcaaatgcaaagaatgtaaatgtacatcctgtaagaagtcttgctgtagttgctgtcccgtgggatgtgccaagtgcgcgcaggggtgcatttgcaagggcgcttccgaaaaatgcagctgctgcgcttag

SEQ ID NO: 113706 - DNA, 189 bp, Artificial Sequence
  derived and/or modified sequence
atggaccccaactgcagctgcgccgccgccggcgtgagctgcacctgcgccggcagctgcaagtgcaaggagtgcaagtgcaccagctgcaagaagagctgctgcagctgctgccccgtgggctgcagcaagtgcgcccagggctgcgtgtgcaagggcgccagcgagaagtgcagctgctgcgactag

SEQ ID NO: 113707 - DNA, 189 bp, Artificial Sequence
  derived and/or modified sequence
atggaccccaactgcagctgcgccgccgccggcgtgagctgcacctgcgccagcagctgcaagtgcaaggagtgcaagtgcaccagctgcaagaagagctgctgcagctgctgccccgtgggctgcgccaagtgcgcccagggctgcatctgcaagggcgccagcgagaagtgcagctgctgcgcctag

SEQ ID NO: 113708 - protein, 409 aa, Artificial Sequence
  derived and/or modified sequence
MSSPGMTSLQLEKEECMQCVPCSPRTRVALLELYRAMCQGSVDILRLTLQGELTGDELEHIAQKAGRKTYAMVSSHSAGHSLASELVESHDGHEEIIKVYLKGRSGDKMIHEKNINQLKSEVQYIQEARNCLQKLREDISSKLDRNLGDSLHRQEIQVVLEKPNGFSQSPTALYSSPPEVDTCINEDVESLRKTVQDLLAKLQEAKRQHQSDCVAFEVTLSRYQREAEQSNVALQREEDRVEQKEAEVGELQRRLLGMETEHQALLAKVREGEVALEELRSNNADCQAEREKAATLEKEVAGLREKIHHLDDMLKSQQRKVRQMIEQLQNSKAVIQSKDATIQELKEKIAYLEAENLEMHDRMEHLIEKQISHGNFSTQARAKTENPGSIRISKPPSPKPMPVIRVVET

SEQ ID NO: 113709 - protein, 14 aa, Artificial Sequence
  derived and/or modified sequence
IAYLEAENLEMHDR

SEQ ID NO: 113710 - DNA, 1230 bp, Artificial Sequence
  derived and/or modified sequence
atgagcagccccggcatgaccagcctgcagctggagaaggaggagtgcatgcagtgcgtgccctgcagccccagaaccagagtggccctgctggagctgtacagagccatgtgccagggcagcgtggacatcctgagactgaccctgcagggcgagctgaccggcgacgagctggagcacatcgcccagaaggccggcagaaagacctacgccatggtgagcagccacagcgccggccacagcctggccagcgagctggtggagagccacgacggccacgaggagatcatcaaggtgtacctgaagggcagaagcggcgacaagatgatccacgagaagaacatcaaccagctgaagagcgaggtgcagtacatccaggaggccagaaactgcctgcagaagctgagagaggacatcagcagcaagctggacagaaacctgggcgacagcctgcacagacaggagatccaggtggtgctggagaagcccaacggcttcagccagagccccaccgccctgtacagcagcccccccgaggtggacacctgcatcaacgaggacgtggagagcctgagaaagaccgtgcaggacctgctggccaagctgcaggaggccaagagacagcaccagagcgactgcgtggccttcgaggtgaccctgagcagataccagagagaggccgagcagagcaacgtggccctgcagagagaggaggacagagtggagcagaaggaggccgaggtgggcgagctgcagagaagactgctgggcatggagaccgagcaccaggccctgctggccaaggtgagagagggcgaggtggccctggaggagctgagaagcaacaacgccgactgccaggccgagagagagaaggccgccaccctggagaaggaggtggccggcctgagagagaagatccaccacctggacgacatgctgaagagccagcagagaaaggtgagacagatgatcgagcagctgcagaacagcaaggccgtgatccagagcaaggacgccaccatccaggagctgaaggagaagatcgcctacctggaggccgagaacctggagatgcacgacagaatggagcacctgatcgagaagcagatcagccacggcaacttcagcacccaggccagagccaagaccgagaaccccggcagcatcagaatcagcaagccccccagccccaagcccatgcccgtgatcagagtggtggagacctag

SEQ ID NO: 113711 - DNA, 1230 bp, Artificial Sequence
  derived and/or modified sequence
atgtcttcccctggtatgacgtccctgcagctggagaaggaggaatgtatgcaatgtgtgccctgcagcccaagaacaagagttgctctgttggagttgtaccgcgcaatgtgccagggatctgttgacatcctaagactgactttgcaaggagaattgacgggagatgaactggaacacatcgcacagaaggccggacgcaagacgtatgctatggttagctcacacagtgctggccattcgcttgcgagtgagctggtcgaatcacacgatggccatgaggagataatcaaagtctaccttaagggccgcagcggcgataaaatgatccacgagaagaacatcaaccagctgaagtcagaggtccagtatatacaggaagcgcgcaactgtcttcagaagctgagagaggacatttcctcaaaactggatagaaatctcggagattctctgcatagacaagaaatacaagtcgttcttgaaaaacccaatggcttctctcagtcaccgactgccctttacagctctccacccgaggtggatacctgtattaacgaggatgtggagtctctaagaaaaaccgtgcaggatctgctagcgaaattacaagaagcgaagaggcagcaccagtccgactgcgtggccttcgaagtgacgctgtccaggtaccaacgtgaggccgagcagtctaacgtcgctctgcaacgggaagaagatagagtcgaacagaaggaagccgaggtcggcgagcttcaaagacggctcttgggcatggagacagaacatcaggctcttctggcaaaagtccgcgagggagaagtcgcactcgaagagttgcggtctaacaatgccgattgccaagccgagcgggagaaagccgctacactcgagaaggaggtcgctggactgcgagagaagatccaccacttagatgacatgctgaaaagtcaacaaaggaaggtccgccagatgattgagcagctccagaattcaaaagccgtgatccaaagcaaggacgcgaccatccaagaactgaaggaaaagatagcgtatttggaggcggagaaccttgaaatgcacgataggatggaacacctgatcgaaaaacagatcagtcatgggaattttagcactcaggccagggccaagaccgagaatcccggatctatccggatctccaaacctccttcacccaagccaatgcctgtcatccgggtcgtggagacatag

SEQ ID NO: 113712 - DNA, 1230 bp, Artificial Sequence
  derived and/or modified sequence
atgagcagccctggcatgaccagcctgcagctggagaaggaggagtgcatgcagtgtgtgccctgcagccccaggaccagggtggccctgctggagctgtaccgggccatgtgccagggctctgtggacatcctgcggctgaccctgcagggcgagctgactggagatgagctggagcacatcgcccagaaggccggcaggaagacctacgccatggtgagcagccacagcgctggccacagcctggccagcgagctggtggagagccatgatggccacgaggagatcatcaaggtgtacctgaagggccgcagcggggacaagatgattcatgagaagaacatcaaccagctgaagtctgaggtgcagtacatccaggaggccaggaactgcctgcagaagctgcgggaggacatcagcagcaagctggacaggaacctgggggacagcctgcaccggcaggagatccaggtggtgctggagaagcccaacggcttcagccagagccccacagccctgtacagcagccccccagaggtggacacctgcatcaatgaagatgtggagagcctgaggaagacagtgcaggacctgctggccaagctgcaggaggccaagaggcagcaccagagcgactgtgtggcctttgaggtgaccctgagccgctaccagcgggaggccgagcagagcaatgtggccctgcagcgggaggaggacagagtggagcagaaggaggccgaggtgggggagctgcagaggcggctgctgggcatggagacagagcaccaggccctgctggccaaggtgcgggagggggaggtggccctggaggagctgcggagcaacaatgctgactgccaggccgagcgggagaaggccgccaccctggagaaggaggtggccggcctgcgggagaagatccaccacctggatgacatgctgaagagccagcagaggaaggtgcggcagatgattgagcagctgcagaacagcaaggctgtgatccagagcaaggatgccaccatccaggagctgaaggagaagatcgcctacctggaggccgagaacctggagatgcatgacaggatggagcacctgattgagaagcagatcagccacggcaacttcagcacccaggcccgggccaagacagaaaatcctggcagcatccgcatcagcaagccacccagccccaagcccatgcctgtgatccgggtggtggagacctag

SEQ ID NO: 113713 - DNA, 1230 bp, Artificial Sequence
  derived and/or modified sequence
atgagcagccccggcatgaccagcctgcagctggagaaggaggagtgcatgcaatgtgtgccttgttcacctcggacaagagtcgctctgctggaattgtacagagccatgtgccagggcagcgtggatatcctaaggctgaccctccaaggcgagttgaccggggacgagcttgagcacatcgctcagaaagctggccggaagacttacgccatggtcagctctcatagcgcaggccacagcctcgccagcgaacttgtggagtcccacgacggacatgaggagataattaaggtctacctcaaaggccggagcggcgacaagatgattcatgagaagaacattaaccagctgaagagcgaagttcagtacatccaagaggcgcgcaattgtttgcagaaactgcgcgaagatatctcaagcaaattagacagaaacctgggtgactccctccataggcaggaaattcaggtcgtgctcgaaaagccaaacgggttttctcagtctcccaccgcgctgtactcctcacccccagaggtagatacctgcataaacgaggatgtggagtcactgcgcaagactgtgcaggacctcttggcaaaattacaggaagccaagcgccagcatcaaagtgattgcgttgctttcgaggtgactctttccaggtaccaacgggaggcagaacagtctaatgtcgcacttcagagagaggaggacagggtcgagcagaaagaagcagaagtgggcgaattacaacgccgactcttagggatggaaaccgagcaccaggctctcctggccaaagtcagggagggtgaggtggcattggaagagctgaggtcaaacaacgctgactgccaggccgaacgggagaaagccgccacacttgagaaggaggtggctggtcttcgggaaaaaatacaccaccttgatgatatgcttaagtcacagcagagaaaagtgcggcagatgatcgaacagctgcagaatagtaaagcggtcatccagtctaaagatgctactatccaggagcttaaagagaagattgcgtacctggaagctgagaatttggaaatgcatgacaggatggagcacttgatcgaaaagcagatcagtcacgggaactttagtacccaggccagggcaaagacggaaaatcccggctccattaggatttcaaaacccccatctcccaagcccatgccagtcattcgcgtggttgagacttag

SEQ ID NO: 113714 - DNA, 1230 bp, Artificial Sequence
  derived and/or modified sequence
atgtcttcacccggaatgactagcctgcagcttgaaaaggaggaatgtatgcagtgcgtgccctgctccccaaggaccagagtcgctctgctggaactgtatcgggctatgtgtcaaggaagcgtggacatcctacggctaaccctgcagggggaactcactggagatgaactggagcacatcgcacagaaggctggacgcaagacttacgcgatggtatcctcccactctgctggacattctctggcaagcgagctggtcgaaagtcatgacggccatgaagagattataaaagtttatctcaaaggtagatctggggacaagatgatccatgaaaaaaacattaaccagctaaagtcagaagtgcaatatattcaggaggccaggaactgtttgcagaagcttcgcgaggacataagcagtaagcttgatcggaatctaggggatagcctccacagacaggaaatccaggtggtcctcgagaaacccaatgggttctcacagtctcccaccgcgctctattctagcccacctgaggtggacacttgtatcaacgaagacgttgaatccctgcggaagactgtgcaggacctcctggcaaaactgcaagaagcaaagagacaacaccagagtgactgcgtggcgttcgaggttactctgtcaagataccaacgtgaggcggaacaaagcaatgtggccctccagcgagaggaagatcgtgtggagcagaaagaagcagaagtgggcgagctgcagcgacgactgctggggatggagactgagcatcaagcacttttagcaaaggtccgagagggagaggtcgctctggaggagctgcggagtaataatgccgattgtcaggccgaacgcgagaaagccgcaactctggagaaagaagtggccggattgcgcgaaaagatccaccatcttgatgacatgctgaaatctcagcagcgaaaagtgcggcagatgattgagcagctccagaacagcaaagccgtgattcagtccaaagatgcgactatccaggagctgaaggaaaagatcgcatacctggaggcagaaaatctcgaaatgcacgataggatggaacacttgattgaaaagcagatttctcacggcaactttagtactcaggcgcgtgctaaaaccgagaatccaggaagtatacgaatatccaaacccccatcccctaagccaatgcccgtcatcagggtggttgagacctag

SEQ ID NO: 113715 - DNA, 1230 bp, Artificial Sequence
  derived and/or modified sequence
atgagttccccaggtatgacgagcttgcagctggaaaaggaagagtgcatgcagtgcgtaccttgctcccctagaacccgagtggccttattggaactgtatagggccatgtgtcaggggtcggttgacattttaaggttgactttacagggggaactgactggcgacgagttagaacatattgcacagaaggctgggagaaagacatacgcaatggtgtccagtcattccgccggacattctctggcgtctgagctggtagaaagccacgatgggcacgaggaaataattaaggtctatctgaagggaaggagcggcgacaaaatgatacacgagaaaaatatcaatcaattgaagagcgaagtgcaatacatccaggaggctcgaaactgcttgcagaaacttagagaagacatctcctcaaagctagaccgtaacttaggtgattcccttcacagacaagagatccaagttgtgctggaaaaacccaacggctttagccagagccccaccgcactgtatagctctccccccgaggttgacacctgtatcaatgaggacgtggagagtctgagaaagaccgtgcaggacctgctagccaaacttcaagaggcaaaacgtcaacaccaatcagactgcgtggctttcgaggttaccttatcaagataccagcgggaagcagagcagtccaacgtggccttgcaacgggaagaagatcgagtagaacagaaagaagctgaggttggcgagctgcaaagacggctcctgggaatggagaccgagcatcaggctctactagctaaagtaagggagggtgaagtggctctggaggagttgaggtctaacaatgccgattgccaagcggagagggaaaaggctgctactctggaaaaagaagtagcagggttgagggaaaaaatccaccacctcgatgatatgctgaaaagccaacagcgaaaggtgagacagatgattgagcagctgcagaattccaaagccgtgatccagtctaaggacgctactatacaggagttgaaggagaaaatcgcttacttggaagccgagaacctggagatgcatgaccggatggagcacctaatcgaaaaacagatcagtcatggtaacttcagcacacaggcccgggcaaaaaccgaaaatcccggctcaatccgcatttctaagcccccatcgccaaagccaatgcccgtgatcagggtcgttgagacatag

SEQ ID NO: 113716 - DNA, 1230 bp, Artificial Sequence
  derived and/or modified sequence
atgagctctcccggaatgacttctctgcagctggaaaaggaggaatgtatgcagtgcgtgccatgttcaccacgcaccagggtagctctactggaactgtacagggccatgtgccaaggctctgttgatatacttcgcctgacactgcagggtgaactaacaggagacgaactagaacacatcgcacagaaagcgggtcgaaaaacgtacgctatggtcagctcccacagcgccggccactccctggcaagcgagttagtggaatcacatgatggacacgaggagataataaaagtgtatctaaaggggcgctccggcgataagatgatacatgagaagaacattaaccagctgaaatccgaggtacaatacatccaggaagctaggaattgcttgcaaaaactgcgggaagatatctcctccaagcttgatagaaatctgggtgattccctgcatagacaagaaatacaagttgtgttggagaaacctaacggcttctctcagtctccaaccgccctatactcttccccccccgaggtggacacgtgcattaatgaggacgtcgagagtttgagaaaaactgtccaggatctgttggccaagctacaggaagcaaaacgacagcaccaatcagattgtgtggcatttgaagtgacattatctcgttatcagagagaggccgaacagtctaatgtggcgctgcagagagaggaggatagggtggaacagaaggaggcagaggtcggagaactccagcgccgactcttgggaatggagaccgaacatcaagcactgttggctaaagtaagagaaggagaggtcgcgcttgaagagttgcggtctaacaacgccgactgtcaggccgaacgggagaaggctgccacactggagaaggaagtagcaggtttacgcgagaagatacaccacttagacgatatgttgaaaagccagcagaggaaggtcagacaaatgatcgaacaattgcagaattccaaggccgttatccagtcaaaggatgcgacaattcaggaactaaaggagaagatagcatacctagaggccgagaacctggaaatgcatgacagaatggagcatttaattgagaagcaaattagtcacggcaattttagcacacaggccagagctaaaaccgaaaacccaggatccatccggatttctaagccccccagtccaaaaccaatgccagtgatacgtgtagttgaaacctag

SEQ ID NO: 113717 - DNA, 1767 bp, Artificial Sequence
  derived and/or modified sequence
agttggagccagacagcggggtggacaagtggcgtgtgtgctgcgaccccgagggaagatgaacgggacgcggaactggtgtaccctggtggacgtgcacccagaggaccaggcggcggagcagaaattctggattgaggatgagcagtccaggaatgacctctctacaactagagaaagaagaatgcatgcaatgtgttccctgtagtccaagaaccagggtagccctgctggagctctacagagccatgtgccagggcagcgtggacattctcaggctgactctccagggtgaactgacaggagatgaacttgaacacatagcccagaaggcgggcaggaagacctatgccatggtgtccagccactcagctggtcattctctggcttcagaactggtggagtcccatgatggacatgaggagatcattaaggtgtacttgaaggggaggtctggagacaagatgattcacgagaagaatattaaccagctgaagagtgaggtccagtacatccaggaggccaggaactgcctacagaagctccgggaggatataagtagcaagcttgacaggaacctaggagattctctccatcgacaggagatacaggtggtgctagaaaagccaaatggctttagtcagagtcccacagccctgtacagcagcccacctgaggtggacacctgtataaatgaggatgttgagagcttgaggaagacggtgcaggacttgctggccaagcttcaggaggccaagcggcaacaccagtcagactgtgtggcttttgaggtcacactcagccggtaccagagggaagcagaacaaagtaatgtggcccttcagagagaggaggacagagtggagcagaaagaggcagaagtcggagagctgcagaggcgcttgctagggatggagacggagcatcaggccttactggcgaaagtgagggaaggggaggtggccctagaggaacttcggagcaacaatgctgactgccaagcagaacgagaaaaggctgctaccctggaaaaggaagtggccgggttgcgggagaagatccaccacttggatgacatgctcaagagccagcagcggaaagtccggcaaatgatagagcagctccagaattcaaaagctgtgatccagtcaaaggacgccaccatccaggagctcaaggagaaaatcgcctatctggaggcagagaatttagagatgcatgaccggatggaacacctgatagaaaaacaaatcagtcatggcaacttcagcacccaggcccgggccaagacagagaacccgggcagtattaggatatccaagccgcctagcccgaagcccatgcctgtcatccgagtggtggaaacctgagctgcctggagatggttgctgccattgctgctgcctctgcctcggagaagcccactgcccctgttggctgttaacactgcctttgacttcctgactgtcccctggctgcacccaggacttcgggctcctgtgtctcaccattcccaagcccctggccactctaagctgggcagacggagcacgagcacctattcaaggcactgcagccctttggaagacattgtcctgcaagcaggagccagggcaatatctatattcctacagtgactatttttctctgtagagagcctcccttctgttgtagactggactctggctgtgccataagccaggccttcatcagattgggagaggtgacaagatttgcctcagccctaaaagctggagacacagatgt

SEQ ID NO: 113718 - RNA, 1230 nt, Artificial Sequence
  derived and/or modified sequence
augaguuccccagguaugacgagcuugcagcuggaaaaggaagagugcaugcagugcguaccuugcuccccuagaacccgaguggccuuauuggaacuguauagggccaugugucaggggucgguugacauuuuaagguugacuuuacagggggaacugacuggcgacgaguuagaacauauugcacagaaggcugggagaaagacauacgcaaugguguccagucauuccgccggacauucucuggcgucugagcugguagaaagccacgaugggcacgaggaaauaauuaaggucuaucugaagggaaggagcggcgacaaaaugauacacgagaaaaauaucaaucaauugaagagcgaagugcaauacauccaggaggcucgaaacugcuugcagaaacuuagagaagacaucuccucaaagcuagaccguaacuuaggugauucccuucacagacaagagauccaaguugugcuggaaaaacccaacggcuuuagccagagccccaccgcacuguauagcucuccccccgagguugacaccuguaucaaugaggacguggagagucugagaaagaccgugcaggaccugcuagccaaacuucaagaggcaaaacgucaacaccaaucagacugcguggcuuucgagguuaccuuaucaagauaccagcgggaagcagagcaguccaacguggccuugcaacgggaagaagaucgaguagaacagaaagaagcugagguuggcgagcugcaaagacggcuccugggaauggagaccgagcaucaggcucuacuagcuaaaguaagggagggugaaguggcucuggaggaguugaggucuaacaaugccgauugccaagcggagagggaaaaggcugcuacucuggaaaaagaaguagcaggguugagggaaaaaauccaccaccucgaugauaugcugaaaagccaacagcgaaaggugagacagaugauugagcagcugcagaauuccaaagccgugauccagucuaaggacgcuacuauacaggaguugaaggagaaaaucgcuuacuuggaagccgagaaccuggagaugcaugaccggauggagcaccuaaucgaaaaacagaucagucaugguaacuucagcacacaggcccgggcaaaaaccgaaaaucccggcucaauccgcauuucuaagcccccaucgccaaagccaaugcccgugaucagggucguugagacauag

SEQ ID NO: 113719 - RNA, 1230 nt, Artificial Sequence
  derived and/or modified sequence
augagcucucccggaaugacuucucugcagcuggaaaaggaggaauguaugcagugcgugccauguucaccacgcaccaggguagcucuacuggaacuguacagggccaugugccaaggcucuguugauauacuucgccugacacugcagggugaacuaacaggagacgaacuagaacacaucgcacagaaagcgggucgaaaaacguacgcuauggucagcucccacagcgccggccacucccuggcaagcgaguuaguggaaucacaugauggacacgaggagauaauaaaaguguaucuaaaggggcgcuccggcgauaagaugauacaugagaagaacauuaaccagcugaaauccgagguacaauacauccaggaagcuaggaauugcuugcaaaaacugcgggaagauaucuccuccaagcuugauagaaaucugggugauucccugcauagacaagaaauacaaguuguguuggagaaaccuaacggcuucucucagucuccaaccgcccuauacucuuccccccccgagguggacacgugcauuaaugaggacgucgagaguuugagaaaaacuguccaggaucuguuggccaagcuacaggaagcaaaacgacagcaccaaucagauuguguggcauuugaagugacauuaucucguuaucagagagaggccgaacagucuaauguggcgcugcagagagaggaggauaggguggaacagaaggaggcagaggucggagaacuccagcgccgacucuugggaauggagaccgaacaucaagcacuguuggcuaaaguaagagaaggagaggucgcgcuugaagaguugcggucuaacaacgccgacugucaggccgaacgggagaaggcugccacacuggagaaggaaguagcagguuuacgcgagaagauacaccacuuagacgauauguugaaaagccagcagaggaaggucagacaaaugaucgaacaauugcagaauuccaaggccguuauccagucaaaggaugcgacaauucaggaacuaaaggagaagauagcauaccuagaggccgagaaccuggaaaugcaugacagaauggagcauuuaauugagaagcaaauuagucacggcaauuuuagcacacaggccagagcuaaaaccgaaaacccaggauccauccggauuucuaagccccccaguccaaaaccaaugccagugauacguguaguugaaaccuag

SEQ ID NO: 113720 - protein, 3801 aa, Artificial Sequence
  derived and/or modified sequence
MSTDSNSLAREFLTDVNRLCNAVVQRVEAREEEEEETHMATLGQYLVHGRGFLLLTKLNSIIDQALTCREELLTLLLSLLPLVWKIPVQEEKATDFNLPLSADIILTKEKNSSSQRSTQEKLHLEGSALSSQVSAKVNVFRKSRRQRKITHRYSVRDARKTQLSTSDSEANSDEKGIAMNKHRRPHLLHHFLTSFPKQDHPKAKLDRLATKEQTPPDAMALENSREIIPRQGSNTDILSEPAALSVISNMNNSPFDLCHVLLSLLEKVCKFDVTLNHNSPLAASVVPTLTEFLAGFGDCCSLSDNLESRVVSAGWTEEPVALIQRMLFRTVLHLLSVDVSTAEMMPENLRKNLTELLRAALKIRICLEKQPDPFAPRQKKTLQEVQEDFVFSKYRHRALLLPELLEGVLQILICCLQSAASNPFYFSQAMDLVQEFIQHHGFNLFETAVLQMEWLVLRDGVPPEASEHLKALINSVMKIMSTVKKVKSEQLHHSMCTRKRHRRCEYSHFMHHHRDLSGLLVSAFKNQVSKNPFEETADGDVYYPERCCCIAVCAHQCLRLLQQASLSSTCVQILSGVHNIGICCCMDPKSVIIPLLHAFKLPALKNFQQHILNILNKLILDQLGGAEISPKIKKAACNICTVDSDQLAQLEETLQGNLCDAELSSSLSSPSYRFQGILPSSGSEDLLWKWDALKAYQNFVFEEDRLHSIQIANHICNLIQKGNIVVQWKLYNYIFNPVLQRGVELAHHCQHLSVTSAQSHVCSHHNQCLPQDVLQIYVKTLPILLKSRVIRDLFLSCNGVSQIIELNCLNGIRSHSLKAFETLIISLGEQQKDASVPDIDGIDIEQKELSSVHVGTSFHHQQAYSDSPQSLSKFYAGLKEAYPKRRKTVNQDVHINTINLFLCVAFLCVSKEAESDRESANDSEDTSGYDSTASEPLSHMLPCISLESLVLPSPEHMHQAADIWSMCRWIYMLSSVFQKQFYRLGGFRVCHKLIFMIIQKLFRSHKEEQGKKEGDTSVNENQDLNRISQPKRTMKEDLLSLAIKSDPIPSELGSLKKSADSLGKLELQHISSINVEEVSATEAAPEEAKLFTSQESETSLQSIRLLEALLAICLHGARTSQQKMELELPNQNLSVESILFEMRDHLSQSKVIETQLAKPLFDALLRVALGNYSADFEHNDAMTEKSHQSAEELSSQPGDFSEEAEDSQCCSFKLLVEEEGYEADSESNPEDGETQDDGVDLKSETEGFSASSSPNDLLENLTQGEIIYPEICMLELNLLSASKAKLDVLAHVFESFLKIIRQKEKNVFLLMQQGTVKNLLGGFLSILTQDDSDFQACQRVLVDLLVSLMSSRTCSEELTLLLRIFLEKSPCTKILLLGILKIIESDTTMSPSQYLTFPLLHAPNLSNGVSSQKYPGILNSKAMGLLRRARVSRSKKEADRESFPHRLLSSWHIAPVHLPLLGQNCWPHLSEGFSVSLWFNVECIHEAESTTEKGKKIKKRNKSLILPDSSFDGTESDRPEGAEYINPGERLIEEGCIHIISLGSKALMIQVWADPHNATLIFRVCMDSNDDMKAVLLAQVESQENIFLPSKWQHLVLTYLQQPQGKRRIHGKISIWVSGQRKPDVTLDFMLPRKTSLSSDSNKTFCMIGHCLSSQEEFLQLAGKWDLGNLLLFNGAKVGSQEAFYLYACGPNHTSVMPCKYGKPVNDYSKYINKEILRCEQIRELFMTKKDVDIGLLIESLSVVYTTYCPAQYTIYEPVIRLKGQMKTQLSQRPFSSKEVQSILLEPHHLKNLQPTEYKTIQGILHEIGGTGIFVFLFARVVELSSCEETQALALRVILSLIKYNQQRVHELENCNGLSMIHQVLIKQKCIVGFYILKTLLEGCCGEDIIYMNENGEFKLDVDSNAIIQDVKLLEELLLDWKIWSKAEQGVWETLLAALEVLIRADHHQQMFNIKQLLKAQVVHHFLLTCQVLQEYKEGQLTPMPREVCRSFVKIIAEVLGSPPDLELLTIIFNFLLAVHPPTNTYVCHNPTNFYFSLHIDGKIFQEKVRSIMYLRHSSSGGRSLMSPGFMVISPSGFTASPYEGENSSNIIPQQMAAHMLRSRSLPAFPTSSLLTQSQKLTGSLGCSIDRLQNIADTYVATQSKKQNSLGSSDTLKKGKEDAFISSCESAKTVCEMEAVLSAQVSVSDVPKGVLGFPVVKADHKQLGAEPRSEDDSPGDESCPRRPDYLKGLASFQRSHSTIASLGLAFPSQNGSAAVGRWPSLVDRNTDDWENFAYSLGYEPNYNRTASAHSVTEDCLVPICCGLYELLSGVLLILPDVLLEDVMDKLIQADTLLVLVNHPSPAIQQGVIKLLDAYFARASKEQKDKFLKNRGFSLLANQLYLHRGTQELLECFIEMFFGRHIGLDEEFDLEDVRNMGLFQKWSVIPILGLIETSLYDNILLHNALLLLLQILNSCSKVADMLLDNGLLYVLCNTVAALNGLEKNIPMSEYKLLACDIQQLFIAVTIHACSSSGSQYFRVIEDLIVMLGYLQNSKNKRTQNMAVALQLRVLQAAMEFIRTTANHDSENLTDSLQSPSAPHHAVVQKRKSIAGPRKFPLAQTESLLMKMRSVANDELHVMMQRRMSQENPSQATETELAQRLQRLTVLAVNRIIYQEFNSDIIDILRTPENVTQSKTSVFQTEISEENIHHEQSSVFNPFQKEIFTYLVEGFKVSIGSSKASGSKQQWTKILWSCKETFRMQLGRLLVHILSPAHAAQERKQIFEIVHEPNHQEILRDCLSPSLQHGAKLVLYLSELIHNHQGELTEEELGTAELLMNALKLCGHKCIPPSASTKADLIKMIKEEQKKYETEEGVNKAAWQKTVNNNQQSLFQRLDSKSKDISKIAADITQAVSLSQGNERKKVIQHIRGMYKVDLSASRHWQELIQQLTHDRAVWYDPIYYPTSWQLDPTEGPNRERRRLQRCYLTIPNKYLLRDRQKSEDVVKPPLSYLFEDKTHSSFSSTVKDKAASESIRVNRRCISVAPSRETAGELLLGKCGMYFVEDNASDTVESSSLQGELEPASFSWTYEEIKEVHKRWWQLRDNAVEIFLTNGRTLLLAFDNTKVRDDVYHNILTNNLPNLLEYGNITALTNLWYTGQITNFEYLTHLNKHAGRSFNDLMQYPVFPFILADYVSETLDLNDLLIYRNLSKPIAVQYKEKEDRYVDTYKYLEEEYRKGAREDDPMPPVQPYHYGSHYSNSGTVLHFLVRMPPFTKMFLAYQDQSFDIPDRTFHSTNTTWRLSSFESMTDVKELIPEFFYLPEFLVNREGFDFGVRQNGERVNHVNLPPWARNDPRLFILIHRQALESDYVSQNICQWIDLVFGYKQKGKASVQAINVFHPATYFGMDVSAVEDPVQRRALETMIKTYGQTPRQLFHMAHVSRPGAKLNIEGELPAAVGLLVQFAFRETREQVKEITYPSPLSWIKGLKWGEYVGSPSAPVPVVCFSQPHGERFGSLQALPTRAICGLSRNFCLLMTYSKEQGVRSMNSTDIQWSAILSWGYADNILRLKSKQSEPPVNFIQSSQQYQVTSCAWVPDSCQLFTGSKCGVITAYTNRFTSSTPSEIEMETQIHLYGHTEEITSLFVCKPYSILISVSRDGTCIIWDLNRLCYVQSLAGHKSPVTAVSASETSGDIATVCDSAGGGSDLRLWTVNGDLVGHVHCREIICSVAFSNQPEGVSINVIAGGLENGIVRLWSTWDLKPVREITFPKSNKPIISLTFSCDGHHLYTANSDGTVIAWCRKDQQRLKQPMFYSFLSSYAAG

SEQ ID NO: 113721 - DNA, 11406 bp, Artificial Sequence
  derived and/or modified sequence
atgtcaactgacagcaactcactagctagggagtttctcaccgatgtgaaccggctttgcaatgccgtggtgcagagggttgaggcccgagaggaggaggaggaagaaacccatatggccacccttggccaatacctagttcacgggcggggttttttgcttttgaccaagttaaactccattattgatcaggcacttacgtgtagagaggagttacttaccctgctgctgtccctcttgccactggtttggaaaatccccgttcaggaagagaaagctaccgactttaacctccctctctcagccgacataattttgacaaaagagaagaattcaagtagtcagagatcaacacaggagaaactccaccttgagggctccgctctgtcaagtcaggtttcagccaaggtgaatgtgtttcggaagtccagaaggcagcggaaaataacacatcgctactcagttcgagacgcccggaagactcagctgtccacttcagatagtgaggccaactcagacgaaaagggtatagctatgaataaacatagacgacctcacctactccaccattttttgacctcctttcccaagcaggaccaccccaaggccaagctcgatcggcttgctacgaaggaacagacacctcctgacgccatggccctggaaaattcgcgcgagattatcccccgccagggcagcaatactgatattctctccgaacccgcagccctgagcgtgatcagtaacatgaacaactcccccttcgacctgtgccacgtgctgttatccctgctggaaaaagtttgtaagtttgatgtgacattgaatcacaacagcccactggcggctagtgtggtccctacgctgacagaatttttggcaggattcggggactgttgttccctgtccgataacctcgaaagtcgtgtcgtgagtgccggctggactgaagaaccagtcgcactgattcagagaatgctctttcgcaccgtgcttcacctgctgtcagtcgacgtatcaaccgccgaaatgatgcccgagaacctgcgaaaaaatctgactgaactcctccgagctgccctgaaaattagaatctgcctagaaaaacaaccggacccctttgctccacgtcagaagaaaactctacaagaagtccaggaggactttgtcttttctaagtataggcaccgtgccctcctgttacccgagctgttggaaggagtgctgcagatcttaatttgttgcttgcagagcgccgcgagcaaccccttctacttctcccaggcgatggacttggtgcaagaattcattcagcaccacggctttaatctgtttgagaccgctgttctccagatggagtggctggttctgcgggatggagtgcccccagaagcttccgaacacctcaaggctctgatcaattcggtcatgaaaatcatgtctacagtaaaaaaggttaaaagcgaacagctgcatcatagcatgtgcaccaggaaaagacaccgaaggtgtgagtattcccactttatgcatcaccaccgagatctctccggactgttggtctctgccttcaaaaatcaggtgagtaaaaatccatttgaggaaacagccgacggagatgtatactaccccgagcgatgctgctgcattgccgtctgtgcccatcaatgtctgaggctactgcagcaggcaagcctatcttcaacctgcgtgcagattctctctggtgtgcataatataggtatctgttgctgtatggaccccaagtccgtaatcataccccttctacacgcttttaaactccccgccctgaagaacttccagcagcatatactgaatatcctgaataaactgattctggaccagctgggaggtgcagagataagcccaaaaatcaagaaggcggcgtgcaacatttgtaccgtggacagcgatcagcttgcacagctcgaggagactctgcagggcaacctatgcgacgccgaactcagtagttctctctcctctcctagttacaggtttcagggtattttgcctagttccgggtcagaagatctgctgtggaaatgggatgcactcaaagcttaccagaacttcgtcttcgaggaggatcgcctgcattcaattcagatagcaaaccatatctgtaatttaatccagaagggcaatatcgttgttcagtggaagctgtataactatatattcaacccggtgctccagaggggcgtggaattagcacaccactgtcaacacctctccgtgacctccgcccagtcacatgtgtgcagtcatcacaaccagtgtctgccacaggatgtgctgcaaatttacgtgaagaccctccccatacttctcaagagtagggtcattcgagacctcttcttaagttgtaatggcgtaagtcagatcattgaactgaactgccttaatggcattcgcagtcattccctgaaggcatttgagactctcattataagcttaggggaacagcagaaggatgcctcagtgcccgacatagatggcatcgacatcgaacaaaaagagttgtcaagcgtgcacgtcgggacaagcttccaccaccagcaagcctacagcgactctccacagagcctttctaagttttacgccggtttgaaagaagcctacccgaaaaggcgtaaaaccgttaatcaggacgtgcacatcaacaccattaacttattcctgtgcgtggcctttctgtgtgtcagtaaggaggccgaatcagaccgagagagcgccaatgactccgaagataccagcggatacgattctactgccagtgagcccctctctcatatgttgccatgcatttctttagaatcactggtcctgcctagcccagagcacatgcaccaggccgccgacatttggtccatgtgccgctggatttacatgttgtcttcagtctttcagaagcaattttaccgcctgggcgggttcagggtgtgccacaaattgattttcatgatcatccagaaactcttcaggagccacaaagaggagcagggaaagaaggagggtgacacctcagtgaacgagaatcaggacctgaatagaatctcccagccaaagaggacaatgaaagaggatctgctcagcctggcaatcaaatctgacccgatcccttcagaactcggatccttaaaaaagtcagcagattcactggggaagctggaactgcagcacatttcctccatcaatgttgaggaggtgagtgccactgaagcagcccctgaggaggctaaactcttcacgtctcaggaatcagagacctcactgcagtccatccgattgctcgaggccttgttagcaatctgtctgcacggcgcgcgtacgagtcaacagaagatggaacttgagctgcccaaccagaatctcagtgtagagtcgatactctttgaaatgagggaccacctgtcccaatctaaggttatcgaaacacagctagcgaagcccctgttcgatgccctgctccgcgtcgccctaggcaattacagcgctgactttgagcacaacgatgcgatgactgagaaatcccaccagtccgcagaggagctgagcagccaacccggcgatttcagcgaggaggctgaggattcccagtgttgttcttttaaattgttagtggaggaagaaggatatgaagcagattccgaaagtaatcctgaggacggggagacccaggacgacggcgtggacctcaaaagcgaaactgaaggattctctgctagctcctctcctaatgacctgctagagaatctcacccagggagaaatcatataccccgagatctgtatgcttgagcttaacctgctgagcgcgagtaaagcaaagcttgacgtgcttgctcatgtatttgaatcatttctcaaaataatcagacagaaagaaaagaacgtgtttttgcttatgcaacagggaaccgtaaaaaatcttcttggtggatttctgagcatcctcacgcaggatgattccgacttccaagcttgtcagagggttctcgtggaccttctcgtgtctttgatgtccagtagaacatgtagcgaagaactgactctacttctgcgcatctttctagagaaatccccctgcaccaagatactgctgctgggcattctgaagatcatcgaatctgacacaactatgtcccccagccagtacctgaccttcccactgctgcatgcgccaaacctgagtaatggcgtttccagccagaaatatcctggcattctgaactccaaagccatgggcctgctacggcgggctagggtgtctaggtctaaaaaggaggcagacagagagtccttccctcatcggctgttatcctcatggcacattgcccctgtgcaccttccacttcttggacagaattgctggcctcacctgtcagaagggtttagcgtgtctctgtggtttaatgtcgaatgcatccacgaagccgaaagtactacagaaaaagggaagaagataaaaaagcgcaataaaagcctgattctccccgattcatcgtttgacggtacggaatccgacaggcctgaaggagccgagtacataaaccccggagaaagattaatagaagaaggctgcatacacatcatctccctgggcagcaaggcactgatgattcaggtgtgggccgacccccataacgccactctcatattccgagtctgcatggactctaacgacgatatgaaagcagtgcttctggctcaggtggagtcacaggaaaatatatttctgccttcaaagtggcagcatttagtgctcacttacttacaacagcctcagggaaaaagacggattcacggtaagatttccatctgggtctcgggccagaggaagcctgatgtgactttggacttcatgctgcccagaaaaacgtcattgtctagcgatagcaataaaacgttttgtatgatcgggcattgcctcagttcgcaggaggagtttttacagctcgcaggcaaatgggacttgggaaacctgctcctgtttaacggagcgaaggtgggcagccaagaggccttctacctgtacgcctgtggtccaaaccacactagtgtgatgccctgtaagtatgggaagcccgtcaacgattacagtaagtacatcaacaaagaaatactccgctgtgaacagatcagggagctctttatgacaaaaaaggatgtcgacattggtcttctgattgagtccctttcggttgtctacaccacctactgtcccgctcaatataccatctacgaaccagttattcgattaaagggccagatgaaaacacaacttagccagcgtcccttctcttcgaaggaggtgcagtctatcctgcttgaacctcatcacctgaaaaaccttcagccaaccgaatacaaaacaatccagggaatcttacacgagattggcggaaccggcatcttcgttttcctcttcgctcgagtcgtggagctgagctcatgtgaagaaacccaggcgctggctctcagagtgatcctgtctttaattaagtacaaccagcaaagggtacacgaactagagaactgcaatggactatcgatgattcatcaagtgctcataaagcagaagtgcatcgtagggttctacatattaaaaacgctcctcgaaggctgctgcggcgaagatatcatttacatgaatgagaacggagaatttaagctggacgtagacagtaacgccatcatccaggatgtcaaactgctggaggagctgcttctcgactggaagatatggtctaaagctgagcagggtgtgtgggaaactctccttgcggctctggaagtgttgatccgggccgaccaccaccaacaaatgtttaatatcaagcagttgctgaaggctcaagtggtgcatcactttctgctcacctgccaagtgttgcaggagtacaaggaaggtcagcttacgcctatgcctagggaggtgtgccgctcctttgtcaaaatcattgcggaagtccttggatctccgccagatctggaattgctgacgataatcttcaactttctgctggctgtgcaccctcctacaaatacctatgtttgccacaacccaacgaacttctatttttccttgcatatagatggaaaaatatttcaggaaaaggtgcgtagtatcatgtatttgcgacattcaagttcgggcgggaggtcactcatgagtcccggtttcatggtgataagcccctctggcttcacagcctcgccttatgaaggcgagaacagctccaatattattccccagcagatggctgcccatatgttacgcagcaggtccctccccgcctttccgactagcagcctgttgacccagtcccagaaattgacgggatccttgggctgcagcatcgaccgactgcaaaacattgctgatacctacgtggcgacccagagtaagaaacagaacagtctcggcagcagtgataccttaaaaaaaggaaaggaagacgctttcattagttcttgcgagagcgccaagacggtttgcgaaatggaggctgtcctatcagcacaggtgagcgtcagtgatgtgccgaaaggcgtgctaggcttcccagttgtgaaagccgaccacaagcaacttggagctgaaccacgctccgaggacgactcccccggcgatgagtcctgtcctcgaaggcccgactacctgaaaggactcgcgtcctttcagaggagccactccaccatagctagtctgggcctcgccttcccctctcagaacggaagcgccgcggtgggtaggtggccgtcgctagtggaccgcaacaccgatgattgggaaaacttcgcatactccctgggatatgaacccaattacaaccgcaccgcttcagcacacagtgtcactgaggactgcctcgtcccaatctgctgtggactttacgagctgctatcaggggtgttactaatcctccccgatgttctgttggaggacgtcatggacaaactgatccaggcagataccttactggtcctcgtaaaccacccctcacccgcgatccagcagggtgtcattaagctgctggacgcctactttgctagggcttcaaaggagcagaaagacaagttcttgaaaaatagagggttttctctgctggccaaccaactttatctccatcggggcactcaggaattattggagtgcttcatcgaaatgttttttgggcgacatataggcctcgacgaagaattcgacctcgaggacgtcaggaatatgggactcttccagaagtggagcgtcattccaattttgggcttgatagaaaccagcttatatgataacattctgttacacaatgcacttctgctgctgctgcagatactgaacagctgcagtaaggtggctgatatgttgttagacaatgggctcctctatgtcctgtgcaacacagtggcagcattaaacggcctggaaaagaacatccccatgagtgagtataagctactggcttgcgacatccagcagctttttattgctgtgacgattcatgcatgctcatccagcggcagccaatacttccgcgttatcgaagatctaatcgtgatgctgggttacctgcagaattctaagaacaagaggacacagaacatggctgtggcgcttcaactgagagttctacaagctgcaatggagttcatacgcacaactgccaatcacgattcggagaacttaacagatagtttgcagagtccatcggctccgcatcatgccgttgtgcaaaagcggaaatccattgcgggcccccgcaaatttcctctcgcacagactgagtccctcctcatgaaaatgcgctctgttgccaatgacgaactgcatgtaatgatgcagaggcgcatgtcccaggagaatccctctcaggccacagagactgagctcgcccagcgtctgcagaggttgacagtgctcgccgtgaaccgtatcatttaccaagaattcaactcggacatcattgatatactgcggactccagagaatgtaacccaaagtaaaacatctgtgttccaaacagaaatctccgaggagaatattcaccacgaacaaagctctgtatttaacccctttcagaaagagatcttcacttacctcgtggagggatttaaggtgtctattggctcctcaaaggctagcggaagcaagcagcaatggaccaagattctctggtcatgtaaagaaacattccgcatgcaactgggaagactcctagttcacattctgtcgcctgcccatgcggcacaggagaggaaacagatcttcgagatcgttcatgaaccaaatcaccaggagatactaagggactgtctgagtcccagcctgcagcatggggccaagctggtgctgtacttatccgagcttatccacaatcaccagggtgagctgaccgaggaggagcttggcaccgcggaactccttatgaacgctctgaaactgtgcgggcacaagtgtatcccaccatctgcatcgacaaaggcggacctgattaagatgattaaggaagagcagaaaaagtacgaaactgaagaaggtgtaaataaggcggcgtggcaaaaaaccgttaataacaaccagcagagtctttttcaaaggttagatagtaaatctaaggacatttccaagatcgcagccgatattacccaggccgtttcactcagccaaggcaacgagcgtaagaaagtgatccagcatatacggggtatgtacaaagtggatctcagcgcctcgcggcactggcaggaactcatccaacagctgactcacgacagggcagtttggtacgatcccatatattatcccacctcctggcaactggatccgaccgaaggcccgaatagagagcgccggaggctacagcggtgctacctgaccatccccaacaaatacctgctcagggacagacagaaatctgaagatgtggtaaagccacctctgtcttatctgtttgaggacaagacgcactcaagcttctcatccaccgtcaaagataaggccgcttctgaatcaatcagggttaacagaaggtgtatcagtgtggcaccatcaagggagacagccggggaacttctacttgggaaatgcgggatgtacttcgttgaggacaatgcttctgacactgttgaatcctccagcctgcagggtgagttggaacctgcttctttcagctggacttacgaggagatcaaggaggtgcataaacggtggtggcagctgagagacaacgcagttgagatttttttgactaacgggcgcaccctgttgcttgcttttgacaatacaaaggtacgggacgatgtgtatcacaatatcctgacaaataacctgccaaatttgctcgagtatgggaacattaccgcactgacgaacctgtggtatacaggacagatcactaacttcgaatatcttacgcaccttaacaagcacgctgggagaagctttaacgatctcatgcagtacccagtctttcccttcatactggctgactacgtctcagagacgctggatctgaacgatctgttaatttataggaatctcagtaagcctattgccgtccagtacaaggagaaagaagatcggtacgtcgacacatataagtatctggaggaagagtaccggaaaggggcacgcgaggacgaccctatgccaccggtgcaaccctaccactacggaagccattactcaaatagcgggactgtgcttcactttctggtccggatgccacctttcactaaaatgttcttggcataccaggatcagtctttcgacattcccgaccgcacatttcacagcacgaatacgacatggagactgagctctttcgaaagcatgacagacgtaaaggagctcataccagagtttttctacctgcctgagtttctcgtgaatcgggaaggattcgactttggtgtgagacagaatggggaacgcgtgaatcatgtaaacctccccccatgggcaagaaacgaccctagactcttcatattgatacaccgacaggccctggagtccgactacgtgtctcaaaatatctgtcagtggattgatttagtcttcggctataagcagaaaggaaaagcctccgtgcaggctatcaacgtattccacccagccacatacttcgggatggatgtgagtgcagttgaggacccagtccaacgccgcgcgcttgaaaccatgatcaagacttatggacagaccccccggcaattgttccatatggctcacgtaagcaggcccggcgcaaagctcaatattgagggggagcttcctgccgctgtaggcctcttggttcagttcgcctttcgggagacaagagaacaagtcaaggaaatcacgtatccgtcgccacttagctggatcaagggccttaagtggggagaatacgtggggagtccatcggccccggtcccggttgtttgctttagccagccacatggagaacgcttcgggagcctccaggctctgccgacacgagctatctgcggtctgtcccgtaacttttgtctgctcatgacttattctaaggaacaaggcgtgcgcagcatgaatagtaccgatatacaatggagtgcaattctgtcttggggctatgcggataatatcttacgattgaaaagcaaacagtccgagcctcctgtgaacttcatccagtcttctcaacagtaccaagtgacttcctgcgcatgggtgcccgactcctgccaattgttcactgggtctaagtgcggagtgattacggcttatacgaacaggttcaccagtagtaccccctcggaaattgaaatggagactcagatccacctgtatggtcacacagaggagatcacttcgctattcgtgtgcaagccatattctattctgatctccgtctcgcgagacgggacttgtattatttgggatttaaaccgcctgtgctatgttcaatccctcgctggccacaagtctccagtcacggctgttagcgccagcgagacttccggagatattgcgaccgtctgcgactctgcgggtggaggatctgacctacgcttgtggactgtgaacggggacttggtaggtcacgtgcattgccgcgagatcatttgtagcgtggccttttctaatcaacccgaaggcgtgtccattaatgtgatcgcaggcgggctagagaatggtatagtcaggctgtggtctacgtgggaccttaaacctgtgcgggaaataaccttcccaaaatctaacaagccaatcatctccctgaccttcagctgcgatgggcaccatctgtatacagctaacagtgacggaaccgtgattgcctggtgtcgaaaggaccagcagagactgaaacaacctatgttctacagcttccttagctcatacgccgccggatag

SEQ ID NO: 113722 - DNA, 11406 bp, Artificial Sequence
  derived and/or modified sequence
atgagtactgactctaattctctggcccgtgaatttttaacagatgtaaatagactctgtaacgcagtggtccagcgagtggaggctagagaggaagaggaggaggagacacacatggctaccctaggtcagtacctcgttcacgggcgcggctttctgctgctgactaagctcaatagtattatcgaccaggctttgacatgtcgggaggagttgctgacccttctgctgtcactgctgccgctcgtgtggaaaatcccagtccaggaagagaaggccaccgactttaatcttcccctgagcgccgacattatcttgactaaagagaaaaatagtagttcacagagatccacgcaagagaagctgcatttagaagggtccgcactgagctctcaagtatctgccaaagtgaacgtgttcaggaagtccaggaggcagcggaagattacacataggtattctgtccgcgatgctcggaaaacacaactctccacaagcgactccgaggcaaactccgacgagaaggggatcgccatgaacaagcacaggagaccgcacctcttacaccactttcttacttcgtttccaaagcaggatcaccctaaggccaaattggacagactcgccacaaaagaacaaaccccacccgacgctatggccctagagaatagtagagagattatccccagacagggctctaataccgacattcttagtgagccagcagcactttccgtcatctcaaatatgaacaattctccattcgatctttgccacgtgcttttgtccttactcgagaaggtgtgtaagttcgacgtgactctgaatcataacagccccctcgctgcttcagtggtgcctaccctaaccgagtttctcgctggttttggtgactgttgttccctgagcgataacctggagtctagggtggtttccgcaggctggactgaggaacccgttgctcttatccagcgtatgcttttcaggacagtgctccacttgctgtctgtagatgtgtcaacggccgaaatgatgccagagaatctgcgtaaaaatttaaccgaactactccgcgctgctttgaaaatccgcatttgcttggagaagcaacctgatccctttgctcccaggcaaaagaaaactcttcaggaagtccaggaagacttcgtattctccaagtaccgccatagggcattgctgctcccagagctcctggagggtgtgctccaaatactgatctgttgtctgcagtctgccgcttccaaccccttctatttctctcaggctatggatttggtacaggaattcatacagcaccatggattcaacctgttcgaaaccgctgtcctgcaaatggagtggctcgtgcttcgcgacggtgtgccccctgaggcatccgagcatctgaaagccctgattaacagcgtcatgaagatcatgtccactgtgaagaaagtcaaatctgaacagcttcatcacagtatgtgcacgcgcaagcggcatcgtagatgtgagtacagccattttatgcatcaccatcgggacctctctggcttactggtgtccgcatttaaaaatcaggtctctaaaaacccctttgaggagactgcggatggagacgtctactatcccgagcgctgttgctgtatagctgtttgtgctcaccagtgcctgaggctgctccagcaagcgagcctgagctcaacatgtgtgcaaatcctgagcggggtgcataatatcggcatatgctgctgcatggatcctaagtctgtgatcatacccctgctccacgctttcaaacttcccgccctgaagaattttcaacagcatattctgaatatactgaacaagcttatcctagatcagttgggaggagcagaaatctccccaaagataaagaaggctgcctgtaacatatgtacagtggattcagaccagttggcccagcttgaggagacactccaggggaacctttgcgacgctgaactgagctcttctctgtcttccccatcttatagatttcagggtatcctcccgtctagcggcagcgaggatttgttgtggaaatgggacgccctgaaagcctatcaaaatttcgtgtttgaagaggaccggcttcacagcattcagatcgcgaaccatatctgtaacctcattcaaaaaggaaacatcgtggtgcaatggaagctctacaattatatttttaatcctgttctgcagcggggcgtggagctggctcaccactgccaacatctgagcgtaacgtccgcccagagtcacgtgtgctcccaccataaccagtgtctaccacaggacgttcttcaaatctatgttaaaacattgcccatcttactgaaatcacgcgtgattagggacctgttcctatcatgcaatggtgtgtctcagatcatcgagctcaattgcttgaacggcatcagatcacattctctgaaggcgtttgagaccctcatcattagcttaggcgaacagcagaaggacgccagtgtcccagacatcgatggcatcgacattgaacagaaagaactgtcttctgtgcacgtcgggacttcgtttcaccatcaacaggcttactccgattcccctcagagccttagcaaattctacgcagggttaaaagaggcttatcctaagaggagaaagaccgtgaaccaggacgttcatatcaacaccattaacctgtttctttgcgtggcatttctgtgcgtcagtaaggaggccgaaagtgaccgtgaaagcgctaatgatagtgaggatacctccgggtacgattctacagcatccgagcccctcagccacatgctgccatgcattagcctagagtcactagtccttccttctccagaacatatgcaccaggcagccgatatttggtcgatgtgtcggtggatttatatgctgtccagcgtgttccaaaagcaattttaccggctgggaggctttcgggtttgccacaaactcatattcatgattatccaaaaattgttcagatcccacaaggaagaacagggcaaaaaggaaggagacacttctgtgaacgagaaccaggacctgaatagaatctcgcagcccaaacggacaatgaaggaggacttactgtctctcgctatcaagtcagaccctatcccctccgagttgggatcattgaagaagagtgcagacagccttggcaaactggagctccagcatatctcgtccattaatgtggaagaagtcagcgcgaccgaagctgcccctgaagaagccaaactgttcacaagccaggagagtgaaacctccctccagagcattcgcttgcttgaagcgctgctggccatttgccttcacggcgctaggacgtctcagcagaaaatggaattggagctgcccaatcagaacctgagcgtggagagtatcctttttgagatgagagaccacttatcacagagcaaggtgatcgaaactcagctggctaaacccctattcgacgcccttctacgagtcgccttggggaactattccgctgattttgaacacaacgatgccatgaccgaaaagtcccaccagagtgctgaggagctcagttcacagccaggtgacttctccgaggaggctgaggatagccaatgttgctcctttaaattgctcgtcgaagaggagggctatgaggccgattctgaaagcaatccagaggacggtgagacccaagacgacggggtggatctgaagtcagaaaccgagggctttagcgcttctagcagtcccaacgacctgctggaaaatctgacccagggcgaaataatttaccctgagatttgtatgctggaactgaatctgttgagcgccagcaaggccaagttggatgtgctggctcacgtcttcgaaagctttttgaaaataataagacagaaagagaaaaacgtcttcctgctcatgcagcagggcactgttaagaatctgttaggagggttcctgagcatcttgacacaagacgatagtgattttcaagcttgtcagcgggtgctggtagacctgcttgtgtcattgatgagttcccgaacctgcagcgaggagttgaccttactgttgcgaatcttcttagaaaagagcccgtgtacaaaaatcctgttattaggcatactgaagattatagagagcgataccacgatgtccccaagtcaatacctgacttttcccctcctgcatgccccaaacctgtctaacggcgtgtcctctcaaaagtatcccggaattttaaattctaaggccatggggctgctacgcagggccagggtgtcacgttctaaaaaagaagcggatagagagtccttccctcaccgcctacttagcagctggcacatcgcacctgtacatttaccactgctgggccagaattgttggccccatctttccgaggggttttccgtctccctttggtttaacgttgagtgcatacacgaggctgaaagcaccacagagaaagggaagaaaatcaagaaacgtaataagtccctgatactgcctgatagctcatttgatgggacggaatctgatcgcccggagggggccgaatatatcaatcccggagagcgtttgatcgaggagggatgcatccacattatctccctcggatctaaagccctcatgatccaggtgtgggcggatccccacaacgctactctgattttccgtgtgtgcatggattcaaatgatgatatgaaggctgtgctactggcccaggttgaaagtcaggagaacatcttcttaccgtccaaatggcagcatctggtgctcacctatctccagcagccccagggaaagcggcgaattcacggcaaaattagcatctgggtttcgggtcagcgaaagcctgatgtgaccctggatttcatgctgcccagaaagactagcctgtcctctgacagcaataaaaccttctgcatgattggccactgcctgtcgtctcaggaggaatttctgcagctggcgggcaagtgggacctcggaaacctgcttctctttaatggagctaaggttggcagccaggaagccttttatctttatgcctgcggcccgaatcatacttcagtgatgccgtgcaagtatgggaaacctgtcaacgattactctaagtatataaacaaagaaattctcaggtgcgagcagatcagggagttattcatgactaagaaagacgtcgatatcggactgctgattgagtccctttccgtcgtatatactacatattgtcctgctcagtatacaatttacgaacccgtgatccggctaaagggacagatgaagacccagctcagtcaacgtcccttttcctctaaagaggtccaaagcatcctgcttgaaccacaccatctgaagaatttgcagcctacagagtataaaactatccagggcattttgcatgaaattggcgggacaggcatcttcgtcttcctctttgcacgggtagtggagctgagttcctgtgaggagacccaggcccttgctctccgtgtgattttatctctgattaagtacaaccagcagcgcgttcacgaacttgaaaactgcaatggcctatctatgattcaccaagttctgataaaacagaaatgcattgttgggttttacattctgaaaaccttgctggagggatgctgtggagaggatatcatttatatgaatgaaaatggggagttcaagctggatgtggacagcaacgcaataatacaggatgtgaaattgctggaggaactgctgttggactggaaaatctggtcaaaagcagaacaaggggtctgggaaacactcctggcagccttggaagtcctcattcgtgctgaccaccaccagcagatgttcaacataaagcagctgttaaaggcccaggtggtgcatcacttcctgctaacctgccaagtactgcaggagtacaaagagggccagttgacgcccatgcccagggaggtgtgtaggtccttcgtaaaaattatcgctgaggttctgggtagcccacctgatctggagctgctgacaatcatctttaactttcttcttgccgtgcaccctcctaccaatacatatgtgtgccacaatcccacgaacttctatttttcactgcatattgacggcaaaatcttccaggaaaaggtcaggtccatcatgtaccttaggcactcttcttcaggtggtagatcactgatgagcccgggatttatggtaatcagtccctctgggtttaccgcgagtccctacgaaggcgagaacagcagtaatatcattccccagcagatggccgcgcatatgctgcgctccaggagtttgccagcattccccacttcatccctgctcacccagagccaaaaactgactgggtctctcggctgctcaattgaccggctccagaacatcgcagacacgtacgtcgcgacccagagcaagaaacagaactcgctcgggtcatccgataccctgaaaaagggaaaggaagacgcttttatctcctcatgtgaaagtgccaagacagtctgtgagatggaggcggtgctctcagctcaagtttccgtgtcagatgtcccgaaaggggtgctcggcttccctgtggtgaaggccgaccataaacagctgggcgccgagccaaggtcagaagacgatagccctggggacgaatcctgcccccgcaggccagactacctgaagggtcttgcctcctttcaacgttcccattcaaccatcgcctctttgggcctggcattccctagtcagaatgggtcggccgctgtgggaaggtggccatccctggttgatcgcaacaccgacgactgggagaatttcgcttattctctgggctacgaaccgaactataatcggacagcttctgcacatagcgtgaccgaagattgtctcgttcccatttgttgcggtttgtacgagctgctatccggggtgctcctcatcctgccggacgtattacttgaggacgttatggataagttaatccaggccgatacccttttggtcctcgtgaatcacccaagcccagcgatccagcaaggcgtcataaagttgctggacgcctacttcgccagagccagcaaagaacaaaaagacaaattcctgaagaatcgtggctttagtttgctggcaaatcagttatacctccatcgcggcacccaagagctgcttgagtgcttcattgagatgttttttggccggcacattggcctagatgaggagttcgacctggaagatgtgcgcaatatgggacttttccagaaatggagcgttatccctatcctgggactgattgaaacttccctgtatgacaatatcctgttgcataatgcactcctcctgctcctgcaaatactgaattcttgttcaaaggtcgccgacatgttgttggacaatgggctgctctatgtcctgtgtaatactgtagccgccctaaacgggctggaaaaaaacattcccatgtcagagtataaactgctggcttgcgacattcagcaactgtttatcgctgtcacaatccacgcatgcagcagttctggttctcaatactttagggtgatagaagacctcatcgttatgcttggctatctgcagaattccaagaataagcggacccagaacatggcggtggcgctgcagctaagggtcttgcaagccgcgatggaattcatccgaaccacagccaatcacgactccgagaaccttacagactctctacagtccccttccgccccgcaccatgcagtggtccagaaacgcaagtccattgccggtccccggaagtttcctctagcccaaaccgagtccctgttgatgaaaatgcgtagcgtggcaaatgacgagctgcacgtcatgatgcagcgccgaatgagccaggaaaacccttcccaagccaccgaaacagagctcgcacaaaggctacagagattgactgtgctggctgtgaacaggatcatttatcaggagtttaacagcgacatcatcgatatcctgcgcactcctgaaaacgtgacacagagtaagacatccgtctttcagacggagatatcagaggaaaatatccaccacgagcagtcctctgtcttcaatccttttcaaaaagagatttttacctacttggtagagggcttcaaagtcagcattggtagcagcaaagcctccggctctaagcagcaatggacgaagatcctgtggtcctgtaaagagacattccgaatgcagttgggcaggctgctggttcacattctgtcgccggcccacgccgcgcaggagcggaagcagattttcgagattgtccatgaacctaatcaccaggagattctccgagactgtctatctccgtcccttcaacatggtgccaagctggtgctgtatctcagtgaactgattcataaccaccagggcgaactcaccgaggaggagttgggaacagctgaactgctgatgaatgcactgaaactctgtggacacaagtgcattcctcctagcgcttctacgaaagccgatctgattaagatgatcaaggaggagcaaaagaaatatgagactgaggagggtgtcaataaggctgcctggcagaaaaccgtgaacaacaatcaacagagtctctttcagcggttagattcaaagtctaaagatatcagcaaaatcgcggccgatattacccaggccgtaagcttaagccaggggaatgagcgcaaaaaggttatccagcacattcgcggaatgtataaggttgatctctctgctagtcgacactggcaagaactgattcagcagctcacccatgatagagccgtttggtacgatcctatctactatccgactagttggcagttagaccccaccgaaggacccaacagggagagaaggagactgcagcgctgctacctcactatcccaaataagtaccttttgagagatcgccagaaaagcgaggacgtcgtcaaacctcccctgagctaccttttcgaggataagacacattccagcttttctagcaccgtgaaggataaagcggcctccgagtcgattcgggtgaaccggcggtgtatctccgtggcaccctccagagagaccgctggcgagttacttctgggtaagtgtggtatgtacttcgtagaagacaacgcatcagatacagtggagtcatcctcactacagggagaactcgagccagcttcattttcatggacctacgaagaaatcaaggaagttcataagagatggtggcagttaagagacaacgccgttgaaattttccttactaatgggaggactctgctcctggcctttgacaacactaaagtacgggatgatgtgtaccacaacatcctgactaacaatctgcctaacctgctcgaatacggaaatataactgccctcaccaacctgtggtatactggtcagatcactaattttgagtacctgacccaccttaacaaacatgctgggagaagcttcaacgacctgatgcagtatccagtttttccattcatcctggctgactacgtgagcgagacgctggatctgaatgatctgctcatatataggaacctgagcaagccgattgctgttcagtacaaagaaaaagaggacaggtacgtggacacctataagtatctggaggaggaatataggaagggagcgcgggaagatgatcctatgccccctgttcagccttatcactacgggagccattacagcaacagcggcactgtgctccactttctggtgagaatgccgcccttcaccaaaatgtttttggcctaccaagaccagtcattcgacatacccgatcggactttccactcgaccaatacaacttggcggctgagtagcttcgaaagcatgaccgacgtcaaggagcttattccagagttcttttatcttcctgagtttctggtgaatcgagaaggcttcgactttggcgtccgacagaatggggagagggtcaatcatgtgaatttaccaccttgggctagaaacgatcccagactcttcatactcatccaccggcaggccctcgagagcgactacgtgagccagaacatctgccagtggattgatttggtctttggatacaaacagaaaggaaaggcatccgtgcaggccatcaacgtgttccacccggctacttactttgggatggatgtgtctgctgtggaggatccggtccaaagaagggcattagaaactatgattaaaacctacgggcaaaccccacggcaactcttccacatggcacatgttagccgacccggggcaaaactgaatatcgagggggaactacccgccgccgtgggcttactcgtgcagttcgcctttcgggagacccgagagcaggtgaaggagattacttacccatcccctttgtcttggatcaagggactcaagtggggggaatacgtggggtcgcccagcgcgcccgtgccagtcgtgtgtttttcacaaccacatggggagagatttggatcactgcaggcattgccaaccagggcaatatgtggacttagcaggaatttttgtctcctgatgacttattcaaaggaacagggtgttcggtccatgaattccaccgatatccaatggtcagccatcctctcgtggggatatgcagacaacatcctccggctaaagtcgaagcagtcagaacccccggtgaatttcatacaatcgtcccagcagtatcaagtcacttcctgtgcctgggtgcccgactcgtgccagcttttcaccggcagcaagtgcggggtcatcaccgcatatactaacaggttcacgtcttctaccccgtctgagattgaaatggagacacagatccatctatacgggcatactgaagagatcacatctctcttcgtgtgtaaaccttacagcattctaatcagcgtgtcaagagatggcacctgtattatctgggatctgaatagactctgttatgtgcaatcccttgctgggcacaagagtcccgttactgctgttagcgccagcgaaacctccggagacattgccaccgtgtgcgatagcgcaggaggaggcagcgacctccggttgtggacagttaacggggacctggtcggtcacgtccactgtcgggaaattatatgtagcgtggcttttagcaaccagccagaaggtgtcagcatcaacgtcatcgccggaggcctggagaacggtatagtacggctgtggtcaacgtgggacttaaaaccggtgagggaaatcactttccccaagagtaataagccgatcatttctcttacattctcatgcgatggccatcacctttatacagcaaatagtgacggcacagtgattgcctggtgcaggaaagaccagcagcgcctcaagcagcctatgttctattccttcctgtctagctatgccgcaggatag

SEQ ID NO: 113723 - DNA, 4149 bp, Artificial Sequence
  derived and/or modified sequence
atgagtacagactccaactccttagctagggagttcctgaccgatgtaaaccggctctgtaacgctgtagtccaaagggtggaggccagggaggaagaggaggaagagacacacatggccacattggggcagtatctggtgcacgggcgtggctttctgcttctcaccaaactaaatagtatcattgaccaggcactcacttgccgagaagaactcctcaccctcctgttatccctgctgccgttagtgtggaaaatcccggtgcaggaggagaaggcaactgattttaacctgccactgtccgcagatatcatcctcactaaagaaaaaaactcctcttcccagcgctctacccaggaaaagctgcaccttgagggatcagccctgtctagccaggtgagcgccaaagttaacgtcttccggaaatcaaggagacagaggaaaatcacccatagatacagcgtcagagacgcccgtaagacacagctgtcgacttccgattcagaagccaatagcgacgagaagggcattgccatgaataaacaccggcgccctcaccttctccatcatttcttgacctccttccccaagcaggatcatccaaaggccaagctcgaccggttggctactaaagagcagaccccgccagatgcaatggcccttgaaaattcacgagagatcattccgcggcaaggctctaacaccgacatactctctgaacctgctgctctgtcagtcatctctaacatgaataactccccgtttgacctgtgccatgtgctcctaagcttactcgaaaaagtgtgcaaattcgatgtgacgttgaatcacaactcaccattggcagcctctgtggtgcctacgctgaccgaatttctggccggttttggagattgctgcagtttatctgacaatcttgagagccgcgtggtgtctgccggatggaccgaggaacccgtagctctgatccaacgcatgttgttcagaacagtattgcacctcctgtccgtcgatgtcagcacggcggaaatgatgcccgagaacttgagaaaaaatctcacagagctcttgagggccgctctgaaaataagaatttgtttggagaagcagcctgacccgtttgcgcccaggcagaaaaaaactttgcaggaggtccaggaggatttcgttttctccaagtaccgtcatcgcgcgcttctgttgccagagctgctagagggggttttacagatcctgatctgctgcctacagtccgcagcctccaatccattctacttctctcaggcaatggaccttgttcaggaatttatccagcaccacggttttaacctcttcgagaccgctgtcctgcagatggagtggcttgtgctgcgggacggagtgcctcctgaagcctccgagcatctgaaggctttgatcaacagtgttatgaagatcatgtcgacagttaagaaggttaagtctgaacagctgcaccatagcatgtgcactcggaaaaggcaccgcaggtgcgagtactcccacttcatgcaccatcaccgcgatctgtccgggttattagtgagcgcattcaagaatcaggtgagcaaaaatcccttcgaagagacagcggacggcgatgtctactatcctgagagatgctgttgcatagccgtctgcgcccaccagtgcctcagactcctccagcaagcttctctctcctcgacgtgtgtgcagatcctctcaggcgtgcacaatatcggcatatgttgctgcatggatcccaagtcagttatcatcccccttctgcacgccttcaagctgcctgctcttaagaactttcagcagcacatcctcaatattctcaacaaactgatcttggatcagttgggaggtgccgagatcagtccaaagatcaaaaaagcagcctgtaatatctgcaccgttgattccgaccagctggcccagttggaagaaactctacagggcaacctctgcgacgctgagctgtcttcaagcctgtcaagccctagttatagattccaggggatcctgcccagctccggaagcgaggatctgctctggaagtgggatgcacttaaggcttaccagaatttcgtcttcgaagaggacaggctgcacagtatacagattgccaatcacatctgcaatcttatccagaaggggaacatcgttgttcagtggaaactgtataactatatctttaacccagtgctgcagcgcggcgtggaactggctcaccattgtcagcacctgagtgtaacctcggcgcagtcgcatgtgtgcagccaccacaaccagtgtctcccgcaggatgtgcttcaaatttatgtgaaaacactccccatcctccttaaatcacgtgtcatccgtgatctcttcctttcatgtaatggagtgagtcagatcattgaattaaactgcctgaatggcattagatcccacagtctcaaggcatttgaaactctgatcatatctctgggtgagcagcagaaggacgcctctgtgccagacatcgacgggattgacattgagcagaaggaactctccagcgtacatgtgggcacatcatttcaccatcaacaggcgtacagcgactcccctcaaagcctctcaaaattctacgctgggctcaaggaggcctatccaaagcggagaaaaacagtaaatcaggacgtgcatatcaacaccattaatctgtttctgtgcgtcgcatttttatgtgtctctaaagaggcggaatctgatcgagaaagcgctaatgactccgaggatacatccggctatgattccacagccagcgagccactgagccatatgctaccatgcatctccctggaaagcttggttctcccatcgcccgaacacatgcaccaggctgccgatatctggagcatgtgcagatggatttatatgctatcctccgtattccagaaacagttctatcgattgggtggctttagggtctgtcataaactgatattcatgatcattcagaagctgtttagatcacataaggaggagcagggtaaaaaagagggtgacacctccgtgaacgaaaaccaggacctgaataggatttcacaacccaagaggactatgaaagaggacttgttgtccctggccattaaaagcgatcctattccatccgagctgggctccctgaaaaaatccgcggattcactcggaaagctggagctgcagcatattagctccatcaatgtagaggaggtctccgcaacagaagcagcacctgaggaggcgaagctgtttactagtcaggaaagtgagactagcttacagtcaattagactgttagaggcactgttagctatttgtttgcacggagccaggacctctcagcagaaaatggagttggaactacctaaccagaacttgtcggtcgagagcatcctgtttgagatgcgggatcacctgtcccagtccaaggtcatagaaactcagctggccaagccactgttcgacgccctgctgagggtcgcgcttggcaactattcggcggatttcgagcacaacgatgctatgacagaaaaatctcaccagtcagccgaggaactcagcagccagcccggcgactttagcgaggaggcagaggactctcagtgttgttcatttaagctgctggtggaagaagaagggtacgaagcagatagcgagtcgaaccccgaggacggcgagacacaggatgatggagtggacctcaagagtgaaaccgaaggattttctgccagctcatcccctaacgatctgcttgagaatctaacacagggggaaattatctatcccgaaatttgcatgctggagctgaacctgttaagtgcaagtaaggccaagttagacgtcctggcacatgtgttcgaatcattccttaaaataatcaggcagaaagagaaaaatgtattcctgttaatgcaacaagggacagttaaaaatctgctcggagggttcctctccatcctgacccaggatgatagtgatttccaagcttgtcaaagagtgctggtggacctgctggtgagcttaatgtcgagcaggacgtgctccgaagaactgactcttctgctgcggatatttttggagaagagcccttgtacaagagccactgaccagaaggttcagtcgacttag

SEQ ID NO: 113724 - DNA, 11406 bp, Artificial Sequence
  derived and/or modified sequence
atgagcacagacagcaacagcctggcccgggagttcctgacagatgtgaaccggctgtgcaatgctgtggtgcagagggtggaggcccgggaggaggaggaggaggagacccacatggccaccctgggccagtacctggtgcacggccggggcttcctgctgctgaccaagctgaacagcatcatcgaccaggccctgacctgccgggaggagctgctgaccctgctgctgagcctgctgcccctggtgtggaagatccctgtgcaggaggagaaggccacagacttcaacctgcccctgtctgctgacatcatcctgaccaaggagaagaacagcagcagccagaggagcacccaggagaagctgcacctggagggcagcgccctgagcagccaggtgtctgccaaggtgaatgtgttcaggaagagccggcggcagaggaagatcacccaccgctacagcgtgagagatgccaggaagacccagctgagcaccagtgacagcgaggccaacagtgatgagaagggcatcgccatgaacaagcacagaagaccccacctgctgcaccacttcctgaccagcttccccaagcaggaccaccccaaggccaagctggaccggctggccaccaaggagcagaccccaccagatgccatggccctggagaacagccgggagatcatcccccggcagggcagcaacacagacatcctgtctgagcctgctgccctgagcgtcatcagcaacatgaacaacagcccctttgacctgtgccacgtgctgctgagcctgctggagaaggtgtgcaagtttgatgtgaccctgaaccacaacagccccctggccgcctctgtggtgcccaccctgacagagttcctggccggctttggagactgctgcagcctgagtgacaacctggagagccgggtggtgtctgctggctggacagaggagcctgtggccctgatccagaggatgctgttcagaacagtgctgcacctgctgtctgtggatgtgtccacagctgagatgatgcctgagaacctgaggaagaacctgacagagctgctgcgggccgccctgaagatccgcatctgcctggagaagcagcctgacccctttgccccccggcagaagaagaccctgcaggaggtgcaggaggactttgtgttcagcaagtaccgccaccgggccctgctgctgcctgagctgctggagggcgtgctgcagatcctgatctgctgcctgcagagcgctgccagcaaccccttctacttcagccaggccatggacctggtgcaggagttcatccagcaccacggcttcaacctgtttgaaacagctgtgctgcagatggagtggctggtgctgagagatggagtgcccccagaggccagcgagcacctgaaggccctgatcaacagcgtgatgaagatcatgagcacagtgaagaaggtgaagtctgagcagctgcaccacagcatgtgcaccaggaagaggcaccggcgctgtgagtacagccacttcatgcaccaccaccgggacctgagcggcctgctggtgtctgccttcaagaaccaggtgtccaagaacccctttgaggagacagcagatggagatgtgtactacccagagcgctgctgctgcatcgctgtgtgtgcccaccagtgcctgcggctgctgcagcaggccagcctgagcagcacctgtgtgcagatcctgtctggagtgcacaacatcggcatctgctgctgcatggaccccaagagcgtcatcatccccctgctgcacgccttcaagctgcctgccctgaagaacttccagcagcacatcctgaacatcctgaacaagctgatcctggaccagctgggcggcgctgagatcagccccaagatcaagaaggccgcctgcaacatctgcaccgtggacagcgaccagctggcccagctggaggagaccctgcagggcaacctgtgtgatgctgagctgagcagcagcctgagcagccccagctaccgcttccagggcatcctgcccagcagcggcagcgaggacctgctgtggaagtgggatgccctgaaggcctaccagaactttgtgtttgaagaagatcggctgcacagcatccagatcgccaaccacatctgcaacctgatccagaagggcaacatcgtggtgcagtggaagctgtacaactacatcttcaaccctgtgctgcagaggggcgtggagctggcccaccactgccagcacctgtctgtgaccagcgcccagagccacgtgtgcagccaccacaaccagtgcctgccccaggatgtgctgcagatctacgtgaagaccctgcccatcctgctgaagagcagggtcatccgggacctcttcctgagctgcaatggagtgtcccagatcatcgagctgaactgcctgaatggcatccgcagccacagcctgaaggcctttgagaccctcatcatcagcctgggggagcagcagaaggatgcctctgtgcctgacattgatggcatcgacatcgagcagaaggagctgagctctgtgcacgtgggcaccagcttccaccaccagcaggcctacagcgacagcccccagagcctgagcaagttctacgccggcctgaaggaggcctaccccaagaggaggaagacagtgaaccaggatgtgcacatcaacaccatcaacctcttcctgtgtgtggccttcctgtgtgtgtccaaggaggccgagagtgaccgggagagcgccaatgattctgaggacaccagcggctatgacagcacagccagcgagcccctgagccacatgctgccctgcatcagcctggagagcctggtgctgcccagccctgagcacatgcaccaggccgctgacatctggagcatgtgccgctggatctacatgctgagctctgtgttccagaagcagttctaccgcctgggcggcttccgggtgtgccacaagctgatcttcatgatcatccagaagctgttccgcagccacaaggaggagcagggcaagaaggagggggacacctctgtgaatgaaaaccaggacctgaaccgcatcagccagcccaagaggaccatgaaggaggacctgctgagcctggccatcaagagtgaccccatccccagcgagctgggcagcctgaagaagtctgctgacagcctgggcaagctggagctgcagcacatcagcagcatcaacgtggaggaggtgtctgccacagaagctgcccctgaggaggccaagctgttcaccagccaggagagcgagaccagcctgcagagcatccggctgctggaggccctgctggccatctgcctgcatggagcccggaccagccagcagaagatggagctggagctgcccaaccagaacctgtctgtggagagcatcctgtttgagatgagggaccacctgagccagagcaaggtgattgagacccagctggccaagcccctgtttgatgccctgctgcgggtggccctgggcaactacagcgctgactttgagcacaatgatgccatgacagagaagagccaccagagcgctgaggagctgagcagccagcccggggacttcagcgaggaggccgaggacagccagtgctgcagcttcaagctgctggtggaggaggagggctatgaagctgacagcgagagcaacccagaagatggagagacccaggatgatggagtggacctgaagtcagaaacagagggcttcagcgccagcagcagccccaatgacctgctggagaacctgacccagggcgagatcatctacccagagatctgcatgctggagctgaacctgctgagcgccagcaaggccaagctggatgtgctggcccacgtgtttgagagcttcctgaagatcatccggcagaaggagaagaatgtgttcctgctgatgcagcagggcaccgtgaagaacctgctgggcggcttcctgagcatcctgacccaggatgacagcgacttccaggcctgccagagggtgctggtggacctgctggtgtccctgatgagcagcaggacctgcagcgaggagctgaccctgctgctgcgcatcttcctggagaagagcccctgcaccaagatcctgctgctgggcatcctgaagatcattgaaagtgacaccaccatgagccccagccagtacctgaccttccccctgctgcacgcccccaacctgagcaatggagtgagcagccagaagtacccaggcatcctgaacagcaaggccatgggcctgctgcggcgggcccgggtgagccgcagcaagaaggaggccgaccgggagagcttcccccaccggctgctgagctcctggcacatcgcccctgtgcacctgcccctgctgggccagaactgctggccccacctgtctgagggcttctctgtgtccctgtggttcaacgtggagtgcatccatgaagctgagagcaccacagagaagggcaagaagatcaagaagaggaacaagagcctcatcctgcctgacagcagctttgatggaacagaaagtgacaggcctgagggcgctgagtacatcaaccctggagagcggctcatcgaggagggctgcatccacatcatcagcctgggcagcaaggccctgatgatccaggtgtgggccgacccccacaatgccaccctcatcttccgggtgtgcatggacagcaatgatgacatgaaggctgtgctgctggcccaggtggagagccaggagaacatcttcctgcccagcaagtggcagcacctggtgctgacctacctgcagcagccccagggcaagaggcgcatccacggcaagatcagcatctgggtgtctggccagaggaagccagatgtgaccctggacttcatgctgcccaggaagaccagcctgagcagtgacagcaacaagaccttctgcatgattggccactgcctgagcagccaggaggagttcctgcagctggccggcaagtgggacctgggcaacctgctgctcttcaacggggccaaggtgggcagccaggaggccttctacctgtatgcctgtggccccaaccacacctctgtgatgccctgcaagtatggcaagcctgtgaatgactacagcaagtacatcaacaaggagatcctgcgctgtgagcagatccgggagctgttcatgaccaagaaggatgtggacatcggcctgctgattgagagcctgtctgtggtgtacaccacctactgcccagcccagtacaccatctatgagcccgtcatccggctgaagggccagatgaagacccagctgagccagaggcccttcagcagcaaggaggtgcagagcatcctgctggagccccaccacctgaagaacctgcagcccacagagtacaagaccatccagggcatcctgcacgagatcggcggcaccggcatctttgtgttcctgtttgcccgggtggtggagctgagcagctgtgaggagacccaggccctggccctgcgggtcatcctgagcctcatcaagtacaaccagcagagggtgcatgagctggagaactgcaatggcctgtccatgatccaccaggtgctgatcaagcagaagtgcatcgtgggcttctacatcctgaagaccctgctggagggctgctgcggggaggacatcatctacatgaatgaaaatggagagttcaagctggatgtggacagcaatgccatcatccaggatgtgaagctgctggaggagctgctgctggactggaagatctggagcaaggccgagcagggcgtgtgggagaccctgctggccgccctggaggtgctgatccgggctgaccaccaccagcagatgttcaacatcaagcagctgctgaaggcccaggtggtgcaccacttcctgctgacctgccaggtgctgcaggagtacaaggagggccagctgacccccatgccccgggaggtgtgccgcagctttgtgaagatcatcgccgaggtgctgggcagccccccagacctggagctgctgaccatcatcttcaacttcctgctggccgtgcacccccccaccaacacctacgtgtgccacaaccccaccaacttctacttcagcctgcacattgatggcaagatcttccaggagaaggtgcgcagcatcatgtacctgcggcacagcagcagcggcggccgcagcctgatgagccctggcttcatggtgatcagccccagcggcttcaccgccagcccctatgaaggagagaacagcagcaacatcatcccccagcagatggccgcccacatgctgcggagccgcagcctgcctgccttccccaccagcagcctgctgacccagagccagaagctgaccggcagcctgggctgcagcattgaccggctgcagaacattgctgacacctacgtggccacccagagcaagaagcagaacagcctgggcagcagtgacaccctgaagaagggcaaggaggatgccttcatcagcagctgtgagagcgccaagacagtgtgtgagatggaggccgtgctgagcgcccaggtgtctgtgtctgatgtgcccaagggcgtgctgggcttccctgtggtgaaggctgaccacaagcagctgggcgctgagcccaggagtgaagatgacagccctggagatgagagctgccccaggaggccagactacctgaagggcctggccagcttccagaggagccacagcaccatcgccagcctgggcctggccttccccagccagaatggcagcgctgctgtgggccgctggcccagcctggtggacaggaacacagatgactgggagaactttgcctacagcctgggctatgagcccaactacaacagaacagccagcgcccacagcgtgacagaggactgcctggtgcccatctgctgcggcctgtatgagctgctgagcggcgtgctgctgatcctgcctgatgtgctgctggaggatgtgatggacaagctgatccaggccgacaccctgctggtgctggtgaaccaccccagccctgccatccagcagggcgtcatcaagctgctggatgcctactttgcccgggccagcaaggagcagaaggacaagttcctgaagaacagaggcttcagcctgctggccaaccagctgtacctgcaccggggcacccaggagctgctggagtgcttcatcgagatgttcttcggccgccacatcggcctggatgaggagtttgacctggaggatgtgaggaacatgggcctcttccagaagtggagcgtcatccccatcctgggcctcatcgagaccagcctgtatgacaacatcctgctgcacaatgccctgctgctgctgctgcagatcctgaacagctgcagcaaggtggccgacatgctgctggacaatggcctgctgtatgtgctgtgcaacacagtggccgccctgaatggcctggagaagaacatccccatgtctgagtacaagctgctggcctgtgacatccagcagctgttcatcgctgtgaccatccacgcctgcagcagcagcggcagccagtacttccgggtgattgaggacctgattgtgatgctgggctacctgcagaacagcaagaacaagaggacccagaacatggctgtggccctgcagctgcgggtgctgcaggccgccatggagttcatccgcaccacagccaaccacgacagcgagaacctgacagacagcctgcagagccccagcgccccccaccacgctgtggtgcagaagaggaagagcattgctggccccaggaagttccccctggcccagacagagagcctgctgatgaagatgaggtctgtggccaatgatgagctgcacgtgatgatgcagaggaggatgagccaggagaaccccagccaggccacagaaacagagctggcccagaggctgcagaggctgactgtgctggccgtgaaccgcatcatctaccaggagttcaacagcgacatcatcgacatcctgcggaccccagaaaatgtgacccagagcaagacctctgtgttccagacagagatcagcgaggagaacatccaccacgagcagagcagcgtcttcaaccccttccagaaggagatcttcacctacctggtggagggcttcaaggtgtccatcggcagcagcaaggccagcggcagcaagcagcagtggaccaagatcctgtggagctgcaaggagaccttcaggatgcagctgggccgcctgctggtgcacatcctgagccctgcccatgctgcccaggagaggaagcagatctttgaaattgtgcatgagcccaaccaccaggagatcctgcgggactgcctgagccccagcctgcagcacggggccaagctggtgctgtacctgtctgagctgatccacaaccaccagggcgagctgacagaggaggagctgggcacagctgagctgctgatgaatgccctgaagctgtgtggccacaagtgcatcccccccagcgccagcaccaaggctgacctgatcaagatgatcaaggaggagcagaagaagtatgaaacagaggagggcgtgaacaaggccgcctggcagaagacagtgaacaacaaccagcagagcctcttccagaggctggacagcaagagcaaggacatcagcaagattgctgctgacatcacccaggccgtgtccctgagccagggcaatgaaaggaagaaggtgatccagcacatccggggcatgtacaaggtggacctgagcgccagccgccactggcaggagctgatccagcagctgacccatgacagagctgtgtggtatgaccccatctactaccccacctcctggcagctggaccccacagagggccccaaccgggagcggcggcggctgcagcgctgctacctgaccatccccaacaagtacctgctgcgggaccggcagaagtcagaagatgtggtgaagccacccctgagctacctgtttgaggacaagacccacagcagcttcagcagcacagtgaaggacaaggccgccagcgagagcatccgggtgaacagacgctgcatctctgtggcccccagccgggagacagctggggagctgctgctgggcaaatgtggcatgtactttgtggaggacaatgccagtgacacagtggagagcagcagcctgcagggcgagctggagcccgccagcttctcctggacctatgaggagatcaaggaggtgcacaagcgctggtggcagctgcgggacaatgctgtggagatcttcctgaccaatggaagaaccctgctgctggcctttgacaacaccaaggtgagagatgatgtgtaccacaacatcctgaccaacaacctgcccaacctgctggagtatggcaacatcacagccctgaccaacctgtggtacacaggccagatcaccaactttgagtacctgacccacctgaacaagcatgctggccgctccttcaatgacctgatgcagtaccctgtgttccccttcatcctggccgactatgtgtctgagaccctggacctgaatgacctgctgatctacagaaacctgagcaagcccatcgctgtgcagtacaaggagaaggaggaccgctacgtggacacctacaagtacctggaggaggagtacagaaaaggagccagagaagatgaccccatgcctcctgtgcagccctaccactacggcagccactacagcaacagcggcaccgtgctgcacttcctggtgaggatgccacccttcaccaagatgttcctggcctaccaggaccagagctttgacatcccagacaggaccttccacagcaccaacaccacctggaggctgagcagctttgagagcatgacagatgtgaaggagctgatccctgagttcttctacctgcctgagttcctggtgaaccgggagggctttgattttggagtgcggcagaatggagagcgggtgaaccacgtgaacctgcccccctgggccagaaatgaccccaggctcttcatcctgatccaccggcaggccctggagagtgactatgtgtcccagaacatctgccagtggattgacctggtgtttggctacaagcagaagggcaaggcctctgtgcaggccatcaacgtgttccacccagccacctacttcggcatggatgtgtctgctgtggaggaccctgtgcagaggcgggccctggagaccatgatcaagacctacggccagaccccccggcagctgttccacatggcccacgtgtccaggcctggggccaagctgaacattgaaggagagctgcctgctgctgtgggcctgctggtgcagtttgccttccgggagacccgggagcaggtgaaggagatcacctaccccagccccctgtcctggatcaagggcctgaagtggggcgagtatgtgggcagccccagcgcccctgtgcctgtggtgtgcttcagccagccccatggagagagatttggcagcctgcaggccctgcccacccgggccatctgtggcctgagcaggaacttctgcctgctgatgacctacagcaaggagcagggcgtgcgctccatgaacagcacagacatccagtggagcgccatcctgtcctggggctacgccgacaacatcctgcggctgaagagcaagcagagcgagccccctgtgaacttcatccagagcagccagcagtaccaggtgaccagctgtgcctgggtgcctgacagctgccagctgttcaccggcagcaaatgtggggtcatcacagcctacaccaaccgcttcaccagcagcacccccagcgagattgagatggagacccagatccacctgtatggccacacagaggagatcaccagcctgtttgtgtgcaagccctacagcatcctgatctctgtgtccagagatggcacctgcatcatctgggacctgaaccggctgtgctacgtgcagagcctggccggccacaagagccctgtgacagctgtgtctgccagcgagaccagcggggacatcgccaccgtgtgtgacagcgctgggggcggcagtgacctgcggctgtggacagtgaatggagacctggtgggccacgtgcactgccgggagatcatctgcagcgtggccttcagcaaccagcctgagggcgtgtccatcaacgtgattgctgggggcctggagaatggcatcgtgcggctgtggagcacctgggacctgaagcctgtgcgggagatcaccttccccaagagcaacaagcccatcatcagcctgaccttcagctgtgatggccaccacctgtacacagccaacagtgatggcaccgtcatcgcctggtgcaggaaggaccagcagaggctgaagcagcccatgttctacagcttcctgagcagctatgctgctggatag

SEQ ID NO: 113725 - DNA, 4149 bp, Artificial Sequence
  derived and/or modified sequence
atgagcacagacagcaacagcctggcccgggagttcctgacagatgtgaaccggctgtgcaatgctgtggtgcagagggtggaggcccgggaggaggaggaggaggagacccacatggccaccctgggccagtacctggtgcacggccggggcttcctgctgctgaccaagctgaacagcatcatcgaccaggccctgacctgccgggaggagctgctgaccctgctgctgagcctgctgcccctggtgtggaagatccctgtgcaggaggagaaggccacagacttcaacctgcccctgtctgctgacatcatcctgaccaaggagaagaacagcagcagccagaggagcacccaggagaagctgcacctggagggcagcgccctgagcagccaggtgtctgccaaggtgaatgtgttcaggaagagccggcggcagaggaagatcacccaccgctacagcgtgagagatgccaggaagacccagctgagcaccagtgacagcgaggccaacagtgatgagaagggcatcgccatgaacaagcacagaagaccccacctgctgcaccacttcctgaccagcttccccaagcaggaccaccccaaggccaagctggaccggctggccaccaaggagcagaccccaccagatgccatggccctggagaacagccgggagatcatcccccggcagggcagcaacacagacatcctgtctgagcctgctgccctgagcgtcatcagcaacatgaacaacagcccctttgacctgtgccacgtgctgctgagcctgctggagaaggtgtgcaagtttgatgtgaccctgaaccacaacagccccctggccgcctctgtggtgcccaccctgacagagttcctggccggctttggagactgctgcagcctgagtgacaacctggagagccgggtggtgtctgctggctggacagaggagcctgtggccctgatccagaggatgctgttcagaacagtgctgcacctgctgtctgtggatgtgtccacagctgagatgatgcctgagaacctgaggaagaacctgacagagctgctgcgggccgccctgaagatccgcatctgcctggagaagcagcctgacccctttgccccccggcagaagaagaccctgcaggaggtgcaggaggactttgtgttcagcaagtaccgccaccgggccctgctgctgcctgagctgctggagggcgtgctgcagatcctgatctgctgcctgcagagcgctgccagcaaccccttctacttcagccaggccatggacctggtgcaggagttcatccagcaccacggcttcaacctgtttgaaacagctgtgctgcagatggagtggctggtgctgagagatggagtgcccccagaggccagcgagcacctgaaggccctgatcaacagcgtgatgaagatcatgagcacagtgaagaaggtgaagtctgagcagctgcaccacagcatgtgcaccaggaagaggcaccggcgctgtgagtacagccacttcatgcaccaccaccgggacctgagcggcctgctggtgtctgccttcaagaaccaggtgtccaagaacccctttgaggagacagcagatggagatgtgtactacccagagcgctgctgctgcatcgctgtgtgtgcccaccagtgcctgcggctgctgcagcaggccagcctgagcagcacctgtgtgcagatcctgtctggagtgcacaacatcggcatctgctgctgcatggaccccaagagcgtcatcatccccctgctgcacgccttcaagctgcctgccctgaagaacttccagcagcacatcctgaacatcctgaacaagctgatcctggaccagctgggcggcgctgagatcagccccaagatcaagaaggccgcctgcaacatctgcaccgtggacagcgaccagctggcccagctggaggagaccctgcagggcaacctgtgtgatgctgagctgagcagcagcctgagcagccccagctaccgcttccagggcatcctgcccagcagcggcagcgaggacctgctgtggaagtgggatgccctgaaggcctaccagaactttgtgtttgaagaagatcggctgcacagcatccagatcgccaaccacatctgcaacctgatccagaagggcaacatcgtggtgcagtggaagctgtacaactacatcttcaaccctgtgctgcagaggggcgtggagctggcccaccactgccagcacctgtctgtgaccagcgcccagagccacgtgtgcagccaccacaaccagtgcctgccccaggatgtgctgcagatctacgtgaagaccctgcccatcctgctgaagagcagggtcatccgggacctcttcctgagctgcaatggagtgtcccagatcatcgagctgaactgcctgaatggcatccgcagccacagcctgaaggcctttgagaccctcatcatcagcctgggggagcagcagaaggatgcctctgtgcctgacattgatggcatcgacatcgagcagaaggagctgagctctgtgcacgtgggcaccagcttccaccaccagcaggcctacagcgacagcccccagagcctgagcaagttctacgccggcctgaaggaggcctaccccaagaggaggaagacagtgaaccaggatgtgcacatcaacaccatcaacctcttcctgtgtgtggccttcctgtgtgtgtccaaggaggccgagagtgaccgggagagcgccaatgattctgaggacaccagcggctatgacagcacagccagcgagcccctgagccacatgctgccctgcatcagcctggagagcctggtgctgcccagccctgagcacatgcaccaggccgctgacatctggagcatgtgccgctggatctacatgctgagctctgtgttccagaagcagttctaccgcctgggcggcttccgggtgtgccacaagctgatcttcatgatcatccagaagctgttccgcagccacaaggaggagcagggcaagaaggagggggacacctctgtgaatgaaaaccaggacctgaaccgcatcagccagcccaagaggaccatgaaggaggacctgctgagcctggccatcaagagtgaccccatccccagcgagctgggcagcctgaagaagtctgctgacagcctgggcaagctggagctgcagcacatcagcagcatcaacgtggaggaggtgtctgccacagaagctgcccctgaggaggccaagctgttcaccagccaggagagcgagaccagcctgcagagcatccggctgctggaggccctgctggccatctgcctgcatggagcccggaccagccagcagaagatggagctggagctgcccaaccagaacctgtctgtggagagcatcctgtttgagatgagggaccacctgagccagagcaaggtgattgagacccagctggccaagcccctgtttgatgccctgctgcgggtggccctgggcaactacagcgctgactttgagcacaatgatgccatgacagagaagagccaccagagcgctgaggagctgagcagccagcccggggacttcagcgaggaggccgaggacagccagtgctgcagcttcaagctgctggtggaggaggagggctatgaagctgacagcgagagcaacccagaagatggagagacccaggatgatggagtggacctgaagtcagaaacagagggcttcagcgccagcagcagccccaatgacctgctggagaacctgacccagggcgagatcatctacccagagatctgcatgctggagctgaacctgctgagcgccagcaaggccaagctggatgtgctggcccacgtgtttgagagcttcctgaagatcatccggcagaaggagaagaatgtgttcctgctgatgcagcagggcaccgtgaagaacctgctgggcggcttcctgagcatcctgacccaggatgacagcgacttccaggcctgccagagggtgctggtggacctgctggtgtccctgatgagcagcaggacctgcagcgaggagctgaccctgctgctgcgcatcttcctggagaagagcccctgcacccgggccacagaccagaaggtgcagagcacctag

SEQ ID NO: 113726 - DNA, 13471 bp, Artificial Sequence
  derived and/or modified sequence
gcggcggcggcagcggcgtcggctcggggttctccgggagagggggagtgcgcggcggccgcagctgccacaaaccaggtgaagctttgttctaagaatatttgtttcatctagtttatgagtccaaatgatatagactgtaaatgtcacagcagtggtgaaagactgctcggtcatgagcaccgacagtaactcactggcacgtgaatttctgaccgatgtcaaccggctttgcaatgcagtggtccagagggtggaggccagggaggaagaagaggaggagacgcacatggcaacccttggacagtaccttgtccatggtcgaggatttctattacttaccaagctaaattctataattgatcaggcattgacatgtagagaagaactcctgactcttcttctgtctctccttccactggtatggaagatacctgtccaagaagaaaaggcaacagattttaacctaccgctctcagcagatataatcctgaccaaagaaaagaactcaagttcacaaagatccactcaggaaaaattacatttagaaggaagtgccctgtctagtcaggtttctgcaaaagtaaatgtttttcgaaaaagcagacgacagcgtaaaattacccatcgctattctgtaagagatgcaagaaagacacagctctccacctcagattcagaagccaattcagatgaaaaaggcatagcaatgaataagcatagaaggccccatctgctgcatcattttttaacatcgtttcctaaacaagaccaccccaaagctaaacttgaccgcttagcaaccaaagaacagactcctccagatgctatggctttggaaaattccagagagattattccaagacaggggtcaaacactgacattttaagtgagccagctgccttgtctgttatcagtaacatgaacaattctccatttgacttatgtcatgttttgttatctttattagaaaaagtttgtaagtttgacgttaccttgaatcataattctcctttagcagccagtgtagtgcccacactaactgaattcctagcaggctttggggactgctgcagtctgagcgacaacttggagagtcgagtagtttctgcaggttggaccgaagaaccggtggctttgattcaaaggatgctctttcgaacagtgttgcatcttctgtcagtagatgttagtactgcagagatgatgccagaaaatcttaggaaaaatttaactgaattgcttagagcagctttaaaaattagaatatgcctagaaaagcagcctgacccttttgcaccaagacaaaagaaaacactgcaggaggttcaggaagattttgtgttttcaaagtatcgtcatagagcccttcttttacctgagcttttggaaggagttcttcagattctgatctgttgtcttcaaagtgcagcttcaaatcccttctacttcagtcaagccatggatttggttcaagaattcattcagcatcatggatttaatttatttgaaacagcagttcttcaaatggaatggctggttttaagagatggagttcctcccgaggcctcagagcatttgaaagccctaataaatagtgtgatgaaaataatgagcactgtcaaaaaagtgaaatcagagcaacttcatcattcgatgtgtacaagaaaaaggcacagacgatgtgaatattctcattttatgcatcatcaccgagatctctcaggtcttctggtttcggcttttaaaaaccaggtttccaaaaacccatttgaagagactgcagatggagatgtttattatcctgagcggtgctgttgcattgcagtgtgtgcccatcagtgcttgcgcttactacagcaggcttccttgagcagcacttgtgtccagatcctatcgggtgttcataacattggaatatgctgttgtatggatcccaaatctgtaatcattcctttgctccatgcttttaaattgccagcactgaaaaattttcagcagcatatattgaatatccttaacaaacttattttggatcagttaggaggagcagagatatcaccaaaaattaaaaaagcagcttgtaatatttgtactgttgactctgaccaactagcccaattagaagagacactgcagggaaacttatgtgatgctgaactctcctcaagtttatccagtccttcttacagatttcaagggatcctgcccagcagtggatctgaagatttgttgtggaaatgggatgctttaaaggcttatcagaactttgtttttgaagaagacagattacatagtatacagattgcaaatcacatttgcaatttaatccagaaaggcaatatagttgttcagtggaaattatataattacatatttaatcctgtgctccaaagaggagttgaattagcacatcattgtcaacacctaagcgttacttcagctcaaagtcatgtatgtagccatcataaccagtgcttgcctcaggacgtgcttcagatttatgtaaaaactctgcctatcctgcttaaatccagggtaataagagatttgtttttgagttgtaatggagtaagtcaaataatcgaattaaattgcttaaatggtattcgaagtcattctctaaaagcatttgaaactctgataatcagcctaggggagcaacagaaagatgcctcagttccagatattgatgggatagacattgaacagaaggagttgtcctctgtacatgtgggtacttcttttcatcatcagcaagcttattcagattctcctcagagtctcagcaaattttatgctggcctcaaagaagcttatccaaagagacggaagactgttaaccaagatgttcatatcaacacaataaacctattcctctgtgtggcttttttatgcgtaagtaaagaagcagagtctgacagggagtcggccaatgactcagaagatacttctggctatgacagcacagccagcgagcctttaagtcatatgctgccatgtatatctctcgagagccttgtcttgccttctcctgaacatatgcaccaagcagcagacatttggtctatgtgtcgttggatctacatgttgagttcagtgttccagaaacagttttataggcttggtggtttccgagtatgccataagttaatatttatgataatacagaaactgttcagaagtcacaaagaggagcaaggaaaaaaggagggagatacaagtgtaaatgaaaaccaggatttaaacagaatttctcaacctaagagaactatgaaggaagatttattatctttggctataaaaagtgaccccataccatcagaactaggtagtctaaaaaagagtgctgacagtttaggtaaattagagttacagcatatttcttccataaatgtggaagaagtttcagctactgaagccgctcccgaggaagcaaagctatttacaagtcaagaaagtgagacctcacttcaaagtatacgacttttggaagcccttctggccatttgtcttcatggtgccagaactagtcaacagaagatggaattggagttacctaatcagaacttgtctgtggaaagtatattatttgaaatgagggaccatctttcccagtcaaaggtgattgaaacacaactagcaaagcctttatttgatgccctgcttcgagttgccctcgggaattattcagcagattttgaacataatgatgctatgactgagaagagtcatcaatctgcagaagaattgtcatcccagcctggtgatttttcagaagaagctgaggattctcagtgttgtagttttaaacttttagttgaagaagaaggttacgaagcagatagtgaaagcaatcctgaagatggcgaaacccaggatgatggggtagacttaaagtctgaaacagaaggtttcagtgcatcaagcagtccaaatgacttactcgaaaacctcactcaaggggaaataatttatcctgagatttgtatgctggaattaaatttgctttctgctagtaaagccaaacttgatgtgcttgcccatgtatttgagagttttttgaaaattattaggcagaaagaaaagaatgtttttctgctcatgcaacagggaactgtgaaaaatcttttaggagggttcttgagtattttaacacaggatgattctgattttcaagcatgccagagagtattggtggatcttttggtatctttgatgagttcaagaacatgttcagaagagctaacccttcttttgagaatatttctggagaaatctccttgtacaaaaattcttcttctgggtattctgaaaattattgaaagtgatactactatgagcccttcacagtatctaaccttccctttactgcacgctccaaatttaagcaacggtgtttcatcacaaaagtatcctgggattttaaacagtaaggccatgggtttattgagaagagcacgagtttcacggagcaagaaagaggctgatagagagagttttccccatcggctgctttcatcttggcacatagccccagtccacctgccgttgctggggcaaaactgctggccacacctatcagaaggtttcagtgtttccctgtggtttaatgtggagtgtatccatgaagctgagagtactacagaaaaaggaaagaagataaagaaaagaaacaaatcattaattttaccagatagcagttttgatggtacagagagcgacagaccagaaggtgcagagtacataaatcctggtgaaagactcatagaagaaggatgtattcatataatttcactgggatccaaagcgttgatgatccaagtgtgggctgatccccacaatgccactcttatctttcgtgtgtgcatggattcaaatgatgacatgaaagctgttttactagcacaggttgaatcacaggagaatattttcctcccaagcaaatggcaacatttagtactcacctacttacagcagccccaagggaaaaggaggattcatgggaaaatctccatatgggtctctggacagaggaagcctgatgttactttggattttatgcttccaagaaaaacaagtttgtcatctgatagcaataaaacattttgcatgattggccattgtttatcatcccaagaagagtttttgcagttggctggaaaatgggacctgggaaatttgcttctcttcaacggagctaaggttggttcacaagaggccttttatctgtatgcttgtggacccaaccatacatctgtaatgccatgtaagtatggcaagccagtcaatgactactccaaatatattaataaagaaattttgcgatgtgaacaaatcagagaactttttatgaccaagaaagatgtggatattggtctcttaattgaaagtctttcagttgtttatacaacttactgtcctgctcagtataccatctatgaaccagtgattagacttaaaggtcaaatgaaaacccaactctctcaaagacccttcagctcaaaagaagttcagagcatcttattagaacctcatcatctaaagaatctccaacctactgaatataaaactattcaaggcattctgcacgaaattggtggaactggcatatttgtttttctctttgccagggttgttgaactcagtagctgtgaagaaactcaagcattagcactgcgagttatactctcattaattaaatacaaccaacaaagagtacatgaattagaaaattgtaatggactttctatgattcatcaggtgttgatcaaacaaaaatgcattgttgggttttacattttgaagacccttcttgaaggatgctgtggtgaagatattatttatatgaatgagaatggagagtttaagttggatgtagactctaatgctataatccaagatgttaagctgttagaggaactattgcttgactggaagatatggagtaaagcagagcaaggtgtttgggaaactttgctagcagctctagaagtcctcatcagagcagatcaccaccagcagatgtttaatattaagcagttattgaaagctcaagtggttcatcactttctactgacttgtcaggttttgcaggaatacaaagaggggcaactcacacccatgccccgagaggtttgtagatcatttgtgaaaattatagcagaagtccttggatctcctccagatttggaattattgacaattatcttcaatttccttttagcagttcaccctcctactaatacttacgtttgtcacaatcccacgaacttctacttttctttgcacatagatggcaagatctttcaggagaaagtgcggtcaatcatgtacctgaggcattccagcagtggaggaaggtcccttatgagccctggatttatggtaataagcccatctggttttactgcttcaccatatgaaggagagaattcctctaatattattccacaacagatggccgcccatatgctgcgttctagaagcctaccagcattccctacttcttcactactaacgcaatcacaaaaactgactggaagtttgggttgtagtatcgacaggttacaaaatattgcagatacttatgttgccacccaatcaaagaaacaaaattctttggggagttccgacacactgaaaaaaggcaaagaggacgcattcatcagtagctgtgagtctgcaaaaactgtttgtgaaatggaagctgtcctctcagcccaggtctctgtcagtgatgtcccaaagggagtgctgggatttccagtggtcaaagcagatcataaacagttgggagcagaacccaggtcagaagatgacagtcctggggatgagtcctgcccacgccgacctgattacctaaagggattggcctccttccagcgaagccacagcactattgcaagccttgggctagcttttccttcacagaacggatctgcagctgttggccgttggccaagtcttgttgatagaaacactgatgattgggaaaactttgcctattctcttggttatgagccaaattacaaccgaactgcaagtgctcacagtgtaactgaagactgtttggtacctatatgctgtggattatatgaactcctaagtggggttcttcttatcctgcctgatgttttgcttgaagatgtgatggacaagcttattcaagcagatacacttttggtcctcgttaaccacccatcaccagctatacaacaaggtgttattaaactattagatgcatattttgctagagcatctaaggaacaaaaagataaatttctgaagaatcgtggattttccttgctagccaaccagttgtatcttcatcgaggaactcaagaattgttagaatgcttcatcgaaatgttctttggtcgacatattggccttgatgaagaatttgatctggaagatgtgagaaacatgggattgtttcagaagtggtctgtcattcctattctgggactaatagagacctctctatatgacaacatactcttgcataatgctcttttacttcttctccaaattttaaattcttgttctaaggtagcagatatgttgctggataatggtctactctatgtgttatgtaatacagtagcagccctgaatggattagaaaagaacattcccatgagtgaatataaattgcttgcttgtgatatacagcaacttttcatagcagttacaattcatgcttgcagttcctcaggctcacaatattttagggttattgaagaccttattgtaatgcttggatatcttcaaaatagcaaaaacaagaggacacaaaatatggctgttgcactacagcttagagttctccaggctgctatggaatttataaggaccaccgcaaatcatgactctgaaaacctcacagattcactccagtcaccttctgctccccatcatgcagtagttcaaaagcggaaaagcattgctggtcctcgaaaatttccccttgctcaaactgaatcgcttctgatgaaaatgcgttcagtggcaaatgatgagcttcatgtgatgatgcaacggagaatgagccaagagaaccctagccaagcaactgaaacggaacttgcgcagagactacagaggctcactgttttagcagtcaacaggattatttatcaagaatttaattcagacattattgacattttgagaactccagaaaatgtaactcaaagcaagacctcagttttccagaccgaaatttctgaggaaaatattcatcatgaacagtcttctgttttcaatccatttcagaaagaaatttttacatatctggtagaaggattcaaagtatctattggttcaagtaaagccagtggttccaagcagcaatggactaaaattctgtggtcttgtaaggagaccttccgaatgcagcttgggagactactagtgcatattttgtcgccagcccacgctgcacaagagagaaagcaaatttttgaaatagttcatgaaccaaatcatcaggaaatactacgagactgtctcagcccatccctacaacatggagccaagttagttttgtatttgtcagagttgatacataatcaccaaggtgaattgactgaagaagagctaggcacagcagaactgcttatgaatgctttgaagttatgtggtcacaagtgcatccctcccagtgcatcaacaaaagcagaccttattaaaatgatcaaagaggaacaaaagaaatatgaaactgaagaaggagtgaataaagctgcttggcagaaaacagttaacaataatcaacaaagtctctttcagcgtctggattcaaaatcaaaggatatatctaaaatagctgcagatatcacccaggcagtgtctctctcccaaggaaatgagagaaaaaaggtgatccagcatattagaggaatgtataaagtagatttgagtgccagcagacattggcaggaacttattcagcagctgacacatgatagagcagtatggtatgaccccatctactatccaacctcatggcagttggatccaacagaagggccaaatcgagagaggagacgtttacagagatgttatttaactattccaaataagtatctccttagggatagacagaaatcagaagatgttgtcaaaccaccactctcttacctgtttgaagacaaaactcattcttctttctcttctactgtcaaagacaaagctgcaagtgaatctataagagtgaatcgaagatgcatcagtgttgcaccatctagagagacagctggtgaattgttactaggtaaatgtggaatgtattttgtggaagataatgcttctgatacagttgaaagttcgagccttcagggagagttggaaccagcatcattttcctggacatatgaagaaattaaagaagttcacaagcgttggtggcaattgagagataatgctgtagaaatctttctaacaaatggcagaacactcctgttggcatttgataacaccaaggttcgtgatgatgtataccacaatatactcacaaataacctccctaatcttctggaatatggtaacatcaccgctctgacaaatttatggtatactgggcaaattactaattttgaatatttgactcacttaaacaaacatgctggccgatccttcaatgatctcatgcagtatcctgtgttcccatttatacttgctgactacgttagtgagacacttgacctcaatgatctgttgatatacagaaatctctctaaacctatagctgttcagtataaagaaaaagaagatcgttatgtggacacatacaagtacttggaggaagagtaccgcaaaggagccagagaagatgaccccatgcctcccgtgcagccctatcactatggctcccactattccaatagcggcactgtgcttcacttcctggtcaggatgcctcctttcactaaaatgtttttagcctatcaagatcaaagttttgacattccagacagaacttttcattctacaaatacaacttggcgactctcatcttttgaatctatgactgatgtgaaagaacttatcccagagtttttctatcttccagagttcctagttaaccgtgaaggttttgattttggtgtgcgtcagaatggtgaacgggttaatcacgtcaaccttcccccttgggcgcgtaatgatcctcgtctttttatcctcatccatcggcaggctctagagtctgactacgtgtcgcagaacatctgtcagtggattgacttggtgtttgggtataagcaaaaggggaaggcttctgttcaagcgatcaatgtttttcatcctgctacatattttggaatggatgtctctgcagttgaagatccagttcagagacgagcgctagaaaccatgataaaaacctacgggcagactccccgtcagctgttccacatggcccatgtgagcagacctggagccaagctcaatattgaaggagagcttccagctgctgtggggttgctagtgcagtttgctttcagggagacccgagaacaggtcaaagaaatcacctatccgagtcctttgtcatggataaaaggcttgaaatggggggaatacgtgggttcccccagtgctccagtacctgtggtctgcttcagccagccccacggagaaagatttggctctctccaggctctgcccaccagagcaatctgtggtttgtcacggaatttctgtcttctgatgacatatagcaaggaacaaggtgtgagaagcatgaacagtacggacattcagtggtcagccatcctgagctggggatatgctgataatattttaaggttgaagagtaaacaaagtgagcctccagtaaactttattcaaagttcacaacagtaccaggtgactagttgtgcttgggtgcctgacagttgccagctgtttactggaagcaaatgcggtgtcatcacagcctacacaaacagatttacaagcagcacgccatcagaaatagaaatggagactcaaatacatctctatggtcacacagaagagataaccagcttatttgtttgcaaaccatacagtatactgataagtgtgagcagagacggaacctgcatcatatgggatttaaacaggttatgctatgtacaaagtctggcgggacacaaaagccctgtcacagctgtctctgccagtgaaacctcaggtgatattgctactgtgtgtgattcagctggcggaggcagtgacctcagactctggacggtgaacggggatctcgttggacatgtccactgcagggagatcatctgttccgtggctttctccaaccagcctgagggagtatctatcaatgtaatcgctgggggattagaaaatggaattgtaaggttatggagcacatgggacttaaagcctgtgagagaaattacatttcccaaatcaaataagcccatcatcagccttacattttcttgtgatggccaccatttgtacacagcaaacagtgatgggaccgtgattgcctggtgtcggaaggaccagcagcgcttgaaacagccaatgttctattccttccttagcagctatgcagccgggtgaatgcgaatgaacttcacgttctccaaagcactttaactccaaactagatttgttgacttcaccagttttaggaggttgaacctaaagaaatggatgactggacaaaccatccaaataatgataaagtctattcatctgcacaaaattctgaagagtcacatgatcctaagaggaaagttctgttctattttagtgataatctggaagattgtgtcaatatgcactagccaacaagttttaagcctcgcatggtacattaaaatgatattcttaaaattttttcccaccaaggtattccaaagaaaatattaaggtctcccctttttctatgattccaaaaggaccagtagaatttaaattggttggttgattgtttatataaaacacactaaaattatattttaaaagtttactgccatgaaatactcctcccaccacacacacatgctccaaaagaggaaagaaaaaaagataatttttaggacttgataattgctttctttgagaagcaaattattcagtaggtgcctctgtaccaaatattttatggaatatctaaatactaaaataaactatgaatgaatctcaaaattaggcagtttttgccagttgctttcttagctcaaaggagaaccagaatttttttgacagccacaaacaagaatacaggtatcttggatttcagacacattctgtttcttcataaaaattttacttaaaatctgtaacgctagatattgactatccttagttgagtcactgaggtttaaacacaatggtaagtcttaaagtctgctatttacagagcattgaatctgtaccaatttgcaatagaaagccttcagtatgcaagaagtttgcatgggtattaagaacacagcctaaataaggcatttgatctaatctgcaggaagaattttcttccccaaaacagaattataaaagcttactttaaacaggaggcagaataattcttttaggaaaccatttcattctgtttctactaacctataccatctgagaattctaggaagaataataaaatctcgtgtattccacagcaaacttacataccataaagacagaattcctaaacatcttggagccgtctgtctctcccatatgatggctgtctgtatatttttacttggggtgctgctttattggctttgaaaacactgtcagataagctcagtaatatgttaccatgggataaaaatatgtatccctgcctaagaataacttgtgcatttgttatggaaatttaattcatatggtgtttacagtactacttttgtaacttccagactttctaaaacattctgcttaaaaaccatataaaatataattccaaagtctctgctgtcaagatagattcgagagaaagcacgtggccatgtatgctttaaccttaaactgcatacacatgtagtgatacctaggctgcatttagatcaccgtgtgctcaggccaggtgtgaatcctgaggtccatggaggtgcagagatgagattactcctattcacgttgaagtgatttgctttgttaacaaaaaattgcagctattgtctagctttcatttttttactgagaactttaaattagtcccctattagaatagggttgctactcatctttttttaaaaaccgaatttcatcatttatctaaagagaaaatatgcagaataactggtcttgttaagagtgcaatattatatttttatgtaaaaataaaaattaatttggggggattatttattcagcatgaaacctaatatgtatatgtttgaaatacttcataatgtgcatgttgtagcaaacatttctgtaaattatcacaagctctgttacctttatatacactgcctcttcaatttggaaataaatttc

SEQ ID NO: 113727 - DNA, 13480 bp, Artificial Sequence
  derived and/or modified sequence
gcggcggcggcagcggcgtcggctcggggttctccgggagagggggagtgcgcggcggccgcagctgccacaaaccaggtaaagctttgttctaagaatatttgtttcatctagtttatgagtccaaatgatatagactgtaaatgtcacagcagtggtgaaagactgctcggtcatgagcaccgacagtaactcactggcacgtgaatttctgaccgatgtcaaccggctttgcaatgcagtggtccagagggtggaggccagggaggaagaagaggaggagacgcacatggcaacccttggacagtaccttgtccatggtcgaggatttctattacttaccaagctaaattctataattgatcaggcattgacatgtagagaagaactcctgactcttcttctgtctctccttccactggtatggaagatacctgtccaagaagaaaaggcaacagattttaacctaccgctctcagcagatataatcctgaccaaagaaaagaactcaagttcacaaagatccactcaggaaaaattacatttagaaggaagtgccctgtctagtcaggtttctgcaaaagtaaatgtttttcgaaaaagcagacgacagcgtaaaattacccatcgctattctgtaagagatgcaagaaagacacagctctccacctcagattcagaagccaattcagatgaaaaaggcatagcaatgaataagcatagaaggccccatctgctgcatcattttttaacatcgtttcctaaacaagaccaccccaaagctaaacttgaccgcttagcaaccaaagaacagactcctccagatgctatggctttggaaaattccagagagattattccaagacaggggtcaaacactgacattttaagtgagccagctgccttgtctgttatcagtaacatgaacaattctccatttgacttatgtcatgttttgttatctttattagaaaaagtttgtaagtttgacgttaccttgaatcataattctcctttagcagccagtgtagtgcccacactaactgaattcctagcaggctttggggactgctgcagtctgagcgacaacttggagagtcgagtagtttctgcaggttggaccgaagaaccggtggctttgattcaaaggatgctctttcgaacagtgttgcatcttctgtcagtagatgttagtactgcagagatgatgccagaaaatcttaggaaaaatttaactgaattgcttagagcagctttaaaaattagaatatgcctagaaaagcagcctgacccttttgcaccaagacaaaagaaaacactgcaggaggttcaggaagattttgtgttttcaaagtatcgtcatagagcccttcttttacctgagcttttggaaggagttcttcagattctgatctgttgtcttcaaagtgcagcttcaaatcccttctacttcagtcaagccatggatttggttcaagaattcattcagcatcatggatttaatttatttgaaacagcagttcttcaaatggaatggctggttttaagagatggagttcctcccgaggcctcagagcatttgaaagccctaataaatagtgtgatgaaaataatgagcactgtcaaaaaagtgaaatcagagcaacttcatcattcgatgtgtacaagaaaaaggcacagacgatgtgaatattctcattttatgcatcatcaccgagatctctcaggtcttctggtttcggcttttaaaaaccaggtttccaaaaacccatttgaagagactgcagatggagatgtttattatcctgagcggtgctgttgcattgcagtgtgtgcccatcagtgcttgcgcttactacagcaggcttccttgagcagcacttgtgtccagatcctatcgggtgttcataacattggaatatgctgttgtatggatcccaaatctgtaatcattcctttgctccatgcttttaaattgccagcactgaaaaattttcagcagcatatattgaatatccttaacaaacttattttggatcagttaggaggagcagagatatcaccaaaaattaaaaaagcagcttgtaatatttgtactgttgactctgaccaactagcccaattagaagagacactgcagggaaacttatgtgatgctgaactctcctcaagtttatccagtccttcttacagatttcaagggatcctgcccagcagtggatctgaagatttgttgtggaaatgggatgctttaaaggcttatcagaactttgtttttgaagaagacagattacatagtatacagattgcaaatcacatttgcaatttaatccagaaaggcaatatagttgttcagtggaaattatataattacatatttaatcctgtgctccaaagaggagttgaattagcacatcattgtcaacacctaagcgttacttcagctcaaagtcatgtatgtagccatcataaccagtgcttgcctcaggacgtgcttcagatttatgtaaaaactctgcctatcctgcttaaatccagggtaataagagatttgtttttgagttgtaatggagtaagtcaaataatcgaattaaattgcttaaatggtattcgaagtcattctctaaaagcatttgaaactctgataatcagcctaggggagcaacagaaagatgcctcagttccagatattgatgggatagacattgaacagaaggagttgtcctctgtacatgtgggtacttcttttcatcatcagcaagcttattcagattctcctcagagtctcagcaaattttatgctggcctcaaagaagcttatccaaagagacggaagactgttaaccaagatgttcatatcaacacaataaacctattcctctgtgtggcttttttatgcgtaagtaaagaagcagagtctgacagggagtcggccaatgactcagaagatacttctggctatgacagcacagccagcgagcctttaagtcatatgctgccatgtatatctctcgagagccttgtcttgccttctcctgaacatatgcaccaagcagcagacatttggtctatgtgtcgttggatctacatgttgagttcagtgttccagaaacagttttataggcttggtggtttccgagtatgccataagttaatatttatgataatacagaaactgttcagaagtcacaaagaggagcaaggaaaaaaggagggagatacaagtgtaaatgaaaaccaggatttaaacagaatttctcaacctaagagaactatgaaggaagatttattatctttggctataaaaagtgaccccataccatcagaactaggtagtctaaaaaagagtgctgacagtttaggtaaattagagttacagcatatttcttccataaatgtggaagaagtttcagctactgaagccgctcccgaggaagcaaagctatttacaagtcaagaaagtgagacctcacttcaaagtatacgacttttggaagcccttctggccatttgtcttcatggtgccagaactagtcaacagaagatggaattggagttacctaatcagaacttgtctgtggaaagtatattatttgaaatgagggaccatctttcccagtcaaaggtgattgaaacacaactagcaaagcctttatttgatgccctgcttcgagttgccctcgggaattattcagcagattttgaacataatgatgctatgactgagaagagtcatcaatctgcagaagaattgtcatcccagcctggtgatttttcagaagaagctgaggattctcagtgttgtagttttaaacttttagttgaagaagaaggttacgaagcagatagtgaaagcaatcctgaagatggcgaaacccaggatgatggggtagacttaaagtctgaaacagaaggtttcagtgcatcaagcagtccaaatgacttactcgaaaacctcactcaaggggaaataatttatcctgagatttgtatgctggaattaaatttgctttctgctagtaaagccaaacttgatgtgcttgcccatgtatttgagagttttttgaaaattattaggcagaaagaaaagaatgtttttctgctcatgcaacagggaactgtgaaaaatcttttaggagggttcttgagtattttaacacaggatgattctgattttcaagcatgccagagagtattggtggatcttttggtatctttgatgagttcaagaacatgttcagaagagctaacccttcttttgagaatatttctggagaaatctccttgtacaaaaattcttcttctgggtattctgaaaattattgaaagtgatactactatgagcccttcacagtatctaaccttccctttactgcacgctccaaatttaagcaacggtgtttcatcacaaaagtatcctgggattttaaacagtaaggccatgggtttattgagaagagcacgagtttcacggagcaagaaagaggctgatagagagagttttccccatcggctgctttcatcttggcacatagccccagtccacctgccgttgctggggcaaaactgctggccacacctatcagaaggtttcagtgtttccctgtggtttaatgtggagtgtatccatgaagctgagagtactacagaaaaaggaaagaagataaagaaaagaaacaaatcattaattttaccagatagcagttttgatggtacagagagcgacagaccagaaggtgcagagtacataaatcctggtgaaagactcatagaagaaggatgtattcatataatttcactgggatccaaagcgttgatgatccaagtgtgggctgatccccacaatgccactcttatctttcgtgtgtgcatggattcaaatgatgacatgaaagctgttttactagcacaggttgaatcacaggagaatattttcctcccaagcaaatggcaacatttagtactcacctacttacagcagccccaagggaaaaggaggattcatgggaaaatctccatatgggtctctggacagaggaagcctgatgttactttggattttatgcttccaagaaaaacaagtttgtcatctgatagcaataaaacattttgcatgattggccattgtttatcatcccaagaagagtttttgcagttggctggaaaatgggacctgggaaatttgcttctcttcaacggagctaaggttggttcacaagaggccttttatctgtatgcttgtggacccaaccatacatctgtaatgccatgtaagtatggcaagccagtcaatgactactccaaatatattaataaagaaattttgcgatgtgaacaaatcagagaactttttatgaccaagaaagatgtggatattggtctcttaattgaaagtctttcagttgtttatacaacttactgtcctgctcagtataccatctatgaaccagtgattagacttaaaggtcaaatgaaaacccaactctctcaaagacccttcagctcaaaagaagttcagagcatcttattagaacctcatcatctaaagaatctccaacctactgaatataaaactattcaaggcattctgcacgaaattggtggaactggcatatttgtttttctctttgccagggttgttgaactcagtagctgtgaagaaactcaagcattagcactgcgagttatactctcattaattaaatacaaccaacaaagagtacatgaattagaaaattgtaatggactttctatgattcatcaggtgttgatcaaacaaaaatgcattgttgggttttacattttgaagacccttcttgaaggatgctgtggtgaagatattatttatatgaatgagaatggagagtttaagttggatgtagactctaatgctataatccaagatgttaagctgttagaggaactattgcttgactggaagatatggagtaaagcagagcaaggtgtttgggaaactttgctagcagctctagaagtcctcatcagagcagatcaccaccagcagatgtttaatattaagcagttattgaaagctcaagtggttcatcactttctactgacttgtcaggttttgcaggaatacaaagaggggcaactcacacccatgccccgagaggtttgtagatcatttgtgaaaattatagcagaagtccttggatctcctccagatttggaattattgacaattatcttcaatttccttttagcagttcaccctcctactaatacttacgtttgtcacaatcccacgaacttctacttttctttgcacatagatggcaagatctttcaggagaaagtgcggtcaatcatgtacctgaggcattccagcagtggaggaaggtcccttatgagccctggatttatggtaataagcccatctggttttactgcttcaccatatgaaggagagaattcctctaatattattccacaacagatggccgcccatatgctgcgttctagaagcctaccagcattccctacttcttcactactaacgcaatcacaaaaactgactggaagtttgggttgtagtatcgacaggttacaaaatattgcagatacttatgttgccacccaatcaaagaaacaaaattctttggggagttccgacacactgaaaaaaggcaaagaggacgcattcatcagtagctgtgagtctgcaaaaactgtttgtgaaatggaagctgtcctctcagcccaggtctctgtcagtgatgtcccaaagggagtgctgggatttccagtggtcaaagcagatcataaacagttgggagcagaacccaggtcagaagatgacagtcctggggatgagtcctgcccacgccgacctgattacctaaagggattggcctccttccagcgaagccacagcactattgcaagccttgggctagcttttccttcacagaacggatctgcagctgttggccgttggccaagtcttgttgatagaaacactgatgattgggaaaactttgcctattctcttggttatgagccaaattacaaccgaactgcaagtgctcacagtgtaactgaagactgtttggtacctatatgctgtggattatatgaactcctaagtggggttcttcttatcctgcctgatgttttgcttgaagatgtgatggacaagcttattcaagcagatacacttttggtcctcgttaaccacccatcaccagctatacaacaaggtgttattaaactattagatgcatattttgctagagcatctaaggaacaaaaagataaatttctgaagaatcgtggattttccttgctagccaaccagttgtatcttcatcgaggaactcaagaattgttagaatgcttcatcgaaatgttctttggtcgacatattggccttgatgaagaatttgatctggaagatgtgagaaacatgggattgtttcagaagtggtctgtcattcctattctgggactaatagagacctctctatatgacaacatactcttgcataatgctcttttacttcttctccaaattttaaattcttgttctaaggtagcagatatgttgctggataatggtctactctatgtgttatgtaatacagtagcagccctgaatggattagaaaagaacattcccatgagtgaatataaattgcttgcttgtgatatacagcaacttttcatagcagttacaattcatgcttgcagttcctcaggctcacaatattttagggttattgaagaccttattgtaatgcttggatatcttcaaaatagcaaaaacaagaggacacaaaatatggctgttgcactacagcttagagttctccaggctgctatggaatttataaggaccaccgcaaatcatgactctgaaaacctcacagattcactccagtcaccttctgctccccatcatgcagtagttcaaaagcggaaaagcattgctggtcctcgaaaatttccccttgctcaaactgaatcgcttctgatgaaaatgcgttcagtggcaaatgatgagcttcatgtgatgatgcaacggagaatgagccaagagaaccctagccaagcaactgaaacggaacttgcgcagagactacagaggctcactgttttagcagtcaacaggattatttatcaagaatttaattcagacattattgacattttgagaactccagaaaatgtaactcaaagcaagacctcagttttccagaccgaaatttctgaggaaaatattcatcatgaacagtcttctgttttcaatccatttcagaaagaaatttttacatatctggtagaaggattcaaagtatctattggttcaagtaaagccagtggttccaagcagcaatggactaaaattctgtggtcttgtaaggagaccttccgaatgcagcttgggagactactagtgcatattttgtcgccagcccacgctgcacaagagagaaagcaaatttttgaaatagttcatgaaccaaatcatcaggaaatactacgagactgtctcagcccatccctacaacatggagccaagttagttttgtatttgtcagagttgatacataatcaccaaggtgaattgactgaagaagagctaggcacagcagaactgcttatgaatgctttgaagttatgtggtcacaagtgcatccctcccagtgcatcaacaaaagcagaccttattaaaatgatcaaagaggaacaaaagaaatatgaaactgaagaaggagtgaataaagctgcttggcagaaaacagttaacaataatcaacaaagtctctttcagcgtctggattcaaaatcaaaggatatatctaaaatagctgcagatatcacccaggcagtgtctctctcccaaggaaatgagagaaaaaaggtgatccagcatattagaggaatgtataaagtagatttgagtgccagcagacattggcaggaacttattcagcagctgacacatgatagagcagtatggtatgaccccatctactatccaacctcatggcagttggatccaacagaagggccaaatcgagagaggagacgtttacagagatgttatttaactattccaaataagtatctccttagggatagacagaaatcagaagatgttgtcaaaccaccactctcttacctgtttgaagacaaaactcattcttctttctcttctactgtcaaagacaaagctgcaagtgaatctataagagtgaatcgaagatgcatcagtgttgcaccatctagagagacagctggtgaattgttactaggtaaatgtggaatgtattttgtggaagataatgcttctgatacagttgaaagttcgagccttcagggagagttggaaccagcatcattttcctggacatatgaagaaattaaagaagttcacaagcgttggtggcaattgagagataatgctgtagaaatctttctaacaaatggcagaacactcctgttggcatttgataacaccaaggttcgtgatgatgtataccacaatatactcacaaataacctccctaatcttctggaatatggtaacatcaccgctctgacaaatttatggtatactgggcaaattactaattttgaatatttgactcacttaaacaaacatgctggccgatccttcaatgatctcatgcagtatcctgtgttcccatttatacttgctgactacgttagtgagacacttgacctcaatgatctgttgatatacagaaatctctctaaacctatagctgttcagtataaagaaaaagaagatcgttatgtggacacatacaagtacttggaggaagagtaccgcaaaggagccagagaagatgaccccatgcctcccgtgcagccctatcactatggctcccactattccaatagcggcactgtgcttcacttcctggtcaggatgcctcctttcactaaaatgtttttagcctatcaagatcaaagttttgacattccagacagaacttttcattctacaaatacaacttggcgactctcatcttttgaatctatgactgatgtgaaagaacttatcccagagtttttctatcttccagagttcctagttaaccgtgaaggttttgattttggtgtgcgtcagaatggtgaacgggttaatcacgtcaaccttcccccttgggcgcgtaatgatcctcgtctttttatcctcatccatcggcaggctctagagtctgactacgtgtcgcagaacatctgtcagtggattgacttggtgtttgggtataagcaaaaggggaaggcttctgttcaagcgatcaatgtttttcatcctgctacatattttggaatggatgtctctgcagttgaagatccagttcagagacgagcgctagaaaccatgataaaaacctacgggcagactccccgtcagctgttccacatggcccatgtgagcagacctggagccaagctcaatattgaaggagagcttccagctgctgtggggttgctagtgcagtttgctttcagggagacccgagaacaggtcaaagaaatcacctatccgagtcctttgtcatggataaaaggcttgaaatggggggaatacgtgggttcccccagtgctccagtacctgtggtctgcttcagccagccccacggagaaagatttggctctctccaggctctgcccaccagagcaatctgtggtttgtcacggaatttctgtcttctgatgacatatagcaaggaacaaggtgtgagaagcatgaacagtacggacattcagtggtcagccatcctgagctggggatatgctgataatattttaaggttgaagagtaaacaaagtgagcctccagtaaactttattcaaagttcacaacagtaccaggtgactagttgtgcttgggtgcctgacagttgccagctgtttactggaagcaaatgcggtgtcatcacagcctacacaaacagatttacaagcagcacgccatcagaaatagaaatggagactcaaatacatctctatggtcacacagaagagataaccagcttatttgtttgcaaaccatacagtatactgataagtgtgagcagagacggaacctgcatcatatgggatttaaacaggttatgctatgtacaaagtctggcgggacacaaaagccctgtcacagctgtctctgccagtgaaacctcaggtgatattgctactgtgtgtgattcagctggcggaggcagtgacctcagactctggacggtgaacggggatctcgttggacatgtccactgcagggagatcatctgttccgtggctttctccaaccagcctgagggagtatctatcaatgtaatcgctgggggattagaaaatggaattgtaaggttatggagcacatgggacttaaagcctgtgagagaaattacatttcccaaatcaaataagcccatcatcagccttacattttcttgtgatggccaccatttgtacacagcaaacagtgatgggaccgtgattgcctggtgtcggaaggaccagcagcgcttgaaacagccaatgttctattccttccttagcagctatgcagccgggtgaatgcgaatgaacttcacgttctccaaagcactttaactccaaactagatttgttgacttcaccagttttaggaggttgaacctaaagaaatggatgactggacaaaccatccaaataatgataaagtctattcatctgcacaaaattctgaagagtcacatgatcctaagaggaaagttctgttctattttagtgataatctggaagattgtgtcaatatgcactagccaacaagttttaagcctcgcatggtacattaaaatgatattcttaaaattttttcccaccaaggtattccaaagaaaatattaaggtctcccctttttctatgattccaaaaggaccagtagaatttaaattggttggttgattgtttatataaaacacactaaaattatattttaaaagtttactgccatgaaatactcctcccaccacacacacatgctccaaaagaggaaagaaaaaaagataatttttaggacttgataattgctttctttgagaagcaaattattcagtaggtgcctctgtaccaaatattttatggaatatctaaatactaaaataaactatgaatgaatctcaaaattaggcagtttttgccagttgctttcttagctcaaaggagaaccagaatttttttgacagccacaaacaagaatacaggtatcttggatttcagacacattctgtttcttcataaaaattttacttaaaatctgtaacgctagatattgactatccttagttgagtcactgaggtttaaacacaatggtaagtcttaaagtctgctatttacagagcattgaatctgtaccaatttgcaatagaaagccttcagtatgcaagaagtttgcatgggtattaagaacacagcctaaataaggcatttgatctaatctgcaggaagaattttcttccccaaaacagaattataaaagcttactttaaacaggaggcagaataattcttttaggaaaccatttcattctgtttctactaacctataccatctgagaattctaggaagaataataaaatctcgtgtattccacagcaaacttacataccataaagacagaattcctaaacatcttggagccgtctgtctctcccatatgatggctgtctgtatatttttacttggggtgctgctttattggctttgaaaacactgtcagataagctcagtaatatgttaccatgggataaaaatatgtatccctgcctaagaataacttgtgcatttgttatggaaatttaattcatatggtgtttacagtactacttttgtaacttccagactttctaaaacattctgcttaaaaaccatataaaatataattccaaagtctctgctgtcaagatagattcgagagaaagcacgtggccatgtatgctttaaccttaaactgcatacacatgtagtgatacctaggctgcatttagatcaccgtgtgctcaggccaggtgtgaatcctgaggtccatggaggtgcagagatgagattactcctattcacgttgaagtgatttgctttgttaacaaaaaattgcagctattgtctagctttcatttttttactgagaactttaaattagtcccctattagaatagggttgctactcatctttttttaaaaaccgaatttcatcatttatctaaagagaaaatatgcagaataactggtcttgttaagagtgcaatattatatttttatgtaaaaataaaaattaatttggggggattatttattcagcatgaaacctaatatgtatatgtttgaaatacttcataatgtgcatgttgtagcaaacatttctgtaaattatcacaagctctgttacctttatatacactgcctcttcaatttggaaataaatttcataaaaata

SEQ ID NO: 113728 - DNA, 6650 bp, Artificial Sequence
  derived and/or modified sequence
tgtttggggttttggcctctttcagtgtttattcattcttacgtgggaaagttgtattccgaggtttctgtggtgcatgaagcttttgccttcaccatctgttcccgtgtcttcctcgggtgacatcagagtacagcagtattttcccttgccatctaatggggtttgggctgtttgactcaaccgtgtgtgttcctcaatgccaggggaataatcctaccctaagtcagctgaacagaagccaggatctaactgcaaacaagagacccagcttgcttaacagcatggaagagaccagtttcgttgcagctacctgggaagacggttgctaattagcctgcaacaaagagttccttgctcatctaaaagaggcaatcaccgttcaggtgaagctttgttctaagaatatttgtttcatctagtttatgagtccaaatgatatagactgtaaatgtcacagcagtggtgaaagactgctcggtcatgagcaccgacagtaactcactggcacgtgaatttctgaccgatgtcaaccggctttgcaatgcagtggtccagagggtggaggccagggaggaagaagaggaggagacgcacatggcaacccttggacagtaccttgtccatggtcgaggatttctattacttaccaagctaaattctataattgatcaggcattgacatgtagagaagaactcctgactcttcttctgtctctccttccactggtatggaagatacctgtccaagaagaaaaggcaacagattttaacctaccgctctcagcagatataatcctgaccaaagaaaagaactcaagttcacaaagatccactcaggaaaaattacatttagaaggaagtgccctgtctagtcaggtttctgcaaaagtaaatgtttttcgaaaaagcagacgacagcgtaaaattacccatcgctattctgtaagagatgcaagaaagacacagctctccacctcagattcagaagccaattcagatgaaaaaggcatagcaatgaataagcatagaaggccccatctgctgcatcattttttaacatcgtttcctaaacaagaccaccccaaagctaaacttgaccgcttagcaaccaaagaacagactcctccagatgctatggctttggaaaattccagagagattattccaagacaggggtcaaacactgacattttaagtgagccagctgccttgtctgttatcagtaacatgaacaattctccatttgacttatgtcatgttttgttatctttattagaaaaagtttgtaagtttgacgttaccttgaatcataattctcctttagcagccagtgtagtgcccacactaactgaattcctagcaggctttggggactgctgcagtctgagcgacaacttggagagtcgagtagtttctgcaggttggaccgaagaaccggtggctttgattcaaaggatgctctttcgaacagtgttgcatcttctgtcagtagatgttagtactgcagagatgatgccagaaaatcttaggaaaaatttaactgaattgcttagagcagctttaaaaattagaatatgcctagaaaagcagcctgacccttttgcaccaagacaaaagaaaacactgcaggaggttcaggaagattttgtgttttcaaagtatcgtcatagagcccttcttttacctgagcttttggaaggagttcttcagattctgatctgttgtcttcaaagtgcagcttcaaatcccttctacttcagtcaagccatggatttggttcaagaattcattcagcatcatggatttaatttatttgaaacagcagttcttcaaatggaatggctggttttaagagatggagttcctcccgaggcctcagagcatttgaaagccctaataaatagtgtgatgaaaataatgagcactgtcaaaaaagtgaaatcagagcaacttcatcattcgatgtgtacaagaaaaaggcacagacgatgtgaatattctcattttatgcatcatcaccgagatctctcaggtcttctggtttcggcttttaaaaaccaggtttccaaaaacccatttgaagagactgcagatggagatgtttattatcctgagcggtgctgttgcattgcagtgtgtgcccatcagtgcttgcgcttactacagcaggcttccttgagcagcacttgtgtccagatcctatcgggtgttcataacattggaatatgctgttgtatggatcccaaatctgtaatcattcctttgctccatgcttttaaattgccagcactgaaaaattttcagcagcatatattgaatatccttaacaaacttattttggatcagttaggaggagcagagatatcaccaaaaattaaaaaagcagcttgtaatatttgtactgttgactctgaccaactagcccaattagaagagacactgcagggaaacttatgtgatgctgaactctcctcaagtttatccagtccttcttacagatttcaagggatcctgcccagcagtggatctgaagatttgttgtggaaatgggatgctttaaaggcttatcagaactttgtttttgaagaagacagattacatagtatacagattgcaaatcacatttgcaatttaatccagaaaggcaatatagttgttcagtggaaattatataattacatatttaatcctgtgctccaaagaggagttgaattagcacatcattgtcaacacctaagcgttacttcagctcaaagtcatgtatgtagccatcataaccagtgcttgcctcaggacgtgcttcagatttatgtaaaaactctgcctatcctgcttaaatccagggtaataagagatttgtttttgagttgtaatggagtaagtcaaataatcgaattaaattgcttaaatggtattcgaagtcattctctaaaagcatttgaaactctgataatcagcctaggggagcaacagaaagatgcctcagttccagatattgatgggatagacattgaacagaaggagttgtcctctgtacatgtgggtacttcttttcatcatcagcaagcttattcagattctcctcagagtctcagcaaattttatgctggcctcaaagaagcttatccaaagagacggaagactgttaaccaagatgttcatatcaacacaataaacctattcctctgtgtggcttttttatgcgtaagtaaagaagcagagtctgacagggagtcggccaatgactcagaagatacttctggctatgacagcacagccagcgagcctttaagtcatatgctgccatgtatatctctcgagagccttgtcttgccttctcctgaacatatgcaccaagcagcagacatttggtctatgtgtcgttggatctacatgttgagttcagtgttccagaaacagttttataggcttggtggtttccgagtatgccataagttaatatttatgataatacagaaactgttcagaagtcacaaagaggagcaaggaaaaaaggagggagatacaagtgtaaatgaaaaccaggatttaaacagaatttctcaacctaagagaactatgaaggaagatttattatctttggctataaaaagtgaccccataccatcagaactaggtagtctaaaaaagagtgctgacagtttaggtaaattagagttacagcatatttcttccataaatgtggaagaagtttcagctactgaagccgctcccgaggaagcaaagctatttacaagtcaagaaagtgagacctcacttcaaagtatacgacttttggaagcccttctggccatttgtcttcatggtgccagaactagtcaacagaagatggaattggagttacctaatcagaacttgtctgtggaaagtatattatttgaaatgagggaccatctttcccagtcaaaggtgattgaaacacaactagcaaagcctttatttgatgccctgcttcgagttgccctcgggaattattcagcagattttgaacataatgatgctatgactgagaagagtcatcaatctgcagaagaattgtcatcccagcctggtgatttttcagaagaagctgaggattctcagtgttgtagttttaaacttttagttgaagaagaaggttacgaagcagatagtgaaagcaatcctgaagatggcgaaacccaggatgatggggtagacttaaagtctgaaacagaaggtttcagtgcatcaagcagtccaaatgacttactcgaaaacctcactcaaggggaaataatttatcctgagatttgtatgctggaattaaatttgctttctgctagtaaagccaaacttgatgtgcttgcccatgtatttgagagttttttgaaaattattaggcagaaagaaaagaatgtttttctgctcatgcaacagggaactgtgaaaaatcttttaggagggttcttgagtattttaacacaggatgattctgattttcaagcatgccagagagtattggtggatcttttggtatctttgatgagttcaagaacatgttcagaagagctaacccttcttttgagaatatttctggagaaatctccttgtacaagagcgacagaccagaaggtgcagagtacataaatcctggtgaaagactcatagaagaaggatgtattcatataatttcactgggatccaaagcgttgatgatccaagtgtgggctgatccccacaatgccactcttatctttcgtgtgtgcatggattcaaatgatgacatgaaagctgttttactagcacaggttgaatcacaggagaatattttcctcccaagcaaatggcaacatttagtactcacctacttacagcagccccaagggaaaaggaggattcatgggaaaatctccatatgggtctctggacagaggaagcctgatgttactttggattttatgcttccaagaaaaacaagtttgtcatctgatagcaataaaacattttgcatgattggccattgtttatcatcccaagaagagtttttgcagttggctggaaaatgggacctgggaaatttgcttctcttcaacggagctaaggttggttcacaagaggccttttatctgtatgcttgtggacccaaccatacatctgtaatgccatgtaagtatggcaagccagtcaatgactactccaaatatattaataaagaaattttgcgatgtgaacaaatcagagaactttttatgaccaagaaagatgtggatattggtctcttaattgaaagtctttcagttgtttatacaacttactgtcctgctcagtataccatctatgaaccagtgattagacttaaaggtcaaatgaaaacccaactctctcaaagacccttcagctcaaaagaagttcagagcatcttattagaacctcatcatctaaagaatctccaacctactgaatataaaactattcaaggcattctgcacgaaattggtggaactggcatatttgtttttctctttgccagggttgttgaactcagtagctgtgaagaaactcaagcattagcactgcgagttatactctcattaattaaatacaaccaacaaagagtacatgaattagaaaattgtaatggactttctatgattcatcaggtgttgatcaaacaaaaatgcattgttgggttttacattttgaagacccttcttgaaggatgctgtggtgaagatattatttatatgaatgagaatggagagtttaagttggatgtagactctaatgctataatccaagatgttaagctgttagaggaactattgcttgactggaagatatggagtaaagcagagcaaggtgtttgggaaactttgctagcagctctagaagtcctcatcagagcagatcaccaccagcagatgtttaatattaagcagttattgaaagctcaagtggttcatcactttctactgacttgtcaggttttgcaggaatacaaagaggggcaactcacacccatgccccgagaggtttgtagatcatttgtgaaaattatagcagaagtccttggatctcctccagatttggaattattgacaattatcttcaatttccttttagcagttcaccctcctactaatacttacgtttgtcacaatcccacgaacttctacttttctttgcacatagatggcaagatctttcaggagaaagtgcggtcaatcatgtacctgaggcattccagcagtggaggaaggtcccttatgagccctggatttatggtaataagcccatctggttttactgcttcaccatatgaaggagagaattcctctaatattattccacaacagatggccgcccatatgctgcgttctagaagcctaccagcattccctacttcttcactactaacgcaatcacaaaaactgactggaagtttgggttgtagtatcgacaggttacaaaatattgcagatacttatgttgccacccaatcaaagaaacaaaattctttggggagttccgacacactgaaaaaaggcaaagaggacgcattcatcagtagctgtgagtctgcaaaaactgtttgtgaaatggaagctgtcctctcagcccaggtctctgtcagtgatgtcccaaagggagtgctgggatttcca

SEQ ID NO: 113729 - DNA, 11406 bp, Artificial Sequence
  derived and/or modified sequence
atgagcaccgacagcaacagcctggcccgggagttcctgaccgacgtgaacaggctttgcaatgctgtggttcagcgggtggaagcgagggaagaggaggaggaagaaacccacatggcaactctgggacagtatctggttcacggccggggttttctgctgctaaccaagctgaacagtattatcgatcaagctttgacctgcagggaggaattgctaaccctgctgctgagcctcttgcccctcgtctggaaaatcccagttcaggaggaaaaggccacagattttaaccttcccctgtcggccgatattattcttaccaaggaaaaaaatagctctagccagaggagcacccaagagaaattgcatcttgagggttcagcactcagcagccaggtgtcagcaaaagtgaacgtcttccggaaaagcaggagacaacgaaagatcacacaccggtacagcgttcgggacgctcgtaagactcagcttagtacttctgatagcgaggccaactctgatgagaaggggattgccatgaataagcacaggagaccccaccttctgcatcacttcttaacatcatttccaaagcaagaccacccgaaggctaaactcgatcggttggcgacaaaagagcagactccgccggatgctatggcattggagaactctcgcgagattatcccaaggcaaggatcaaacaccgacattttatctgaaccagccgccttatccgtgataagtaatatgaataattctcccttcgatctgtgtcacgtgctcctgagtttgttagagaaagtttgtaagtttgatgtaaccttgaatcacaattcgcctctggcagcctcggtggtccccactcttaccgaattccttgcgggctttggggactgctgttctttatcggataaccttgagtcccgggtggtttcggcaggctggactgaggagcctgtggccctgatccagcggatgctgttcagaacagtgctgcatctgctctccgtggatgtcagtacggccgaaatgatgcctgagaatctccgcaaaaatttaaccgagctactgcgggctgcgctgaaaatacgcatctgcctggagaaacagcctgatcctttcgctcctagacagaagaagacactgcaggaagtccaggaagacttcgtgttctctaagtaccgccacagagccctgctgctccccgagctgttggagggcgttcttcaaattttgatttgctgtctgcagtcagccgcctccaacccattttacttctcacaggccatggatcttgtccaggagtttattcagcaccatggctttaacctgtttgaaacagccgttcttcagatggagtggttagtgctccgggatggagtgcccccagaggctagcgagcacctgaaggcactgattaactcagtaatgaaaatcatgtctactgtgaaaaaggttaaatccgagcagctgcaccactctatgtgtaccagaaaacgccatagacgatgcgagtattcacattttatgcatcatcaccgagacctgtctggactcctggtgagcgcctttaaaaaccaggtgagcaagaacccattcgaggaaacagcggatggggatgtttattaccccgaacggtgctgttgcattgcagtttgcgcccaccaatgtctccgcctgctccagcaggcctctttatcttcaacctgcgtccagatcctctcaggcgtgcataatatcgggatttgctgttgcatggaccctaaatccgttattatccctttactccacgcgtttaaactgcccgcattaaaaaatttccagcagcacattctcaacatcttaaataaactaatactcgaccagttgggcggggccgaaatttcacccaaaattaaaaaagccgcctgcaacatttgtacggtagactccgaccagctagctcagctggaagagaccctccagggaaacctgtgtgatgctgagctgagttcctctttgagtagcccctcgtatcgctttcagggcattcttccatcatcaggcagtgaggacctgctgtggaaatgggacgccttgaaggcctaccagaactttgtgtttgaggaagatcgactgcattctattcagattgctaaccacatatgcaacttgatccagaaagggaacatcgtggtgcagtggaagctttataattatattttcaacccggtgctgcagagaggcgtagagctggctcaccactgccagcacctgagcgtgacaagtgctcagtcgcacgtgtgcagccatcacaaccagtgcctacctcaagacgtgctacaaatatatgtcaagactctaccaatccttctgaagagccgcgtcattcgcgatctgttcctctcatgcaacggagtgagccaaatcattgagctgaactgtttaaacggcatccggagtcactcactcaaggctttcgaaaccttgattatctccttaggtgagcagcaaaaagacgccagcgtgccggacattgacggtatcgacattgagcagaaagagctgagttctgtccacgtgggcaccagcttccaccaccagcaggcatatagcgacagcccacagtctctgagtaagttctatgctgggctgaaagaagcctatccgaagaggcgcaaaaccgtcaaccaggacgtccatattaatacaattaacctctttctttgtgtcgctttcctttgcgtatccaaagaagccgagtccgacagagagagcgccaacgactccgaagatacctcaggctatgacagtactgcttcagagcctctgagccacatgttgccgtgtatttcattggaaagtctcgtcctgccctctccagagcatatgcaccaggctgcagatatttggtctatgtgccggtggatctacatgttgagcagcgtgtttcagaaacagttctacaggcttggagggttcagggtttgccataagctcatattcatgatcatccagaaactttttcggagccacaaggaggagcaaggcaagaaggagggggatacaagtgtgaatgagaaccaggacctgaatcgcatctcccaacctaagcgcacaatgaaggaagacctgttgtctctcgcaattaagagtgatcccatcccctcagaattgggctcactgaagaagtcagccgattccctgggtaaattagagctgcagcacatctcttcaatcaacgtagaggaggtctcagcaaccgaggccgcacctgaagaggctaagttgttcacctctcaggaatcggaaactagcctgcaaagtatccgactgctcgaagccctgctagccatctgtctgcatggagcccgcacgtcccagcagaaaatggagctcgagttgcccaatcagaatctctcagtcgagtccatcctgttcgagatgagagaccacctctcccagtctaaagtaatcgagacgcaacttgccaagccgctatttgatgccctcctgagggttgcactgggcaactactcagctgacttcgagcataacgacgcgatgacagaaaagagccatcagtctgcggaagagctgtcaagccagccgggcgatttctccgaggaggctgaagatagccaatgctgctccttcaagctgctggtagaagaggagggctatgaggctgattcagaaagtaatccagaagatggcgaaacacaggacgatggggtggatctgaagagcgagaccgaaggtttttccgcatcctccagtcctaacgatctgctggagaacttaactcagggtgaaataatctaccccgagatttgcatgctcgaactcaatttactgtccgcatcaaaggctaagctggatgtcctggcccacgtgtttgaaagtttcctcaagatcattcgccaaaaggaaaaaaacgtgtttcttctaatgcagcaggggacagtgaagaatctgctgggcggattcctctccattctgactcaggacgatagcgatttccaagcatgtcagagggtactcgtcgatctcctagtgagtctgatgtcctcgaggacctgctccgaagaactcacattgctgctgcgaatctttttagagaagtcaccctgcacaaaaattctcctgctcggcattctgaaaattatcgaatccgatacgaccatgagtccaagtcagtacttgacttttcccctgctccatgctcccaacctttccaatggcgtgtcttcccagaaataccccggcattctgaattccaaggcgatgggcctgctgaggcgcgcacgcgtttcccggtccaaaaaagaagccgaccgggagtccttcccacatcgcctgttatcctcctggcacatcgcgccagtgcatcttccactgcttggccagaactgttggcctcacctgagtgagggctttagtgttagcttatggtttaacgtggaatgcattcacgaggccgaatccactactgaaaaaggcaagaagatcaaaaagcggaacaagagcctgatcctacccgactccagcttcgacggaactgagtctgatcggcccgaaggcgcggagtacatcaaccctggcgaacgtttaatcgaggaaggatgcatccatatcatttctttgggtagcaaggctcttatgatccaggtctgggccgatccccataacgccacactcatttttcgagtatgcatggattccaatgatgatatgaaggctgttctcctcgcccaggtcgaatcccaggagaatatcttccttccatctaagtggcagcacttggtcctgacctacttgcagcagccccaggggaagcgcaggatacacggtaagatttcgatttgggtgagtggccagcgaaagcccgacgtgacacttgacttcatgttaccaaggaagactagtctctccagtgactctaacaagactttctgtatgatcgggcactgcctgtcgtcacaggaagagtttctacaactggctggcaaatgggacctgggcaatctactgctttttaacggcgccaaagttgggtctcaggaggcattctatctctacgcctgtggccctaaccatacaagcgtgatgccttgcaagtacggcaaaccagtgaatgattattctaagtatatcaataaggagatcctccgctgcgagcagatccgcgagctcttcatgactaagaaggatgtggacatcgggctgcttatagaatctctgtctgttgtgtacacaacatactgtccagcccagtatactatctacgaacccgttatcaggctcaagggccagatgaaaacccagttgagccagcgccccttttccagcaaagaagttcagtcaatcctgctggaacctcaccatctgaagaacttgcaacctaccgagtacaaaaccattcaaggcatcctgcacgagattggcggcactggcatcttcgtctttctctttgcccgagttgttgaactctccagctgtgaggaaacccaagcgctcgccctgagagttatactgtcgctaattaagtacaaccagcaacgtgtgcatgagttagaaaattgtaatggattgtccatgatccaccaggtgctcattaagcaaaaatgtattgtgggcttctatattctgaagacgttgttggaaggctgttgtggggaagatattatctacatgaatgaaaacggagaattcaaactcgacgtagacagcaacgccattatccaagatgtgaagctgctcgaagagctgttactcgattggaaaatctggagcaaagcggagcaaggcgtctgggaaacactgctggccgcgttggaggtgcttatcagggctgaccaccaccagcagatgttcaatatcaaacaactgcttaaggcccaggtggttcatcattttctgctgacatgtcaggttctgcaggaatacaaagaggggcaattgacccccatgccgagagaagtctgtcggtcctttgtgaagattatagcagaggtcctgggatcaccgccagatctagagctactgacaatcattttcaatttcctactcgcagtccacccccctactaatacttatgtgtgccataatcctacaaacttctacttctccctccatatcgacggaaagatcttccaggaaaaggtgaggtcaatcatgtacttgcggcattcatcttctggaggcagatccttgatgagtcctggttttatggtgataagtccctccggcttcactgcctcgccgtatgaaggggaaaattcctctaatatcatcccacagcagatggcggcccatatgcttaggtcaaggtccctcccggctttccctacgtcatctttactgacccaatcacagaagctgaccgggtctctggggtgcagcattgacaggctgcagaacatcgctgacacctacgtggcgacccaatccaaaaagcagaattcgctgggttcctccgatacccttaagaagggaaaagaggacgcctttatttcatcctgtgaaagtgcaaaaactgtctgcgagatggaggccgttttgtctgctcaagtgtctgtgtccgatgtgccaaagggcgtgctgggtttcccggtggtgaaggcagaccataaacagctgggggctgagcccaggtccgaagatgattctcccggcgatgagtcatgcccgcgtcgtcctgactatctcaagggcttagccagtttccagcgcagccatagcacaatagccagtcttggcttggcattcccatcccagaacgggtcagctgcagttgggcgctggcccagtctggtggatcgaaatacagatgattgggaaaatttcgcttactccctgggctacgagcccaattataaccgaacagcgtctgcgcatagcgtgacagaagattgcctggttcccatttgttgcggtttgtacgagctgctctccggagttcttcttatactgcccgacgttctcttagaagatgtcatggataaactcatccaagctgatactctcctcgtgctggtgaaccatccatcacctgccatacagcagggtgtgatcaagcttcttgatgcatattttgccagagcctctaaggagcaaaaggataagtttctgaaaaataggggctttagcctgctagccaaccagctgtacttacacagaggtacacaggagctgttggaatgcttcattgagatgttttttgggcgacacatcggactagatgaggagttcgacctggaggacgtgcggaatatgggtctttttcagaagtggtcagttattccaattctcggactcatcgaaaccagcctctatgataatattctcttgcataacgccctgcttcttctgttgcagattcttaattcctgctccaaggtggccgacatgctgctcgacaacgggttactgtacgtcctgtgcaataccgtggctgccctgaatgggctcgagaagaacattcccatgtctgaatacaagctgctggcttgcgacattcagcagctgtttattgcagtgacaatccacgcatgttcctcatccgggagccaatacttccgggttattgaagaccttattgtgatgttaggttatttacagaactctaaaaacaaacgcactcagaacatggctgtagcactgcagctgagagtgttgcaggctgctatggagttcatccgaactaccgccaatcatgacagcgaaaatctgactgactccctccaaagtcccagtgcacctcaccacgccgtggtgcagaaaagaaagtctatcgctggccctcgtaaatttccgctcgcacagaccgagagcctgcttatgaaaatgcggtccgtggcaaacgatgagctgcatgtcatgatgcagaggcgaatgtctcaggaaaatccgagccaggccaccgagaccgaattagctcagagactacaacgtctcacagtgcttgctgttaaccgcattatttatcaggagtttaactcagatatcattgatatccttagaacacccgaaaacgttactcagtccaagacatctgtgtttcagacagaaattagcgaagaaaacatacatcatgagcaatcttcagtcttcaatccattccagaaggaaattttcacctaccttgtcgaggggttcaaggtctccatagggagctctaaagcctccggtagtaaacagcagtggactaagattctgtggagttgtaaggagacttttcgtatgcaattagggcggctgttagtgcatatcctgtctcctgctcacgccgcacaggaacggaagcagatctttgaaatcgttcacgagccgaaccaccaggaaatcctgcgcgattgtctctcaccaagcctacaacacggagctaagttggtgctctatctttctgagctgattcacaatcaccagggggaactgacggaagaagagcttggaaccgcggagttgttgatgaatgcgttgaaattatgtggccacaagtgtattccaccctcagccagtactaaggccgacctgatcaagatgatcaaagaggaacaaaagaaatatgagaccgaggaaggggttaataaagctgcatggcagaagactgtgaataacaaccagcagagcctcttccagagactggactcaaagagtaaggacatcagcaaaattgcagcagatattactcaggcagtgagcctcagtcagggaaacgagcggaaaaaggtgattcagcacataaggggtatgtacaaagtagacttgagcgcatccaggcactggcaagagctgattcaacagctgacccacgacagggccgtttggtatgacccaatctattacccaacatcatggcagctggatcctaccgagggacctaatagagagcggaggaggctccagaggtgttacttgacaatacccaataagtacctgctgcgcgatcgtcagaagtccgaagatgtggtgaagccccccctctcttacctgttcgaagacaaaacccactcctccttcagcagcacagtgaaggataaagccgctagcgaatccattagagtcaataggaggtgtatatccgtggctccatctcgggaaacagcaggggagctgctcctggggaagtgtggcatgtattttgtggaggacaacgcatcagacaccgtggaatcttcttccctccagggtgaacttgaacccgcttctttcagttggacatatgaagaaattaaagaggttcacaagcggtggtggcagttacgggacaatgccgtcgaaatttttctgaccaacggacgtacactgcttctggcattcgacaataccaaagttagagacgacgtgtatcacaacatcctaaccaacaatttaccaaatcttctcgagtacgggaacatcacagctctaactaatctgtggtatactggccagataactaatttcgaatacttaacccacctcaataagcacgcaggcagaagcttcaatgacctaatgcagtaccctgtgttcccctttattctggctgactatgtgtcagaaacgctggatttaaatgacctgctgatttatcgtaacctgagcaagcctattgctgtccaatataaggaaaaggaagaccgctacgtggatacctacaagtatctcgaggaagaatacagaaaaggtgcacgagaggacgatcctatgcctccagtccagccctatcactacggatcccactactcaaacagtggcacagtgctgcacttcctggtgcggatgcctccttttacgaaaatgttcctggcttaccaggaccagagcttcgacatccccgaccgcacatttcactctaccaacactacgtggaggctttcttcgttcgagtccatgactgacgtgaaggagctaattcccgaatttttttatctgcctgagtttctggtgaatcgagaagggttcgattttggcgtgaggcaaaacggggaaagagtgaaccacgtaaaccttccgccatgggccaggaacgatccaaggttgtttatcctaatccaccgtcaggccctggagtctgactatgtgtcacaaaatatctgtcagtggatcgatctcgtcttcgggtataaacaaaagggaaaggcctccgtgcaggcaatcaatgtctttcatccagccacatacttcggcatggacgtgagcgccgtggaagacccagtgcagcgcagggctttagagacaatgatcaagacatacggccagactccgcgacagctgttccacatggcccacgtctcaaggccaggcgccaagttgaacatagagggcgaactgccagcagccgtgggactgctggttcagttcgcgttcagggagactcgcgagcaagtcaaggagattacctatcccagtcccctgtcttggattaaagggctgaagtggggggagtacgttggaagcccttcagcaccagtgccggtagtgtgtttcagtcagccacacggagaacggttcggatcattgcaggcactgccaacccgcgctatctgcggcctgtccagaaacttttgcctcttaatgacctacagcaaggaacaaggtgtgagatctatgaactctacggatattcaatggtcggccatactgtcttgggggtacgccgataatatcctgaggcttaagagcaaacaaagcgagcccccggttaacttcatccagtcctctcagcagtatcaggtgaccagctgtgcttgggtgcccgatagctgtcagttgttcactggcagcaagtgcggtgtgataaccgcctataccaatcgcttcacctcatctacaccatccgagatcgaaatggagacccagattcatttgtatggccatacagaggaaattacgtccctgtttgtatgcaaaccttatagtattttaatctccgtatcacgtgacggcacctgcatcatttgggatttgaacaggctatgttacgtgcaatctctggctggtcacaagagtcctgttacggccgtgtccgcctctgagactagtggcgatatagcaaccgtgtgcgactccgccggcggcggaagcgatctgaggctgtggacagtgaatggcgacctggtcgggcatgtacactgcagggagattatttgcagcgtggcttttagtaatcagccggagggggtctcaatcaacgtgattgcaggtggcctggagaatggaattgttaggttatggtccacctgggatttaaaaccagtgcgagagattacattccctaagtcgaacaagccaattatttccctcacattcagctgtgatggacatcacttgtataccgctaattcagacggcaccgtaatcgcttggtgcagaaaagaccagcagcgtcttaaacaacccatgttttacagttttctcagcagctatgccgcaggttag

SEQ ID NO: 113730 - DNA, 11406 bp, Artificial Sequence
  derived and/or modified sequence
atgagcaccgacagcaacagcctggcccgggagttcctgaccgacgtaaatcggttgtgcaacgcggtggtgcagcgcgtggaagctagggaagaggaggaagaagaaacacacatggccacactgggacaatatctggttcacggtcggggattcctgctcctgactaaactgaacagcatcatcgaccaggctctgacctgtcgcgaagagctgctgacactgctgctatctctgctgcctctcgtttggaaaatccccgtgcaagaggaaaaggcaacagatttcaatctaccactgtccgccgacatcattttaacaaaagagaaaaactcatcttcacagaggagcactcaggaaaagcttcatttggaaggaagtgctttgtccagtcaagtatccgctaaggttaacgtttttcgcaagagccggcgccagcgcaagataacccatcgttattccgttcgagacgcgcggaagacccagttgagtacgtcggatagtgaagccaactccgatgagaaaggaattgccatgaataagcaccgcaggcctcacctgctgcaccacttcttaacaagcttcccgaagcaggatcaccctaaggcaaaactggatagactggccacgaaagaacagaccccccccgatgcgatggctctggagaacagtcgcgagattattcctcggcaaggcagcaataccgatattctctcagagcccgctgctctgagtgtgatctcaaatatgaacaactctcccttcgacttgtgccacgtcctgctttccctgctcgaaaaagtttgcaagttcgatgtgactctgaaccacaactccccactggcagcttcagtagtgcccacacttacagaattcctggctggtttcggtgactgctgctccctatctgataatctcgagtcgcgcgtggtctctgccggatggacagaggagcctgtggccttaatccagagaatgctgtttcggactgtgcttcatttgctttcagtcgacgtgagcaccgctgagatgatgccggagaacctgcgcaagaaccttaccgagctgctgagagcagcgctgaaaatcagaatctgcttggaaaagcagcctgacccattcgcacctcgccaaaaaaagaccctgcaggaggttcaagaggacttcgtgtttagcaagtatcgccatcgcgcactgcttctgccagagctgctggagggcgtactgcagatcctgatctgctgcctacagtctgcagcctccaacccattctacttctcccaggccatggaccttgtgcaggagttcattcagcatcacggctttaacttatttgagacagccgtcctgcagatggaatggctcgtcctgcgtgacggggtgcctcccgaagccagcgagcatctgaaggccctgataaacagcgttatgaagattatgtctacagtgaagaaagtcaaatcagagcaactgcatcacagcatgtgtacaaggaaacggcaccggcgctgtgaatactcgcattttatgcaccatcacagggacttgagtggactgttagttagcgcgttcaaaaaccaggtctctaagaacccttttgaggagaccgccgacggggatgtctattaccccgagcgatgctgttgtattgcggtctgcgcccatcaatgtttgcggctgctccagcaggctagtctgtcttctacatgcgtgcagattcttagcggtgtccataatatcggaatttgctgctgcatggacccaaaatctgtgatcatccccctgctgcacgccttcaagttgccagcattgaaaaacttccagcagcacattttgaatatccttaacaaattgattctggaccagcttgggggcgcagagatttctcccaagatcaaaaaagctgcttgtaacatttgtacagtggattctgaccagctggctcagctcgaggagaccctccaggggaatctttgcgatgcggagctgtcttcgagcttgagcagcccttcttaccggtttcagggtatcctcccctcctccggttccgaggatctgctctggaagtgggacgcactgaaggcctatcaaaattttgtcttcgaggaggaccggttgcactccatccagatagccaaccacatctgtaacctcatccaaaaaggcaatatcgtggtgcagtggaaactctataattatatttttaacccagtgttacagaggggcgtcgaactggcacatcactgccaacacttgtccgtgacgagcgcacagagtcacgtgtgctcacaccataaccagtgtctgccccaagatgtcctgcaaatatacgtcaaaacacttccaatcttgctaaaatctcgggttatccgggacctcttcttgtcttgcaacggggtgagtcagattattgagctcaattgtttgaatggcattaggtctcatagtctcaaagccttcgagaccctgatcatatctcttggagaacagcaaaaggatgccagcgttccggatatcgacggaatcgacattgagcaaaaggaactgtcctctgtccatgttggcacttcttttcatcaccaacaagcatattctgacagccctcaaagtctctcgaaattctatgccgggttaaaggaggcctatcccaagcgcaggaagaccgttaaccaggacgtgcacattaacactatcaacctgtttctgtgtgtagccttcctctgcgtctctaaggaagctgaatcagaccgagagagcgcaaatgatagcgaggacacaagtggctacgacagtactgcatctgagcctctgtcccacatgcttccttgcatatcccttgagtccctagtcttgccctcaccagagcacatgcaccaggcagccgacatttggagcatgtgtcgatggatatatatgctttctagcgttttccagaagcaattttataggctggggggatttcgggtgtgtcacaagttgattttcatgatcatacagaaactttttcgctcccacaaagaggagcaggggaaaaaagagggggatacatcggttaatgaaaaccaggatctgaatcggatttctcagccaaagcggactatgaaggaggatctactgagtctcgctataaagagtgatcctattccctctgagctgggcagtctaaagaagtccgctgactccctgggcaagctggaattacaacatatctcttctattaacgtggaggaagtgtcagccaccgaagcagctcccgaggaggcaaagctgttcacctcacaggagtcagaaacaagcctgcaaagcattcgcctgctggaggccctgttggccatctgcttgcacggtgctcggacgtctcaacagaaaatggagttagagcttcctaatcagaacctgagcgtcgagtccattctgtttgaaatgagggatcacttgtctcagtcaaaggtgattgaaactcaattggccaaaccactattcgacgcactactgcgagttgctttaggtaattatagtgctgattttgagcacaatgatgctatgaccgaaaagtctcaccagagcgctgaggagctgagtagccaaccaggtgacttcagcgaagaagccgaggattcccagtgctgtagctttaaactgctggttgaggaagaggggtatgaggctgacagtgagagtaatcccgaagacggcgagactcaggacgatggtgtcgatctgaaaagcgagactgaaggctttagcgcgtcatcaagccctaatgacctcctggagaacctgacccagggcgagataatctatccagagatttgtatgctcgaactgaacctgttgagtgcctcaaaggccaagttagatgtattggcccatgtgtttgaatctttccttaaaatcatacgtcagaaggagaaaaatgtattcttgctcatgcagcagggaaccgtcaagaatctgctcggaggatttttgtccatcctgacccaggatgatagtgattttcaggcttgtcaacgggtacttgtggatttactggtctctctgatgtcctcacgcacttgtagtgaggagctcaccttgctcctgagaatattccttgaaaagagtccatgtaccaaaatactgctgctcggaatcctgaaaatcattgagagcgacaccacaatgagtccaagccagtatctgaccttccctttgctgcatgcccccaatctgtctaatggagtctccagtcagaagtacccaggaatcctgaactccaaagccatggggcttcttaggcgcgcccgggtctcccggtcgaaaaaggaagctgaccgtgagtcattcccacacaggctgcttagctcgtggcacatagcacctgttcaccttccccttctcggacagaactgttggccacatttgagtgaggggttctcggttagcctgtggttcaatgtcgaatgcatccatgaggccgagtctactactgagaagggaaaaaaaatcaagaagagaaataagagcctgatcctccccgacagcagttttgatgggactgagtctgatcgaccagagggggcggagtatattaatcccggcgagagacttatagaggaaggctgcattcacatcatatcactgggttcgaaagcgctcatgatccaggtttgggccgacccacacaacgccaccctaatatttcgagtgtgtatggattctaatgacgatatgaaggccgtgctgcttgcccaagtggagagccaggagaatatcttccttcccagcaagtggcagcatcttgtactgacctatctgcagcagccccagggcaaacggagaattcacggcaaaatcagcatttgggtctctggacaaaggaagcctgacgtgacacttgattttatgctgccacgcaaaacaagcctgagtagcgactccaataaaacattctgtatgatcggtcattgcctcagctcccaggaagaattcttgcagttggcaggcaagtgggacctgggtaatctcctgctgtttaatggagcgaaggtgggatcacaagaagcattctacctttatgcctgcggacccaatcataccagcgtgatgccatgtaagtatggtaagccagtgaatgactactcaaagtacatcaacaaagaaatcctgcggtgtgaacagatccgcgagctgtttatgacgaagaaggacgtagatatcggtctcctgatcgagagtctttctgttgtatataccacctactgtcctgcacagtatacgatctatgagcccgtcatcagacttaagggacagatgaagactcagctgtctcagcggcccttctcttcaaaggaggtccaatctatccttctggaaccacaccacctcaagaatctgcagcctaccgaatacaagaccatccaggggattctacacgagataggaggaacggggatcttcgtgttcctcttcgctcgcgtggtggagctgagctcgtgcgaggaaacacaagcgctagcgctgcgggtgatcctgtccctcatcaaatacaatcaacaaagggtgcatgagctggagaactgcaacggtctttccatgattcatcaggtgctcattaagcaaaaatgtatagtgggtttctatattctgaaaacactgctggaaggctgttgtggcgaagatattatctatatgaatgaaaatggcgaatttaaactggatgtggatagtaatgccataatccaggacgttaagttgctggaagaactacttctcgactggaagatttggagcaaagcggaacagggcgtctgggagacgctcctcgcagcgctggaggtcctaattagagcagaccaccatcagcaaatgtttaacattaaacaactactgaaggcccaggtcgtgcatcatttcctgctcacctgccaggtgctgcaggagtacaaggagggacagctcactcccatgccacgtgaagtctgtcggtcttttgtgaagatcatcgctgaagtgctgggtagcccacccgatttggaattacttacgatcatcttcaatttcctattagctgttcacccccccacgaacacgtacgtatgtcacaacccaacgaacttctacttctccctgcacattgatggcaaaatttttcaagaaaaggtgaggagtatcatgtatctgcgtcactcttccagtgggggccggtcccttatgtccccgggtttcatggtcatttctccctcaggcttcactgcctcaccctatgagggcgaaaacagcagcaacatcatcccacagcaaatggccgctcatatgctgcgctcaagatcgctgccagcctttccaacgagttctctgctgactcagtctcagaagttgaccggctctttgggctgtagtatcgatcgccttcaaaatatcgctgacacctatgtggctacacagtcgaagaagcagaattccctggggtcatcagatacactgaaaaagggcaaggaggacgctttcatctcctcctgcgagtcggccaagacggtgtgcgaaatggaggctgttctgtccgcccaggtctcagtaagcgacgtgcccaaaggcgtgttgggtttccctgtcgtgaaggctgatcataagcagttaggagccgagcctcgctcagaagacgactccccaggggatgagagttgccctcggcgacccgactacctgaaaggtttagcatcttttcaaagaagtcactctactatcgctagcctgggactggcatttcctagccaaaacggatctgccgcggtgggacgctggccatcattggtggaccggaatacggacgattgggaaaattttgcttactcactgggctatgaacctaactacaatcggactgcttctgcacattcggtaaccgaggattgcttggtccccatttgctgcggactatacgagctgctgtccggggttctcctgattcttccagacgtgctcctggaagatgtgatggacaagctcatccaggctgacacacttttggttctggtcaatcatcccagtcctgcgatccagcaaggcgtgatcaagcttctcgacgcctacttcgctcgcgcctccaaggagcaaaaggataaattcttgaagaaccggggtttttccttactggccaatcaattgtatctgcacagagggacacaggagctgttagaatgcttcattgaaatgtttttcgggcgccatattggcctggatgaagagttcgatctggaagatgtgaggaatatgggcctgttccagaaatggtccgtcatccctatcctgggccttatcgagaccagcctatacgacaacatcctgctccacaacgccctcctcctgcttctacagattcttaactcttgtagcaaagtcgctgacatgctcctggataatggtctgctctatgtgctctgtaacaccgtcgcagcattgaatggactcgagaagaacatccccatgagcgagtataagcttctggcctgcgacatccagcaactgtttatcgccgtgactatccacgcctgctcaagttctggctcccaatactttagagttatagaagacctcattgtgatgctgggctacttgcaaaacagtaaaaataaacgaacacagaacatggccgttgccctgcaattgcgagtgttgcaggcagctatggagttcatcagaacaaccgcaaatcacgactctgagaacctgacagacagcttgcagtcaccctcggcccctcaccacgctgtcgtgcaaaaaaggaaatctatcgccggaccgcgcaaatttcctctcgctcagaccgaatctttactgatgaagatgcggagtgtggctaacgacgagcttcacgtgatgatgcaaaggcgaatgtctcaggaaaacccatctcaggctactgagacggagctcgcccaaagactccagcgcttgacagttctggccgtgaatcgcatcatttatcaggagtttaactccgacataatcgacatacttcgtacgccagaaaatgtcacacagagtaagacgagtgtctttcagaccgagatctctgaggagaatatacaccacgagcaaagtagtgtgtttaatccattccagaaggaaatttttacgtatctggtggaaggattcaaggtgagcatcggttcatcaaaagcgtccggaagtaagcagcagtggacgaaaattctatggagctgcaaggagacatttcggatgcagctgggtagactcttggtgcacattctgagccccgcgcacgcggctcaggaaaggaagcaaatcttcgagatcgttcacgaacctaaccatcaagagatactccgggactgcttgagtccctcattacagcatggagccaaactcgtgctatatttaagcgagttgatccacaaccatcagggagaactgacggaggaggagctcggaacagccgaacttcttatgaacgctctgaaactttgcgggcacaaatgtatccccccatcagcctcaaccaaagcagatctgataaagatgatcaaggaggaacaaaaaaagtacgaaacggaagaaggcgttaacaaggctgcgtggcaaaagactgtaaacaataatcaacagagcctcttccagagactggacagcaaaagcaaagacatcagcaagatcgctgctgatattactcaggcagtgtcacttagccagggcaacgaacgcaagaaagttatccagcatataagggggatgtacaaggtggatttaagcgcttcacggcattggcaggagctcattcagcagctcacacatgatcgcgcagtgtggtatgatccaatttattaccctacctcctggcagctcgatcccacagagggcccaaaccgggaacgacgacggctccagaggtgctacctgacaattcctaataaatacctcttacgagacaggcaaaagagtgaagatgtggtcaaaccacctctatcgtatctgtttgaggataagacccattcttcctttagcagtacagtgaaagacaaagcagctagcgagtccatacgcgtgaaccggcgctgtatctccgtcgccccttccagggaaacagccggggagctcctactgggaaagtgcggcatgtatttcgtcgaagataatgctagcgataccgtggaaagttcttcactacagggcgagctcgagcccgcttctttctcgtggacctacgaggagatcaaagaggtccacaagagatggtggcagttgcgggataacgctgtggaaatttttttgacaaacggtcggacactcttactggcattcgataatacaaaagtgagagacgatgtgtatcataatatacttacaaataatctccctaacctgttggagtacggtaatatcacagcccttacgaacctctggtatacagggcaaatcaccaattttgagtatctaactcatttaaataaacacgcaggaaggtctttcaatgatttgatgcagtaccccgtcttcccattcatcctggccgactacgtcagtgagacccttgacctcaatgacttattgatctaccggaatctctccaaacccatagcagtgcagtacaaagagaaggaggacaggtatgttgatacatacaagtatttagaggaggagtatagaaaaggagcccgtgaagacgacccaatgccccctgtacagccctatcactatggctcgcactactccaattccggcaccgtcctacactttcttgtgcggatgcctcccttcaccaagatgttcctggcttatcaagaccaatcattcgacatccctgaccgaacctttcacagtacaaacacgacctggaggctgtcctcatttgagagtatgacagatgtaaaggaattgattccagagtttttctatctgcccgagttcttggtaaatcgagagggattcgattttggggtgcgccagaatggagagcgggttaatcacgtgaatttacctccttgggcccggaacgacccacggttatttatcctcatacaccgccaggctctggaatccgactacgtctctcagaacatttgccaatggatcgatctggtgttcgggtacaaacagaagggaaaggcctccgttcaggccataaatgtttttcatcccgctacctacttcgggatggacgtgtccgctgtggaagatcccgtacagcgcagagccttggaaacaatgatcaagacctacggccagacccccaggcagttgtttcacatggctcacgtttcccgcccaggcgctaagctgaacatcgaaggcgaacttcctgctgctgtcgggctgctcgttcagttcgcctttcgggaaactcgagagcaggtgaaagaaataacttatccctcccctctgagctggataaaaggcctgaagtggggagagtatgtcggtagcccctcagcgcccgttccagtggtgtgtttctcgcagccacatggagaaagatttggctcgctacaggccctcccaacccgggctatatgcggcttgagcagaaacttttgcttgcttatgacctattccaaggaacaaggcgtgaggagcatgaactcaactgacatacaatggagtgctattctgtcctggggctacgccgacaacatactgaggctgaaatctaaacagtccgagcccccagtcaattttatccaatctagccaacagtaccaggtcactagctgcgcatgggtgccagattcctgtcagctgttcacaggctctaaatgcggcgttattaccgcctacacaaacagatttacatcctccactcccagtgagattgaaatggaaacccagattcacttatatggccacacggaagaaataactagtctgtttgtttgtaaaccttacagcattctgatctctgtgtcccgagacggcacctgcatcatttgggacctcaatagactgtgctacgttcaaagcctagccgggcacaaaagtccagtcaccgctgtcagcgcatccgagacctccggcgacatagccacagtgtgcgattctgcagggggaggctccgacctacgactttggaccgtgaacggcgacctcgtggggcatgtgcactgccgtgaaataatttgttccgtcgctttctctaatcagcccgagggagtctccatcaatgtaatcgccgggggcttagaaaacggaatcgtccgcctgtggagcacctgggatcttaagcctgttcgcgagatcacgtttccaaagtccaataaacctattatctcccttactttcagctgcgatgggcatcacctgtatactgcgaacagcgacggtaccgtcatcgcatggtgccgaaaagaccagcaacggctgaagcagccgatgttctactctttcctatcctcttatgcagccgggtag

SEQ ID NO: 113731 - DNA, 4149 bp, Artificial Sequence
  derived and/or modified sequence
atgagcaccgacagcaacagcctggcccgggagttcctgaccgacgtcaacaggctgtgcaatgctgtagtgcagcgggtggaggccagggaagaggaggaggaagagacccacatggctactttggggcaatatctggtgcatggcagaggctttctgctgctaactaaactcaatagcattatcgatcaagctttgacctgcagagaggaactgttgactctgctgctgtccttactgccattggtttggaagattcccgtgcaggaggaaaaagccacggacttcaacctccccctgtcagcggatataattcttaccaaggaaaagaactcatcttctcaaaggagcactcaggagaagctgcatctcgagggcagcgcattgagttctcaagtgagtgcaaaggtaaacgtctttaggaagtctcgtcgacaacggaagatcacacacaggtactccgtgagagacgctaggaaaacacagctaagcacctccgactctgaagcaaatagcgatgagaagggaatcgctatgaataaacaccgtcggccacatttgctccatcacttcctgacttcctttccgaagcaagatcatcctaaggccaaactggatcgcttagccacgaaagaacagacacctccggatgcaatggcactggagaacagtcgggaaattatcccccgccaaggaagcaataccgacatcctgagcgaaccggccgcactctcagtgatctccaacatgaacaactcgccttttgacctctgccatgttctcctgtcattgctggagaaggtctgtaagtttgatgtcacactcaaccataacagcccactcgccgcctcggtcgttcctacccttaccgagttccttgcaggcttcggagactgctgtagcctgtccgataacctcgaatctagggtggtcagtgctgggtggaccgaagagcctgtggccttgattcagcggatgctgttcaggacggtcctgcatctcttgtccgttgacgtttctacagcagaaatgatgccggagaacctgcgaaagaaccttaccgaattgttgagggctgccctgaagatccggatctgtctggagaagcagcctgaccccttcgcaccaagacagaaaaagacattgcaggaagtgcaggaggactttgtcttctccaaatacaggcatagggctctccttcttccggaactgcttgaaggagtgctgcaaattctcatttgctgcctccagtccgccgccagtaatcctttctatttctcgcaggcgatggacctggtgcaggaatttatccagcatcatggatttaatctcttcgaaactgccgtgctccagatggagtggcttgtacttagagatggggtgcctcctgaggctagcgagcacctgaaagccctgattaatagcgtcatgaagataatgtcaactgtaaagaaggtgaaaagcgagcagctacatcatagtatgtgcacacggaagaggcatcgccggtgcgaatatagccactttatgcatcaccacagagacttatccgggctgctggtaagcgcttttaaaaaccaggtgagcaaaaacccctttgaagagacagctgacggggacgtctactaccctgaaagatgttgctgcatcgccgtgtgcgcccatcagtgtcttcgtctgctgcagcaagcgagcttgtcctcgacatgtgtccaaattctatccggggtgcacaatatcggcatatgctgttgtatggatccgaaatccgtgatcatacctctgctgcatgcgtttaaactgcctgccttgaagaatttccagcaacacattctgaacatcctgaacaaactgatccttgaccagctggggggggcagaaatctcccctaagatcaaaaaggcggcctgtaatatctgtacagtggactcagaccagcttgcacaacttgaggaaacattgcagggtaatctctgcgacgccgaactctcgtcctcactgtccagtccatcataccgttttcaaggtattctgcctagttcgggctctgaggaccttctgtggaagtgggacgccctgaaggcctatcaaaacttcgtttttgaggaggaccgtctccactccatccaaatcgccaaccatatttgtaatctcattcagaagggaaacatcgtggtacaatggaagctttacaattacattttcaatccagttctccagaggggagtcgagttggcccatcactgtcaacacctgtctgtgactagtgcccagtcgcatgtgtgttcccaccacaatcagtgcctcccccaggacgtcctgcagatttatgtaaaaacactgcctattttgcttaaatcgcgggtgatccgcgacctctttctgtcgtgcaacggggtctcccagattattgaactgaactgcctgaacggaattaggtcacattctctcaaggcttttgagactctgattattagtctgggcgagcagcaaaaggacgcttctgtgccggatattgatggtatcgacatcgagcagaaggaattgagctctgtgcacgtgggcacctcctttcaccaccagcaggcgtatagtgacagcccacagagcctcagtaagttttatgccgggttaaaagaggcctacccaaagcggcggaagactgtcaatcaagatgtgcatattaacaccattaacctcttcttgtgcgttgcatttttatgcgtaagtaaagaggccgagtccgacagagagtcagccaatgacagcgaagatacctctgggtatgactccactgccagcgagcctctgtcacacatgcttccttgtattagtctagaaagcctggtgttgcctagccctgagcacatgcaccaggcggctgatatctggtcaatgtgccgctggatttatatgttgagttctgtgtttcagaagcagttttaccgtttggggggatttcgggtgtgccacaaacttatattcatgatcattcagaaactgtttaggtcccacaaggaagagcagggtaaaaaagaaggtgatactagcgtgaatgaaaaccaggacttgaatcggatctcacaaccgaagaggacaatgaaggaggatcttctctctttagccattaaatctgatccaattcctagcgagctcgggtcccttaagaagagcgcagactcgctcgggaagcttgaattacaacatatatcttcaatcaacgtcgaggaggtgagcgcgacggaagcagctcctgaagaggcgaagctgttcacttctcaggaaagtgaaacctctctgcagtccattagacttttagaggccctgctggccatttgtctgcatggagcaagaacctcacagcaaaagatggagttggagcttcccaatcagaatctgtccgtggagagtatcctgtttgagatgcgagaccatctgagccagagtaaagtcatcgagactcagcttgctaaacctctttttgacgctctcctaagggtggccctgggtaattattcggccgatttcgagcacaacgacgccatgaccgagaagtctcatcaaagtgcagaagagctttcaagccagccaggcgacttctctgaagaggcagaagatagtcagtgctgttcttttaaacttctagtggaggaagagggctatgaggcagatagtgagtcgaaccctgaggacggggagactcaggacgatggtgtcgatctgaaatcggaaaccgaagggtttagtgccagctcgtctcctaatgacctcctcgagaatctcacacagggcgagattatttacccagaaatttgtatgctggaactgaatcttctctctgcatcaaaagctaaactcgacgtgctggcgcatgtgtttgaatccttcctcaaaattatccggcagaaggagaagaatgtctttctgttgatgcagcaggggacagtgaagaatctccttggcggctttctgtccatcctcactcaggacgactcagatttccaagcatgtcaacgagtgcttgtggatcttctcgttagtttgatgtccagccggacctgcagcgaagaactgactctgctgcttcggatatttctcgagaaatctccctgcacccgggccactgatcagaaggtccagtccacttag

SEQ ID NO: 113732 - DNA, 11406 bp, Artificial Sequence
  derived and/or modified sequence
atgtccaccgactctaattcactagccagagagtttctgaccgatgtcaatcgcctttgcaacgcagtggtacagcgcgtcgaggctagagaagaggaggaagaggagacacatatggctaccctgggtcagtacctagttcacgggagaggcttcttactacttacaaagttgaatagcataattgaccaggccctgacatgcagggaagagctgctcaccttgttgctgtcactgttgcctctggtgtggaagattcctgtgcaggaggagaaagccactgactttaacctgccattgtctgcagacataatactcactaaggaaaagaacagcagctcgcagagatccactcaggaaaaactacatctggagggctcagcactttctagccaggtctcagcgaaggttaatgtgtttaggaaatccaggcggcaaagaaagattacacacaggtactcagtgcgggatgctcggaaaacacagctcagtacctcagactctgaagctaattcagacgagaaaggcatagcgatgaacaagcatagacgccctcacctgttgcaccattttttgacctcctttcccaaacaggaccaccccaaggcaaaactggatcgtctggcaacaaaggaacagacgcccccagacgctatggcactcgagaattccagggaaatcattccaaggcaagggtctaacacagatattttgtcggagccagctgccttaagcgtgattagcaatatgaataactcccccttcgacctctgtcatgtgctgttatcattgctcgagaaagtatgtaagttcgacgtgacgctgaatcataatagccccctcgctgcctcggttgtacccacgctgactgagttcctggccggttttggtgactgctgttctctgtcagataacttggagagccgcgtggtgtccgccggatggactgaagagcctgttgctctgattcagaggatgctgttccgcaccgtgcttcacctcttgagcgttgatgtcagcacagctgagatgatgccagaaaacctccgaaagaatcttaccgagctgcttagggcagcattgaagatccgtatatgcctggagaagcagcccgatccgttcgccccacgacaaaagaagactttacaagaggttcaggaggactttgtcttctccaaataccggcatagggctctgcttcttccagagctactcgaaggagtcctgcagatcctgatttgttgtttgcagtccgcagcctctaacccattttatttttcgcaagccatggatctggtacaggagtttatccagcaccacggtttcaatctcttcgaaaccgcggtcttacagatggagtggttggttttgagggacggtgtacctccggaggccagcgagcacctcaaggcgctcatcaattcagtgatgaaaatcatgtctaccgtgaagaaggtaaagtcagaacagctccaccatagcatgtgcaccaggaagaggcatcgacgatgtgagtattcgcacttcatgcaccatcatcgggacttaagcggactcctcgtttccgcctttaagaaccaagtgagcaagaatccgttcgaggagactgctgacggggacgtatattaccccgaacgctgttgttgcatcgcagtctgcgcccatcagtgcctccgactcctccagcaggctagtctttcgagcacgtgcgttcagatactttccggggtgcacaatattggaatttgttgttgcatggaccctaaaagtgtgatcattcctctgttgcatgcatttaagctgcccgctctgaaaaactttcagcaacacatcctgaacattctcaacaagttaatcctggaccagttaggaggtgccgaaatatctcctaagatcaaaaaagcagcctgcaatatctgtactgtggactccgaccagctggcacagctcgaagagactttgcagggcaatttgtgcgacgcggaactctcaagctccctgtcttcaccctcctatcggtttcaaggcatcctgccttcaagcgggtcagaggacctgctctggaagtgggatgcgctgaaggcctaccagaacttcgtttttgaggaggaccgcctacactcaatccagatcgctaatcatatttgcaatctcattcaaaagggaaacatcgtggtgcagtggaagctgtataattacatattcaatcccgtgctgcagcggggtgtagagctcgctcaccactgtcagcacttatcagtgacttctgcccagtcacacgtgtgttcccaccataatcagtgtctcccacaggatgtgctccaaatttacgttaagactctgcccattttgctgaaatcaagggtgatccgagacctcttcctaagttgcaatggcgtctcgcaaatcatagagctgaattgcctgaacggcatcaggagccactctcttaaggctttcgaaaccttgatcatctcacttggcgagcagcagaaagacgcatctgtgcctgacatagatggcatcgacatagagcaaaaagagctctcatccgtgcatgtggggacaagcttccaccatcaacaggcctatagtgactcaccacagtcactgtctaaattttacgccggactgaaggaagcctaccctaaacgacggaaaaccgtgaatcaggacgttcacataaacaccattaatctgtttttatgcgtggcctttctatgcgtgtcaaaagaagcggagagcgaccgggagtctgcaaacgactccgaggacacttctgggtacgattcaaccgcctctgagccactcagccatatgctgccctgcatcagtttggagtcactggtgctgccttcccccgaacacatgcatcaggccgcagatatttggtctatgtgtcggtggatctatatgctcagctctgtgttccagaaacagttttacagacttggcggttttagggtgtgtcataaactgatctttatgattatccagaaactgtttagatcccataaagaggaacagggaaaaaaggaaggtgatacatctgttaacgaaaaccaggatcttaaccgtattagtcaacctaagagaacaatgaaagaggacctgctgagcttggccatcaagagtgatcccatccctagcgaactggggagtctgaagaagagcgcggatagccttgggaaattagaacttcaacacattagcagtattaacgttgaagaagtgtccgccacagaggctgctcctgaagaagccaagttgttcacctcccaggagtcagaaacctcattgcagtcaattaggctgttggaggctctgctggccatttgccttcatggggcacggaccagccagcaaaaaatggaactggaactgcctaaccaaaacctgtcagtggagagtattctgtttgagatgcgggatcacctgtcacaatcaaaggtgatcgaaacccagttggcgaaaccgctgtttgacgcactgctccgcgtggccctgggcaactattcagccgactttgaacataacgatgcaatgaccgagaagagccaccagagtgctgaggagctcagctcccagcctggcgatttttcggaagaggctgaagacagccagtgttgctccttcaagctgctcgtagaggaagaagggtacgaggccgactcggaatcgaaccctgaagacggagaaacgcaggacgatggagttgacctgaaatccgagactgagggtttctcagctagctcctctcccaacgacctgcttgagaacctgacacagggggagattatatatcccgaaatttgtatgctcgaactaaacctgctaagtgcatctaaagcaaagctcgatgtgctcgctcatgtgttcgagtccttcttaaagattatccgccagaaagagaagaatgtgttcctgctgatgcagcaggggactgtgaaaaatttgctcggcggattcctttctattttaacccaggacgatagtgattttcaagcctgccagagggtgctggtcgatttgctagtatctcttatgtcctcgagaacgtgctcggaggagctcacattgttgttgaggatcttcctcgagaagagcccgtgtaccaagatacttctcctgggaattcttaagatcattgaaagtgacaccacaatgagcccttctcagtacctgacctttcctctcttgcatgcccctaacctgagcaatggcgtttctagccagaagtatccaggaattctgaattctaaagccatgggcctgttgcgcagggccagggtctcgagatcgaaaaaggaggccgaccgcgaatcgttcccacatcggttactgagttcatggcatatagcaccggtgcatttgccactattgggccagaattgctggccacatctctccgaaggattttccgtgtcactgtggtttaacgttgagtgtattcatgaggctgaatcaaccaccgagaagggcaagaagatcaaaaagaggaataaatcactgatcttgcctgactcctcctttgatggtacggaaagcgacaggccggagggggcagagtacattaatcctggagaacgcctgattgaggagggctgcatccatatcatttctctcggatccaaagccctgatgatccaggtgtgggcagatcctcacaacgccacgcttattttcagagtgtgcatggatagcaacgacgatatgaaggctgtgctgctcgctcaggtggagagccaagagaatatattcctccctagcaaatggcaacacttagttctgacctacctacaacagccgcaagggaagaggaggattcacggcaaaatttctatctgggtatcgggccagcggaagcctgacgtcacactagactttatgctccccagaaaaaccagtctgagcagtgattccaacaagaccttctgtatgatcggccactgtctgagttcccaggaggaattcctgcagctggccggtaaatgggatttaggtaacctactactgttcaacggcgcaaaggttggtagccaggaggcattttacctgtacgcatgcggaccgaaccacacttcagtcatgccttgcaaatacggcaaaccagtgaatgactatagcaaatacatcaacaaggaaattcttcgatgtgaacaaatcagagaacttttcatgacgaaaaaggacgtcgacatagggctcctcatcgaatcactctctgtggtgtataccacatattgcccggctcagtatactatctatgagccagttatcagactaaagggtcagatgaaaacgcagctttctcagcgccctttttcatccaaagaagtccaaagcatactgttggaaccacaccatctcaagaaccttcagcctaccgagtacaaaacaatccagggcattctccacgagatcggcggaacgggcatcttcgtcttcctattcgcgagagtagtggagctgtcctcctgtgaagaaacacaggctctcgctctccgtgtaatcttgtccttaataaagtacaatcaacagcgcgtgcatgaactagaaaactgcaatgggttatcaatgatacaccaggtgctgatcaaacaaaagtgcatagttggattctacatcttgaagaccttgttggaagggtgctgtggagaagacattatctatatgaatgagaacggagaatttaagcttgatgtggatagcaacgccattatccaggatgtcaagctcctggaagagctcttgcttgactggaagatctggtcgaaagccgaacagggagtttgggaaacactactagcagccctcgaagttctgatcagagctgatcatcaccagcagatgtttaacattaagcaacttctcaaggcccaagtagttcatcattttctgctgacgtgccaggtgctacaagagtacaaagaaggacagctgacgcctatgcccagggaggtgtgccgaagcttcgttaagatcatcgctgaagtgctgggctccccccctgaccttgagctattgaccatcatttttaatttcctgctcgccgtgcatccacccacaaatacctatgtttgccataatcccaccaacttttatttctctctacacattgatggaaagatattccaagagaaagttcggtcgataatgtacctgaggcactcatccagcgggggtcggtctctaatgtcgcccggatttatggtcatttccccatccggttttactgcttctccatacgagggcgagaactcaagtaacatcattccacagcagatggccgcacatatgttgagatcacgctcattgcctgctttccccactagtagcctccttacccaatcccagaagctcacaggcagcttgggttgttcaatcgaccgcctgcagaatatagctgacacgtatgttgcaacacagagtaagaagcaaaactccctgggctcttccgacacactgaaaaagggcaaggaagacgctttcatttcatcttgtgagagcgctaagaccgtatgcgagatggaggcagtcttgagcgcacaagtctccgtatccgatgtgccaaagggggtactgggattccccgttgtcaaggctgatcataaacaactcggcgctgagccaagaagcgaggacgattcccccggagacgagagctgcccccgacgacccgattacttgaagggcctggcttcctttcaacgtagtcacagcacgattgcaagtttgggccttgcattccccagtcagaatgggtctgccgctgtggggagatggccctctctagttgaccggaataccgacgactgggagaactttgcgtattctctgggatacgagccaaattacaatcgcaccgcctccgctcactccgtaacagaggactgcctcgtcccgatctgctgcggcctctatgaattgctttcaggagtgctcctgatactcccagacgtgttgctagaggacgtgatggataaattgatccaggccgacaccctcctggtgctggtgaatcacccctctcctgctatacagcagggagtgatcaaactgctcgatgcctatttcgccagggcttctaaagagcagaaggataagttcctcaagaatcggggattctctctcctggccaatcagctgtacctccacagagggacgcaggaactcctcgagtgtttcatagaaatgttttttggacgacacatcggactggatgaagaattcgaccttgaggatgtgaggaatatgggactgtttcagaagtggtcggtgattcccatcttgggattgatcgagacatcactttacgacaatattctcctgcacaatgcgttactgctgttgttgcagattctgaatagttgctctaaagtggccgacatgttactggataatggcctgctgtacgtgctttgtaacactgttgccgctctgaatggcctcgagaaaaatataccaatgtctgaatacaagttattggcttgcgatatccaacagctctttatcgccgtcactatccacgcttgctcaagttcaggttcacagtattttagagtgatagaagatctcatcgtgatgctgggatatctccagaattccaagaacaaaagaacccaaaatatggccgtggccttgcaactgcgggttttgcaggctgccatggagtttattagaacgaccgctaatcatgactctgaaaacctaaccgacagcttgcaaagcccttcagcaccacaccacgccgtggtgcaaaagagaaagtccatagctggccctcggaaattccccctcgcccagacagaatccctgctgatgaagatgaggagcgtggccaacgacgagctccacgttatgatgcagagaaggatgagtcaggaaaatcccagtcaggccactgagactgaactcgcccagaggctccagcgcctgactgtgctcgcagtgaaccgaattatttatcaggaatttaatagcgatataatcgacatcctccggacacctgagaatgttacacaaagcaagaccagtgtgtttcagacagagattagcgaggagaatattcaccacgagcagagctctgtcttcaacccattccagaaagaaatcttcacttaccttgttgagggtttcaaggttagcatcggcagctccaaagctagcggctcaaaacagcaatggacaaaaatactatggtcgtgtaaggagacctttcgtatgcagcttggccgactgctggtgcacattctgtctcctgcccacgccgcacaagagcgtaagcaaatttttgagattgtgcacgagcccaaccaccaagagatcctgagagattgtttatcaccttcattacagcatggagccaagctggtgctctacctgagtgagcttatccataatcatcaaggtgaactcactgaagaggagttaggcacagccgagctcctgatgaacgcattgaagttgtgcgggcataagtgcattcccccaagcgcgtccactaaggctgacctgatcaaaatgattaaagaggagcagaagaagtacgagacagaagaaggggtcaataaggccgcttggcagaagactgtgaacaataaccaacaaagcctcttccagcgcctggattccaaaagcaaagatatatctaagatcgctgcggacatcacacaggctgttagtctgtctcagggcaacgagcgcaaaaaggtgattcaacatattaggggaatgtacaaagtggaccttagtgccagtcgacactggcaagagttaattcaacagctgacccatgacagagcggtgtggtacgacccaatctactacccaacatcctggcagctggaccctacagagggtcccaaccgcgagcgccgaaggctccagcgttgctacctgactattcctaataaatacctgttgagagatcggcaaaagtcggaagatgtggtaaaacctcccctcagttacctgttcgaggataaaactcattcctctttcagctccactgtgaaggacaaggccgcaagcgagtccatccgtgtgaataggcggtgtatatccgtagcaccgtcacgcgaaaccgcgggagaactgctgctgggtaagtgtggaatgtattttgttgaggacaacgccagtgatactgtggaaagcagttccctccagggggagctcgagccagcttccttctcatggacctacgaggagatcaaagaagtacacaaacgctggtggcagttgcgcgataacgcggttgagatttttctaactaacggtcggacgctgctcctcgcttttgacaataccaaggtgagggacgacgtttaccacaacattttaaccaataacctgccaaatctcctggagtacggcaatatcacagctcttacgaatctgtggtataccggccagatcacaaactttgaatatcttactcacctcaataagcatgccggacgaagtttcaacgacttaatgcagtaccccgtctttccgtttatactggctgattatgtatcggaaaccctcgatctgaacgacctgttaatataccgaaatctgagcaagcccattgccgtacaatacaaagagaaggaagacagatatgtggacacttataagtatctggaagaagaataccggaagggtgcacgggaagatgaccctatgcctcctgtgcagccctaccattatgggtctcactattcaaactcggggacagtgctccacttcttagtgcgtatgccgccattcacaaagatgttccttgcctatcaggatcagtcatttgacattcccgatcgcacttttcactcaacgaataccacctggaggctcagttcattcgagtcgatgactgatgttaaagaactcatacccgagttcttttacctgcctgaatttctggttaaccgggagggctttgatttcggcgtgcgccagaacggcgagcgcgtgaatcatgtcaacctgcccccatgggctaggaacgacccaagactttttattctcattcaccggcaggcactcgaaagtgactacgtgtcccagaacatctgccagtggatcgacttagtcttcggctataaacagaagggcaaggcctctgttcaagcgatcaacgtctttcatcccgctacatattttggtatggatgttagtgcagtcgaggatcctgttcagcggagagccttagagactatgatcaaaacatacggtcagacgcccaggcaactattccatatggctcatgtgtcccgacctggcgctaaactgaatatcgagggcgagctcccggcagcagtagggctattggtacagtttgcttttcgcgagaccagagaacaggtgaaagagatcacatatccgtcacccctaagctggataaagggcctcaagtggggcgagtacgtggggtctccctcagcccctgtccctgtcgtgtgcttctctcagccccatggcgagcggttcggctctttacaggccctgcccacaagggcgatatgcggactgtcaaggaatttttgtctgcttatgacctattcgaaagaacaaggcgtgcgcagtatgaatagtacagacatccagtggagcgctattctgtcctggggatatgccgataatatactgagactgaagagtaagcagagcgagcccccagtgaatttcatccaatcttcacaacagtaccaggttacctcctgcgcttgggtccctgatagttgtcagctcttcacggggagtaaatgtggcgtcattacagcctacaccaatagattcaccagctccacaccttctgagattgagatggagactcaaatccatctctacggtcacacggaagagatcacttcgcttttcgtatgtaagccctactccatactaatcagcgtgtcgcgggacgggacctgtataatttgggatctgaatcgactgtgttacgtgcagtcattggccggacataagtctcccgtgacagccgttagcgcatccgaaaccagcggcgatattgctacagtatgcgattctgccggaggcggttccgacctccgactgtggactgtcaatggcgatcttgttgggcacgtgcattgtcgagagattatttgtagcgtggctttcagcaaccagccagaaggagtgtccatcaacgtcattgcaggaggtttagagaacggaatcgtacggctgtggagcacgtgggatctgaagcccgttagagagattacttttcccaaatctaacaagcccattatttctcttaccttttcttgtgacggccaccacctgtacacggctaactccgatggaactgtgattgcttggtgtcgcaaagaccagcagcgtttgaagcagcccatgttctacagttttttgtcctcgtacgccgctggctaa

SEQ ID NO: 113733 - DNA, 11406 bp, Artificial Sequence
  derived and/or modified sequence
atgagcacggacagcaacagccttgcccgagaatttctcacggatgtgaaccgcttgtgcaatgctgtcgtgcagcgggttgaagctcgagaagaagaggaggaggagacacacatggcgaccctcggccaatacctcgtgcacggtcgcggattcctgcttctcaccaagctgaactccattatcgaccaggcactcacttgccgggaagagctactcaccttacttttgagcctccttccactggtttggaagatccctgtgcaggaggagaaagccacggattttaacctgcccctgtccgccgacataatccttacgaaggagaagaatagcagctcgcagcgttccacacaggaaaaactgcacctggagggatctgcacttagctcccaagttagtgccaaagtgaacgtcttcagaaagtcccgcaggcagagaaagatcacacaccgctatagcgtgagggatgccaggaagacccagcttagcacttccgactctgaggcgaactcagacgagaagggaatcgcgatgaataagcaccgacggcctcacctgctgcatcactttctgacttccttcccgaaacaggaccaccccaaagccaagttggatcggctggcgaccaaggaacaaactccgccagacgcgatggcactagagaattcccgcgaaatcatccccaggcagggtagcaatactgatatcctcagtgagccagctgcactttccgttataagcaatatgaataattctccatttgacctttgccacgtgttgctgagcctgctggagaaagtgtgcaagtttgatgtgacccttaatcataattcccctctcgcggctagcgtcgtgcccactctgacagaatttctggcgggatttggggactgctgttcccttagtgacaacctggagagcagagtggtgtcggccggatggactgaggaaccggttgcgctaattcaacgaatgctgtttaggactgttttgcacctcctgagtgtggacgtgtcaactgcggagatgatgcccgagaatctgagaaagaacctgaccgagctgctaagagccgcattgaaaattcgtatatgcttagagaaacagccagatcctttcgcaccaaggcagaaaaaaacgctgcaggaagttcaggaggattttgtgttttccaaatatagacatagggctctgttactgcctgagctgctcgagggcgtccttcaaattctgatctgctgccttcagagcgccgcttccaaccccttttattttagtcaggctatggacttggttcaggaattcatacagcatcacggcttcaatctgtttgaaacagcagttcttcagatggaatggcttgtcttgcgagatggggttccgcctgaagcctcagagcacctgaaggctttaatcaactccgtgatgaaaattatgtccacagtgaagaaagtgaaaagtgaacagttgcatcattccatgtgtacccgtaagcggcaccgcagatgtgaatacagccactttatgcaccatcatagggacctctctgggctgctggtctctgctttcaagaatcaagtctctaagaaccctttcgaagaaacagccgatggtgatgtatactacccggaacgatgctgctgcattgccgtatgcgcccatcagtgcctgaggcttctccagcaggcgtccttaagcagcacctgcgtgcagatcctgtcaggcgtgcacaacattggaatttgttgctgcatggacccgaagagcgtcatcatacccttgcttcacgccttcaagctgccagctttgaagaactttcagcaacacatcttaaatatcctgaataagctgattctcgatcagctgggaggcgcagaaatctctcccaagattaagaaggccgcttgcaatatctgcaccgtggacagcgaccagctggcccagctcgaggaaacattgcaggggaatctttgtgacgctgaactgtcatcttccctgtcttctccatcctaccgattccaaggcatcttgccatcctccggctccgaggatctactttggaaatgggacgcactgaaggcatatcaaaacttcgttttcgaggaagatcgactacatagcatccagatagcaaaccatatttgtaacctgattcagaaaggaaacattgttgtgcaatggaaactctataattacatttttaaccccgttctccaaagaggcgtggaacttgcgcatcactgtcagcatttatctgtgacttctgcccagtcacatgtgtgtagtcatcataatcagtgcttgccccaggacgttctgcagatttatgtcaaaacgttgccgattttgctgaagtcaagagttatccgcgacctgtttctgtcttgtaatggggtgtcccaaattattgaacttaactgcctgaatggaataaggtcacatagcctgaaggccttcgaaaccctgatcatcagtctcggggaacagcaaaaggatgcctcggtacctgacattgacggaattgatattgaacaaaaagagctgtctagcgtacacgtggggacctcatttcatcatcaacaggcctactccgattcaccccagagcctttccaagttctatgctggcctgaaggaggcttatcccaaacgtaggaagactgtcaaccaggacgtgcacattaatacaattaatttattcctttgcgtggcttttctgtgcgtgtccaaagaggctgagagcgatagagagtcagcgaatgactctgaagacacctccggctatgacagtaccgcatcggagccgcttagtcacatgctgccttgtatttcactggaatcacttgttctgccttcgcctgagcatatgcaccaagccgcagacatatggagcatgtgccgctggatctatatgctatccagcgtctttcagaagcagttttaccgcttgggaggatttagagtttgccacaaactcattttcatgatcatccagaagctgttccgctcccacaaggaagagcagggcaagaaggagggggacacgagcgtgaacgaaaaccaggatctcaatcggatctctcaaccaaaacggactatgaaggaggatctcctttccctggctatcaagtccgacccgatccctagtgaactcggcagtctgaagaagtctgccgacagtctgggcaagcttgaattgcaacacatcagctcgataaacgtggaggaggtgtcggccacagaggcagcccctgaagaagcaaagctgttcacatcccaggagtctgaaactagcctgcaatctatacgcctcctcgaggctctgctggcaatttgtctccatggagcacgaacttcccagcagaagatggagctggaactgccgaaccaaaatttgagtgtcgaaagtattttatttgagatgcgagatcacctgtcacaatcaaaagttattgagactcaactcgctaagccactgtttgatgctctgctcagagtggcgctcggcaattacagcgcagacttcgagcacaatgatgctatgacagagaagagtcatcagtccgccgaagaactttcctctcagcccggagactttagcgaggaggccgaggactctcagtgttgtagtttcaagctgctggtcgaagaggaaggttatgaagccgacagcgaatctaaccccgaggatggtgagacgcaagacgatggtgtagacctgaagagcgagacagaggggttctctgcctccagcagtccgaacgatttgctagagaatcttacccaaggagagatcatttaccccgaaatttgtatgttggaacttaacttgctttcagctagcaaagcaaaacttgatgtcctagcccacgtcttcgagagttttcttaagatcatccgccaaaaggaaaaaaacgttttcctccttatgcagcaaggcacagtgaaaaatctactgggtggctttctgtccatcctgacgcaggacgatagtgacttccaggcatgtcagagagtcttagtggacctgctggtatcattgatgtcaagtagaacttgcagtgaggagctcaccttacttctcagaatttttctagaaaaatccccctgcaccaagatcttacttctgggaatccttaagattattgaatctgataccacgatgagcccatctcaatatttaactttccctctgttgcacgctccgaacctaagtaatggggtgtcgtcgcagaagtatcccggtattctgaatagcaaggccatgggtctgttgagaagggccagggtgtccagatccaaaaaagaggcggatagggaatcattccctcatcgcttgcttagcagctggcacatcgcgccagtccaccttccccttctgggtcaaaactgttggcctcacctgtccgagggtttcagcgtgtccctgtggttcaatgtggagtgtattcacgaggccgagagtacgacagagaagggaaaaaagatcaagaagcggaataaaagcttgatacttccagattcatcgttcgacggaacagaatccgaccggcctgaaggtgctgaatacataaatcctggcgaacggctgatcgaggagggctgtatacatattatcagtctcggaagcaaagcactcatgattcaggtctgggccgacccccacaatgctactttaattttcagagtttgtatggacagcaatgacgacatgaaagctgtactgctggcccaggtggaaagccaagaaaacatctttcttccatcaaaatggcagcacctagtgctgacgtatctgcaacagcctcaaggcaaacggagaattcatggtaaaatttcgatatgggtctcaggtcagagaaaacccgacgttactctggactttatgctgcctaggaagacatccctgtctagcgacagtaataaaaccttttgcatgatcgggcattgcctgtcctcacaggaggagttcctgcagttggccggtaagtgggacctgggcaacctgttactttttaacggggctaaagtgggaagccaggaagcgttttatttgtacgcctgtgggccaaatcatacatccgtgatgccttgtaaatacgggaaacctgtgaacgattactctaagtacatcaataaggaaatcctgcgctgcgagcagattcgggagttgttcatgaccaaaaaggacgtcgatatcggcctgctgatagagagtcttagcgtggtgtacaccacgtactgccctgcacagtacaccatttatgagcccgtgatcagactcaagggccagatgaaaacacaactttcccaacgacccttctccagcaaggaagttcagagcatcctgctggaaccccaccacctgaagaatctgcagccgacagagtacaagacgattcagggtatattgcatgaaatagggggaacggggatattcgtcttcctttttgcccgtgtagtagagctgagcagctgtgaggaaacccaagcccttgccctgagagtcatcctcagcttaattaagtacaaccagcagcgcgtccacgaactcgagaattgtaacggcctgtccatgatccatcaggtgttaatcaagcaaaagtgcattgtcggcttctacatacttaagaccctgctggagggatgttgcggcgaggatatcatttatatgaatgaaaatggggagttcaaattagatgtggactctaacgccattatccaggacgtaaagcttttagaggaattgctgctggactggaagatctggagcaaggccgagcagggggtgtgggagaccctgttagcagctttggaggtattaatccgggcagaccatcatcagcagatgtttaacatcaaacagctgctaaaggcacaggtggtccatcactttctccttacttgtcaggtgttgcaggagtacaaagaaggtcaactgactcctatgccaagggaggtctgccggtcctttgttaaaatcattgccgaggtgctgggttctccacccgacctggaattgctgaccatcatctttaacttcctgctggcagtgcacccacctactaacacttacgtctgccacaatccaacgaatttctacttcagcctgcatattgacggcaaaatatttcaggagaaggtgcgaagcatcatgtaccttagacattccagtagcggcggtagatccctaatgtctccaggtttcatggttatctccccttcagggttcaccgcctcaccctatgaaggcgaaaatagtagcaatataattccgcaacagatggctgcccacatgttgaggagccgtagtttgcccgcattccccactagttcactgctgacccaatcccaaaagttaaccggatctctaggctgcagtatcgatcggctccagaacattgcggacacctacgtagcaactcagagcaagaagcagaactccctgggctcctcagacaccctgaagaagggcaaagaggacgccttcatctcttcctgcgagagcgccaagactgtctgcgaaatggaagcagttctctcggcacaggtgtccgtaagcgatgtccctaagggagtgctcggattcccagtggtgaaagctgatcacaagcagttgggcgctgagcccaggtccgaggatgactcaccaggtgatgagtcctgcccacggaggcccgattatctgaaaggcctggctagttttcagcgcagtcactcaaccattgctagcttggggctcgcctttccatcccaaaacggcagcgcggctgttggaaggtggccctccctcgtggatagaaataccgatgactgggaaaacttcgcatactctcttgggtatgagcctaactataacagaacagcttccgcccattccgtcaccgaggactgcctggtacccatttgttgtggtctctatgagctgctgagcggggttctgctcattcttcctgacgtgctgctggaggatgtgatggacaagctgatccaggccgataccctgttggtgctagtgaatcacccaagcccagctatccagcagggagtgatcaaactcttggatgcctactttgcccgtgctagcaaggagcagaaagacaagttcctgaaaaaccgtggcttttctttgctggccaaccagctgtatcttcatcggggaacacaggaactgttagagtgttttatagaaatgttcttcggccgacacattggcctggacgaagaatttgatttagaggacgtacggaatatgggcctattccagaaatggtcagtgatccccatactgggactaatcgaaacatcgctgtacgacaacattctactgcataacgcactacttctactgttgcaaattttgaatagctgtagcaaggttgccgatatgctcttggataatggccttctgtatgtgttatgtaacacagtggccgcactaaacgggttagagaaaaacatacctatgtctgagtacaagctcctggcctgtgacatacagcagttgttcatcgcagtaacaatccatgcctgctcctcatctggatcccagtacttccgcgttattgaggacttgatcgtcatgttggggtatctccaaaattctaaaaacaagcgcacacagaatatggcagtcgctcttcaattgagagttctccaagctgctatggagtttattaggactaccgctaatcatgacagtgaaaacctcacagactctctacaatccccctcagctcctcaccacgccgtggttcagaaacgtaagagcatagccggacctagaaagtttcccctggcgcagaccgagtcattgctgatgaaaatgagaagcgtcgctaatgatgagctgcacgtgatgatgcagagaaggatgtcccaggaaaaccccagccaggccaccgagaccgaactggcgcagagattacagcgcttaacagtgctcgcggtcaatcgaatcatatatcaagagtttaacagcgacatcatagatattctcagaacccctgagaatgtgacacagtcgaaaactagcgtgttccaaactgaaattagcgaggaaaatatacaccacgagcagtccagcgtattcaatccattccaaaaagaaatcttcacctacctggtggaaggattcaaagtcagcattggctcttctaaagccagcggctccaagcagcagtggacaaaaatactctggagctgtaaagaaaccttccgtatgcagctggggcgactccttgtgcatatcttatctcctgcccacgccgctcaggaaagaaaacagatattcgagatcgtacatgaaccgaaccatcaggagatcctgcgagattgtctgtctccaagtctgcaacacggcgcaaaactggttctttatctgtcagaactcatccataaccaccaaggggagctgaccgaggaggagttggggaccgcagagctactgatgaacgccctgaaattatgcggtcacaaatgcatcccacccagcgccagcacaaaggccgatcttattaaaatgatcaaagaagagcagaaaaaatacgagaccgaggaaggtgtgaataaggcggcttggcagaagacagttaacaacaaccagcagtcattgttccagagactggacagcaaaagtaaagacatctcaaaaatagctgccgatatcacacaagcggtaagcctgtcccaggggaacgagcgcaaaaaggtaatccaacacataaggggaatgtataaggtggatttgtcagcttctagacactggcaggaactaatacagcagctgacacacgatagggccgtgtggtacgaccctatatattatcctaccagttggcagctggatccaactgagggacctaacagggagcggaggcggttgcaacggtgttacctgaccatccccaataaatatcttttacgcgacagacagaagtcagaagacgtggtgaaacctcccttgtcctatctgtttgaggacaagacgcatagcagcttttcaagcaccgtcaaggacaaggcagcgagcgagagcattagggttaatagacgctgcatatcagttgcacccagtagggagacagccggtgaactattgctggggaagtgtggaatgtattttgtggaggacaatgcctccgacaccgtggagtcatcatctttgcagggcgaacttgaaccagcctcctttagttggacatatgaagaaattaaggaggtgcataagaggtggtggcagctgcgagacaatgccgtcgaaatcttcctcacaaacggacggacacttctcttggcatttgataacacgaaggtccgggatgacgtgtatcataatatcctgacaaacaatttaccgaatcttcttgagtacggcaacatcactgccttgaccaacctgtggtatacgggacagatcaccaacttcgaatatctgacccaccttaacaagcacgctgggcgtagctttaacgacctcatgcagtacccagtgttccctttcatcctggccgactatgtcagtgagacactcgatctgaatgaccttctcatttaccgcaatttaagcaagcccatcgcagtgcagtacaaagaaaaagaggataggtacgttgacacttacaagtacttagaagaagagtatcgcaagggtgccagggaggatgatcctatgcccccagtacaaccgtatcactacggctcgcactattcaaactcaggaactgttttacactttctggtgcggatgcctccattcactaaaatgtttctagcctaccaggatcaaagttttgacatccctgataggaccttccactctacgaatactacttggaggctctcatcgttcgagagcatgacggatgtcaaggaactgattccggagttcttttacctgccagaattcctcgttaaccgcgagggcttcgattttggcgtgcgacaaaacggagagagggtgaaccacgttaatctgcccccttgggccaggaatgatccacgactgtttatcttgattcatagacaggcactggagtccgattacgtcagccagaacatatgtcagtggatcgatctagtgttcggctacaaacagaagggaaaagcatccgttcaggccattaatgttttccacccggcaacctacttcggcatggacgtttcagccgtcgaggatcccgtgcagaggagggctcttgagaccatgataaagacttacggccaaacccctagacagctttttcacatggcgcatgtgagcagacccggtgccaaactgaacattgagggcgaacttccagcagctgtgggactgctcgtgcagttcgccttccgcgagactagagagcaggtcaaggaaattacttatccatcccccctttcttggatcaaagggcttaagtggggcgagtacgtgggttccccgtcagcacccgttcccgtcgtctgcttcagtcagcctcatggcgaaaggttcggtagcctccaggccctgccaacaagggctatctgtggactctcgcgtaacttctgcctgctgatgacctactcgaaagaacaaggcgtccgatcaatgaacagcacagatatccagtggtccgcaatcctctcttggggctacgccgataacatcctgaggctgaagtcaaaacagtcggagcccccagtaaattttatccagtcttcacaacaataccaggtgactagctgcgcatgggttccggacagttgtcagctcttcactggttcaaagtgcggagtgattaccgcatatacaaacagattcacttcctctacaccctctgaaattgagatggaaacccaaatacatttgtatggccatacagaggagattacaagtctctttgtgtgcaaaccctacagcattcttatctccgtctcacgggatggtacttgtatcatctgggaccttaatcgactgtgctatgtgcagtccctcgccggacataaatcacctgtgactgcagtgtccgcatccgagacgagcggagacatcgctaccgtatgcgattctgctgggggaggcagcgatctgcggctttggaccgtcaacggggatcttgttggacacgtgcattgccgcgaaatcatttgttccgtcgcattctcaaaccagccggaaggcgtgagcatcaatgtaatcgcgggaggactggaaaacggcatagtcagactgtggagtacgtgggacctcaaacccgtgagggagattacctttccgaagtccaacaaaccaattatttctttaacattctcctgcgatgggcaccatctgtataccgctaactcagatggtactgtgatagcttggtgtcgcaaggaccagcagcgccttaagcagcctatgttttactcatttctgtccagctatgcggcaggctac

SEQ ID NO: 113734 - DNA, 4149 bp, Artificial Sequence
  derived and/or modified sequence
atgtccacagacagtaatagcctcgctagggaatttctgaccgacgtgaaccgcctttgtaacgcagttgtacagagagtagaagcccgagaagaagaagaggaggagacacacatggcaacgctgggccagtacctggtgcacgggaggggtttcctgctcctaacaaagcttaattctatcattgatcaggctctaacatgtcgcgaggagctgctgacgttgctgctgtctctgctgcctcttgtttggaaaatccctgtccaggaagagaaggcgacagattttaacttacctctgtcagctgacataatcctcaccaaagaaaaaaatagcagttcgcaacggagcactcaggagaaactccacctggagggcagtgcactttcatctcaggtctcagctaaggttaacgtatttaggaagtctcggcgtcagcgaaaaatcacccataggtacagtgtgcgggatgctcgtaagacgcagctctcgactagcgattcggaggccaatagtgacgagaaggggattgcgatgaacaagcatcgtcggcctcatctgttgcaccacttcctgacttcttttccaaagcaggaccatcctaaggcaaaacttgatcggcttgcgactaaggaacagacccctccggatgcaatggctctggagaacagtagggaaattatccctcgacagggctccaataccgatattctcagtgagccagcagccctctccgttataagcaatatgaacaatagtccttttgatttatgtcatgtgctactgtctctcctagagaaagtgtgtaagttcgatgtcacgctcaatcacaattcacccctcgccgcaagcgttgttccgacattgacagagttcctggcaggatttggtgattgctgctccctttccgacaatctggaatctcgggtggtgtccgccggatggacagaagaacccgtggctctgattcaacgcatgctctttagaactgtgctccacctgctgtcggtggacgtatccactgcagagatgatgcccgaaaacctgcggaagaacctgactgagttgctccgcgcagcactgaaaattaggatatgcctcgaaaaacaacctgatccatttgcaccacggcagaaaaagaccttgcaggaagtccaggaggatttcgtcttcagcaaatataggcatcgtgccctccttcttcctgaactcctcgagggagtgctccagatcctgatctgttgtttgcagtccgccgctagcaatcccttctacttttcccaggccatggacctcgtacaggaatttattcagcatcacggcttcaacctcttcgagaccgccgtattgcagatggaatggctcgtcctccgggatggggtcccccctgaggcatcggaacacctgaaagctctgatcaacagcgtcatgaaaatcatgtccactgttaagaaggtaaagagcgagcaattgcatcacagtatgtgtacacgtaagcggcaccggcgatgtgagtattctcacttcatgcaccaccacagggatctaagcggcctgttggtgtccgctttcaagaaccaagtgtccaagaacccatttgaagagactgctgatggggacgtgtattatccggaacggtgctgctgcatagcagtgtgcgcccaccagtgcctcaggcttctgcagcaggctagcctctcctccacctgtgtccagatactgagtggggtgcacaatatcggcatatgctgttgcatggatcccaaatccgttatcatacctttgctgcacgccttcaagctgccagccctgaagaacttccagcagcatattctcaatatattgaataaactgattctagaccagttgggcggtgctgaaatcagccccaagattaaaaaagccgcttgcaatatctgcacagtggattccgaccagctcgcccaactggaggaaactctgcaggggaacctatgtgacgctgaactgtcctctagtttatcttctccgtcctaccggttccaaggtattttgccctctagtggctcggaggatctgctttggaagtgggacgcccttaaagcctatcagaacttcgtttttgaggaggacaggctccactcgatacagatagcaaaccacatttgtaaccttatccagaagggtaacatagtggtccagtggaagttatataattatatcttcaaccctgtgctgcagcggggtgtcgagctggctcaccactgccaacatctgtccgtgacctctgcccaaagccatgtgtgttcccaccataatcagtgtctgccacaggatgtgctgcagatttacgtgaaaacgcttccaatacttctgaagtcacgagtgattcgagatttattcctatcatgcaacggagtttcccagataattgagctgaactgccttaacggcatccgatcccactctctgaaggcatttgaaacactcattatcagcctgggcgagcagcaaaaggatgctagtgttccagatatcgatggtattgacatcgagcagaaggagctatccagtgtgcacgttggcacatcgttccatcatcaacaggcatacagtgacagccctcaatctctgtccaagttttatgccggtctgaaagaggcataccctaagcgtcgcaaaactgtgaatcaagacgtgcatataaatacgattaacttgttcctgtgtgttgccttcctgtgcgtttcaaaagaggcagaatcggaccgggaatcagctaacgatagtgaagatacgtccggctacgactccaccgcctctgagccacttagtcacatgctgccctgcatttcactcgagtcccttgtcctgcctagtcccgaacatatgcaccaggccgctgatatctggagtatgtgccgatggatttatatgttgtcatccgtattccagaaacaattctatcgcctcggagggtttcgggtatgtcataagctgatcttcatgattattcagaagttgtttcgcagccacaaggaagagcagggcaaaaaagaaggagacacgtccgtgaacgagaaccaagacctgaacagaatctcccaaccgaaaaggactatgaaggaggaccttctgagtctggccataaaatccgatccaattccatctgaactggggagcctgaagaaaagcgctgattctttgggcaaactggagttgcagcacattagttctatcaacgtggaggaggtctcagcaaccgaggccgctccagaggaagccaagcttttcacatcccaggagagtgagaccagtctgcaatcaataagactcctggaggcgctgctggccatttgccttcacggtgcacgcactagtcaacagaaaatggagctggaacttcccaatcagaacctgtcggtcgaaagcatcctgttcgagatgagggatcacctcagccaatcgaaggtcatcgaaacacagctcgccaaaccattgtttgatgcccttcttcgcgtggctcttggaaactattctgcggacttcgagcacaacgatgctatgacagagaaatcccatcagagtgctgaggaactgtcttctcaacctggcgatttctctgaggaggcagaagactctcagtgctgctcttttaaattgttagtggaggaggaaggttatgaggccgacagcgaatccaacccagaagatggcgaaactcaagatgatggcgtggatctaaagagtgagacagaaggcttcagcgcgtccagttcaccgaacgatctgttggagaacctgacacagggcgaaatcatataccccgaaatctgcatgctcgagttgaacctcctgagcgcctcaaaagccaaattggacgtcctggcacacgtattcgagtctttccttaaaataattcggcaaaaagagaagaacgtttttttgttgatgcagcagggcactgtcaagaatctcctaggaggttttttgtctatcttgacgcaagatgacagcgattttcaggcttgccagagggttttggttgatcttctcgtgtcactgatgagcagcagaacttgttccgaagaattgacgctattgctccggatcttcctggagaaatccccatgcaccagagcaacggatcagaaggtgcaaagcacctag

SEQ ID NO: 113735 - DNA, 11406 bp, Artificial Sequence
  derived and/or modified sequence
atgagcaccgacagcaacagcctggccagagagttcctgaccgacgtgaacagactgtgcaacgccgtggtgcagagagtggaggccagagaggaggaggaggaggagacccacatggccaccctgggccagtacctggtgcacggcagaggcttcctgctgctgaccaagctgaacagcatcatcgaccaggccctgacctgcagagaggagctgctgaccctgctgctgagcctgctgcccctggtgtggaagatccccgtgcaggaggagaaggccaccgacttcaacctgcccctgagcgccgacatcatcctgaccaaggagaagaacagcagcagccagagaagcacccaggagaagctgcacctggagggcagcgccctgagcagccaggtgagcgccaaggtgaacgtgttcagaaagagcagaagacagagaaagatcacccacagatacagcgtgagagacgccagaaagacccagctgagcaccagcgacagcgaggccaacagcgacgagaagggcatcgccatgaacaagcacagaagaccccacctgctgcaccacttcctgaccagcttccccaagcaggaccaccccaaggccaagctggacagactggccaccaaggagcagaccccccccgacgccatggccctggagaacagcagagagatcatccccagacagggcagcaacaccgacatcctgagcgagcccgccgccctgagcgtgatcagcaacatgaacaacagccccttcgacctgtgccacgtgctgctgagcctgctggagaaggtgtgcaagttcgacgtgaccctgaaccacaacagccccctggccgccagcgtggtgcccaccctgaccgagttcctggccggcttcggcgactgctgcagcctgagcgacaacctggagagcagagtggtgagcgccggctggaccgaggagcccgtggccctgatccagagaatgctgttcagaaccgtgctgcacctgctgagcgtggacgtgagcaccgccgagatgatgcccgagaacctgagaaagaacctgaccgagctgctgagagccgccctgaagatcagaatctgcctggagaagcagcccgaccccttcgcccccagacagaagaagaccctgcaggaggtgcaggaggacttcgtgttcagcaagtacagacacagagccctgctgctgcccgagctgctggagggcgtgctgcagatcctgatctgctgcctgcagagcgccgccagcaaccccttctacttcagccaggccatggacctggtgcaggagttcatccagcaccacggcttcaacctgttcgagaccgccgtgctgcagatggagtggctggtgctgagagacggcgtgccccccgaggccagcgagcacctgaaggccctgatcaacagcgtgatgaagatcatgagcaccgtgaagaaggtgaagagcgagcagctgcaccacagcatgtgcaccagaaagagacacagaagatgcgagtacagccacttcatgcaccaccacagagacctgagcggcctgctggtgagcgccttcaagaaccaggtgagcaagaaccccttcgaggagaccgccgacggcgacgtgtactaccccgagagatgctgctgcatcgccgtgtgcgcccaccagtgcctgagactgctgcagcaggccagcctgagcagcacctgcgtgcagatcctgagcggcgtgcacaacatcggcatctgctgctgcatggaccccaagagcgtgatcatccccctgctgcacgccttcaagctgcccgccctgaagaacttccagcagcacatcctgaacatcctgaacaagctgatcctggaccagctgggcggcgccgagatcagccccaagatcaagaaggccgcctgcaacatctgcaccgtggacagcgaccagctggcccagctggaggagaccctgcagggcaacctgtgcgacgccgagctgagcagcagcctgagcagccccagctacagattccagggcatcctgcccagcagcggcagcgaggacctgctgtggaagtgggacgccctgaaggcctaccagaacttcgtgttcgaggaggacagactgcacagcatccagatcgccaaccacatctgcaacctgatccagaagggcaacatcgtggtgcagtggaagctgtacaactacatcttcaaccccgtgctgcagagaggcgtggagctggcccaccactgccagcacctgagcgtgaccagcgcccagagccacgtgtgcagccaccacaaccagtgcctgccccaggacgtgctgcagatctacgtgaagaccctgcccatcctgctgaagagcagagtgatcagagacctgttcctgagctgcaacggcgtgagccagatcatcgagctgaactgcctgaacggcatcagaagccacagcctgaaggccttcgagaccctgatcatcagcctgggcgagcagcagaaggacgccagcgtgcccgacatcgacggcatcgacatcgagcagaaggagctgagcagcgtgcacgtgggcaccagcttccaccaccagcaggcctacagcgacagcccccagagcctgagcaagttctacgccggcctgaaggaggcctaccccaagagaagaaagaccgtgaaccaggacgtgcacatcaacaccatcaacctgttcctgtgcgtggccttcctgtgcgtgagcaaggaggccgagagcgacagagagagcgccaacgacagcgaggacaccagcggctacgacagcaccgccagcgagcccctgagccacatgctgccctgcatcagcctggagagcctggtgctgcccagccccgagcacatgcaccaggccgccgacatctggagcatgtgcagatggatctacatgctgagcagcgtgttccagaagcagttctacagactgggcggcttcagagtgtgccacaagctgatcttcatgatcatccagaagctgttcagaagccacaaggaggagcagggcaagaaggagggcgacaccagcgtgaacgagaaccaggacctgaacagaatcagccagcccaagagaaccatgaaggaggacctgctgagcctggccatcaagagcgaccccatccccagcgagctgggcagcctgaagaagagcgccgacagcctgggcaagctggagctgcagcacatcagcagcatcaacgtggaggaggtgagcgccaccgaggccgcccccgaggaggccaagctgttcaccagccaggagagcgagaccagcctgcagagcatcagactgctggaggccctgctggccatctgcctgcacggcgccagaaccagccagcagaagatggagctggagctgcccaaccagaacctgagcgtggagagcatcctgttcgagatgagagaccacctgagccagagcaaggtgatcgagacccagctggccaagcccctgttcgacgccctgctgagagtggccctgggcaactacagcgccgacttcgagcacaacgacgccatgaccgagaagagccaccagagcgccgaggagctgagcagccagcccggcgacttcagcgaggaggccgaggacagccagtgctgcagcttcaagctgctggtggaggaggagggctacgaggccgacagcgagagcaaccccgaggacggcgagacccaggacgacggcgtggacctgaagagcgagaccgagggcttcagcgccagcagcagccccaacgacctgctggagaacctgacccagggcgagatcatctaccccgagatctgcatgctggagctgaacctgctgagcgccagcaaggccaagctggacgtgctggcccacgtgttcgagagcttcctgaagatcatcagacagaaggagaagaacgtgttcctgctgatgcagcagggcaccgtgaagaacctgctgggcggcttcctgagcatcctgacccaggacgacagcgacttccaggcctgccagagagtgctggtggacctgctggtgagcctgatgagcagcagaacctgcagcgaggagctgaccctgctgctgagaatcttcctggagaagagcccctgcaccaagatcctgctgctgggcatcctgaagatcatcgagagcgacaccaccatgagccccagccagtacctgaccttccccctgctgcacgcccccaacctgagcaacggcgtgagcagccagaagtaccccggcatcctgaacagcaaggccatgggcctgctgagaagagccagagtgagcagaagcaagaaggaggccgacagagagagcttcccccacagactgctgagcagctggcacatcgcccccgtgcacctgcccctgctgggccagaactgctggccccacctgagcgagggcttcagcgtgagcctgtggttcaacgtggagtgcatccacgaggccgagagcaccaccgagaagggcaagaagatcaagaagagaaacaagagcctgatcctgcccgacagcagcttcgacggcaccgagagcgacagacccgagggcgccgagtacatcaaccccggcgagagactgatcgaggagggctgcatccacatcatcagcctgggcagcaaggccctgatgatccaggtgtgggccgacccccacaacgccaccctgatcttcagagtgtgcatggacagcaacgacgacatgaaggccgtgctgctggcccaggtggagagccaggagaacatcttcctgcccagcaagtggcagcacctggtgctgacctacctgcagcagccccagggcaagagaagaatccacggcaagatcagcatctgggtgagcggccagagaaagcccgacgtgaccctggacttcatgctgcccagaaagaccagcctgagcagcgacagcaacaagaccttctgcatgatcggccactgcctgagcagccaggaggagttcctgcagctggccggcaagtgggacctgggcaacctgctgctgttcaacggcgccaaggtgggcagccaggaggccttctacctgtacgcctgcggccccaaccacaccagcgtgatgccctgcaagtacggcaagcccgtgaacgactacagcaagtacatcaacaaggagatcctgagatgcgagcagatcagagagctgttcatgaccaagaaggacgtggacatcggcctgctgatcgagagcctgagcgtggtgtacaccacctactgccccgcccagtacaccatctacgagcccgtgatcagactgaagggccagatgaagacccagctgagccagagacccttcagcagcaaggaggtgcagagcatcctgctggagccccaccacctgaagaacctgcagcccaccgagtacaagaccatccagggcatcctgcacgagatcggcggcaccggcatcttcgtgttcctgttcgccagagtggtggagctgagcagctgcgaggagacccaggccctggccctgagagtgatcctgagcctgatcaagtacaaccagcagagagtgcacgagctggagaactgcaacggcctgagcatgatccaccaggtgctgatcaagcagaagtgcatcgtgggcttctacatcctgaagaccctgctggagggctgctgcggcgaggacatcatctacatgaacgagaacggcgagttcaagctggacgtggacagcaacgccatcatccaggacgtgaagctgctggaggagctgctgctggactggaagatctggagcaaggccgagcagggcgtgtgggagaccctgctggccgccctggaggtgctgatcagagccgaccaccaccagcagatgttcaacatcaagcagctgctgaaggcccaggtggtgcaccacttcctgctgacctgccaggtgctgcaggagtacaaggagggccagctgacccccatgcccagagaggtgtgcagaagcttcgtgaagatcatcgccgaggtgctgggcagcccccccgacctggagctgctgaccatcatcttcaacttcctgctggccgtgcacccccccaccaacacctacgtgtgccacaaccccaccaacttctacttcagcctgcacatcgacggcaagatcttccaggagaaggtgagaagcatcatgtacctgagacacagcagcagcggcggcagaagcctgatgagccccggcttcatggtgatcagccccagcggcttcaccgccagcccctacgagggcgagaacagcagcaacatcatcccccagcagatggccgcccacatgctgagaagcagaagcctgcccgccttccccaccagcagcctgctgacccagagccagaagctgaccggcagcctgggctgcagcatcgacagactgcagaacatcgccgacacctacgtggccacccagagcaagaagcagaacagcctgggcagcagcgacaccctgaagaagggcaaggaggacgccttcatcagcagctgcgagagcgccaagaccgtgtgcgagatggaggccgtgctgagcgcccaggtgagcgtgagcgacgtgcccaagggcgtgctgggcttccccgtggtgaaggccgaccacaagcagctgggcgccgagcccagaagcgaggacgacagccccggcgacgagagctgccccagaagacccgactacctgaagggcctggccagcttccagagaagccacagcaccatcgccagcctgggcctggccttccccagccagaacggcagcgccgccgtgggcagatggcccagcctggtggacagaaacaccgacgactgggagaacttcgcctacagcctgggctacgagcccaactacaacagaaccgccagcgcccacagcgtgaccgaggactgcctggtgcccatctgctgcggcctgtacgagctgctgagcggcgtgctgctgatcctgcccgacgtgctgctggaggacgtgatggacaagctgatccaggccgacaccctgctggtgctggtgaaccaccccagccccgccatccagcagggcgtgatcaagctgctggacgcctacttcgccagagccagcaaggagcagaaggacaagttcctgaagaacagaggcttcagcctgctggccaaccagctgtacctgcacagaggcacccaggagctgctggagtgcttcatcgagatgttcttcggcagacacatcggcctggacgaggagttcgacctggaggacgtgagaaacatgggcctgttccagaagtggagcgtgatccccatcctgggcctgatcgagaccagcctgtacgacaacatcctgctgcacaacgccctgctgctgctgctgcagatcctgaacagctgcagcaaggtggccgacatgctgctggacaacggcctgctgtacgtgctgtgcaacaccgtggccgccctgaacggcctggagaagaacatccccatgagcgagtacaagctgctggcctgcgacatccagcagctgttcatcgccgtgaccatccacgcctgcagcagcagcggcagccagtacttcagagtgatcgaggacctgatcgtgatgctgggctacctgcagaacagcaagaacaagagaacccagaacatggccgtggccctgcagctgagagtgctgcaggccgccatggagttcatcagaaccaccgccaaccacgacagcgagaacctgaccgacagcctgcagagccccagcgccccccaccacgccgtggtgcagaagagaaagagcatcgccggccccagaaagttccccctggcccagaccgagagcctgctgatgaagatgagaagcgtggccaacgacgagctgcacgtgatgatgcagagaagaatgagccaggagaaccccagccaggccaccgagaccgagctggcccagagactgcagagactgaccgtgctggccgtgaacagaatcatctaccaggagttcaacagcgacatcatcgacatcctgagaacccccgagaacgtgacccagagcaagaccagcgtgttccagaccgagatcagcgaggagaacatccaccacgagcagagcagcgtgttcaaccccttccagaaggagatcttcacctacctggtggagggcttcaaggtgagcatcggcagcagcaaggccagcggcagcaagcagcagtggaccaagatcctgtggagctgcaaggagaccttcagaatgcagctgggcagactgctggtgcacatcctgagccccgcccacgccgcccaggagagaaagcagatcttcgagatcgtgcacgagcccaaccaccaggagatcctgagagactgcctgagccccagcctgcagcacggcgccaagctggtgctgtacctgagcgagctgatccacaaccaccagggcgagctgaccgaggaggagctgggcaccgccgagctgctgatgaacgccctgaagctgtgcggccacaagtgcatcccccccagcgccagcaccaaggccgacctgatcaagatgatcaaggaggagcagaagaagtacgagaccgaggagggcgtgaacaaggccgcctggcagaagaccgtgaacaacaaccagcagagcctgttccagagactggacagcaagagcaaggacatcagcaagatcgccgccgacatcacccaggccgtgagcctgagccagggcaacgagagaaagaaggtgatccagcacatcagaggcatgtacaaggtggacctgagcgccagcagacactggcaggagctgatccagcagctgacccacgacagagccgtgtggtacgaccccatctactaccccaccagctggcagctggaccccaccgagggccccaacagagagagaagaagactgcagagatgctacctgaccatccccaacaagtacctgctgagagacagacagaagagcgaggacgtggtgaagccccccctgagctacctgttcgaggacaagacccacagcagcttcagcagcaccgtgaaggacaaggccgccagcgagagcatcagagtgaacagaagatgcatcagcgtggcccccagcagagagaccgccggcgagctgctgctgggcaagtgcggcatgtacttcgtggaggacaacgccagcgacaccgtggagagcagcagcctgcagggcgagctggagcccgccagcttcagctggacctacgaggagatcaaggaggtgcacaagagatggtggcagctgagagacaacgccgtggagatcttcctgaccaacggcagaaccctgctgctggccttcgacaacaccaaggtgagagacgacgtgtaccacaacatcctgaccaacaacctgcccaacctgctggagtacggcaacatcaccgccctgaccaacctgtggtacaccggccagatcaccaacttcgagtacctgacccacctgaacaagcacgccggcagaagcttcaacgacctgatgcagtaccccgtgttccccttcatcctggccgactacgtgagcgagaccctggacctgaacgacctgctgatctacagaaacctgagcaagcccatcgccgtgcagtacaaggagaaggaggacagatacgtggacacctacaagtacctggaggaggagtacagaaagggcgccagagaggacgaccccatgccccccgtgcagccctaccactacggcagccactacagcaacagcggcaccgtgctgcacttcctggtgagaatgccccccttcaccaagatgttcctggcctaccaggaccagagcttcgacatccccgacagaaccttccacagcaccaacaccacctggagactgagcagcttcgagagcatgaccgacgtgaaggagctgatccccgagttcttctacctgcccgagttcctggtgaacagagagggcttcgacttcggcgtgagacagaacggcgagagagtgaaccacgtgaacctgcccccctgggccagaaacgaccccagactgttcatcctgatccacagacaggccctggagagcgactacgtgagccagaacatctgccagtggatcgacctggtgttcggctacaagcagaagggcaaggccagcgtgcaggccatcaacgtgttccaccccgccacctacttcggcatggacgtgagcgccgtggaggaccccgtgcagagaagagccctggagaccatgatcaagacctacggccagacccccagacagctgttccacatggcccacgtgagcagacccggcgccaagctgaacatcgagggcgagctgcccgccgccgtgggcctgctggtgcagttcgccttcagagagaccagagagcaggtgaaggagatcacctaccccagccccctgagctggatcaagggcctgaagtggggcgagtacgtgggcagccccagcgcccccgtgcccgtggtgtgcttcagccagccccacggcgagagattcggcagcctgcaggccctgcccaccagagccatctgcggcctgagcagaaacttctgcctgctgatgacctacagcaaggagcagggcgtgagaagcatgaacagcaccgacatccagtggagcgccatcctgagctggggctacgccgacaacatcctgagactgaagagcaagcagagcgagccccccgtgaacttcatccagagcagccagcagtaccaggtgaccagctgcgcctgggtgcccgacagctgccagctgttcaccggcagcaagtgcggcgtgatcaccgcctacaccaacagattcaccagcagcacccccagcgagatcgagatggagacccagatccacctgtacggccacaccgaggagatcaccagcctgttcgtgtgcaagccctacagcatcctgatcagcgtgagcagagacggcacctgcatcatctgggacctgaacagactgtgctacgtgcagagcctggccggccacaagagccccgtgaccgccgtgagcgccagcgagaccagcggcgacatcgccaccgtgtgcgacagcgccggcggcggcagcgacctgagactgtggaccgtgaacggcgacctggtgggccacgtgcactgcagagagatcatctgcagcgtggccttcagcaaccagcccgagggcgtgagcatcaacgtgatcgccggcggcctggagaacggcatcgtgagactgtggagcacctgggacctgaagcccgtgagagagatcaccttccccaagagcaacaagcccatcatcagcctgaccttcagctgcgacggccaccacctgtacaccgccaacagcgacggcaccgtgatcgcctggtgcagaaaggaccagcagagactgaagcagcccatgttctacagcttcctgagcagctacgccgccggctag

SEQ ID NO: 113736 - DNA, 4149 bp, Artificial Sequence
  derived and/or modified sequence
atgagcaccgacagcaacagcctggccagagagttcctgaccgacgtgaacagactgtgcaacgccgtggtgcagagagtggaggccagagaggaggaggaggaggagacccacatggccaccctgggccagtacctggtgcacggcagaggcttcctgctgctgaccaagctgaacagcatcatcgaccaggccctgacctgcagagaggagctgctgaccctgctgctgagcctgctgcccctggtgtggaagatccccgtgcaggaggagaaggccaccgacttcaacctgcccctgagcgccgacatcatcctgaccaaggagaagaacagcagcagccagagaagcacccaggagaagctgcacctggagggcagcgccctgagcagccaggtgagcgccaaggtgaacgtgttcagaaagagcagaagacagagaaagatcacccacagatacagcgtgagagacgccagaaagacccagctgagcaccagcgacagcgaggccaacagcgacgagaagggcatcgccatgaacaagcacagaagaccccacctgctgcaccacttcctgaccagcttccccaagcaggaccaccccaaggccaagctggacagactggccaccaaggagcagaccccccccgacgccatggccctggagaacagcagagagatcatccccagacagggcagcaacaccgacatcctgagcgagcccgccgccctgagcgtgatcagcaacatgaacaacagccccttcgacctgtgccacgtgctgctgagcctgctggagaaggtgtgcaagttcgacgtgaccctgaaccacaacagccccctggccgccagcgtggtgcccaccctgaccgagttcctggccggcttcggcgactgctgcagcctgagcgacaacctggagagcagagtggtgagcgccggctggaccgaggagcccgtggccctgatccagagaatgctgttcagaaccgtgctgcacctgctgagcgtggacgtgagcaccgccgagatgatgcccgagaacctgagaaagaacctgaccgagctgctgagagccgccctgaagatcagaatctgcctggagaagcagcccgaccccttcgcccccagacagaagaagaccctgcaggaggtgcaggaggacttcgtgttcagcaagtacagacacagagccctgctgctgcccgagctgctggagggcgtgctgcagatcctgatctgctgcctgcagagcgccgccagcaaccccttctacttcagccaggccatggacctggtgcaggagttcatccagcaccacggcttcaacctgttcgagaccgccgtgctgcagatggagtggctggtgctgagagacggcgtgccccccgaggccagcgagcacctgaaggccctgatcaacagcgtgatgaagatcatgagcaccgtgaagaaggtgaagagcgagcagctgcaccacagcatgtgcaccagaaagagacacagaagatgcgagtacagccacttcatgcaccaccacagagacctgagcggcctgctggtgagcgccttcaagaaccaggtgagcaagaaccccttcgaggagaccgccgacggcgacgtgtactaccccgagagatgctgctgcatcgccgtgtgcgcccaccagtgcctgagactgctgcagcaggccagcctgagcagcacctgcgtgcagatcctgagcggcgtgcacaacatcggcatctgctgctgcatggaccccaagagcgtgatcatccccctgctgcacgccttcaagctgcccgccctgaagaacttccagcagcacatcctgaacatcctgaacaagctgatcctggaccagctgggcggcgccgagatcagccccaagatcaagaaggccgcctgcaacatctgcaccgtggacagcgaccagctggcccagctggaggagaccctgcagggcaacctgtgcgacgccgagctgagcagcagcctgagcagccccagctacagattccagggcatcctgcccagcagcggcagcgaggacctgctgtggaagtgggacgccctgaaggcctaccagaacttcgtgttcgaggaggacagactgcacagcatccagatcgccaaccacatctgcaacctgatccagaagggcaacatcgtggtgcagtggaagctgtacaactacatcttcaaccccgtgctgcagagaggcgtggagctggcccaccactgccagcacctgagcgtgaccagcgcccagagccacgtgtgcagccaccacaaccagtgcctgccccaggacgtgctgcagatctacgtgaagaccctgcccatcctgctgaagagcagagtgatcagagacctgttcctgagctgcaacggcgtgagccagatcatcgagctgaactgcctgaacggcatcagaagccacagcctgaaggccttcgagaccctgatcatcagcctgggcgagcagcagaaggacgccagcgtgcccgacatcgacggcatcgacatcgagcagaaggagctgagcagcgtgcacgtgggcaccagcttccaccaccagcaggcctacagcgacagcccccagagcctgagcaagttctacgccggcctgaaggaggcctaccccaagagaagaaagaccgtgaaccaggacgtgcacatcaacaccatcaacctgttcctgtgcgtggccttcctgtgcgtgagcaaggaggccgagagcgacagagagagcgccaacgacagcgaggacaccagcggctacgacagcaccgccagcgagcccctgagccacatgctgccctgcatcagcctggagagcctggtgctgcccagccccgagcacatgcaccaggccgccgacatctggagcatgtgcagatggatctacatgctgagcagcgtgttccagaagcagttctacagactgggcggcttcagagtgtgccacaagctgatcttcatgatcatccagaagctgttcagaagccacaaggaggagcagggcaagaaggagggcgacaccagcgtgaacgagaaccaggacctgaacagaatcagccagcccaagagaaccatgaaggaggacctgctgagcctggccatcaagagcgaccccatccccagcgagctgggcagcctgaagaagagcgccgacagcctgggcaagctggagctgcagcacatcagcagcatcaacgtggaggaggtgagcgccaccgaggccgcccccgaggaggccaagctgttcaccagccaggagagcgagaccagcctgcagagcatcagactgctggaggccctgctggccatctgcctgcacggcgccagaaccagccagcagaagatggagctggagctgcccaaccagaacctgagcgtggagagcatcctgttcgagatgagagaccacctgagccagagcaaggtgatcgagacccagctggccaagcccctgttcgacgccctgctgagagtggccctgggcaactacagcgccgacttcgagcacaacgacgccatgaccgagaagagccaccagagcgccgaggagctgagcagccagcccggcgacttcagcgaggaggccgaggacagccagtgctgcagcttcaagctgctggtggaggaggagggctacgaggccgacagcgagagcaaccccgaggacggcgagacccaggacgacggcgtggacctgaagagcgagaccgagggcttcagcgccagcagcagccccaacgacctgctggagaacctgacccagggcgagatcatctaccccgagatctgcatgctggagctgaacctgctgagcgccagcaaggccaagctggacgtgctggcccacgtgttcgagagcttcctgaagatcatcagacagaaggagaagaacgtgttcctgctgatgcagcagggcaccgtgaagaacctgctgggcggcttcctgagcatcctgacccaggacgacagcgacttccaggcctgccagagagtgctggtggacctgctggtgagcctgatgagcagcagaacctgcagcgaggagctgaccctgctgctgagaatcttcctggagaagagcccctgcaccagagccaccgaccagaaggtgcagagcacctag

SEQ ID NO: 113737 - protein, 282 aa, Artificial Sequence
  derived and/or modified sequence
MEAAVKEEISLEDEAVDKNIFRDCNKIAFYRRQKQWLSKKSTYQALLDSVTTDEDSTRFQIINEASKVRCQDQSPTTLDAFKGKETTVQEETQDLSTRQHLAQKEAEEPDKQGQITWDISNVAPKTENFEDLLEQTPCSACLQGFTRDNTSSSFSEDAGISLSTSVKLPLASSSKPNENEALPNQPPSQQIRHNYRLLASTVSAEMARNRQLIWELARQSEAHLDRPVVLGEQASAQREVASILCRKSVLAINQLAATVEGTISVLQQFNELLDHPLDPGRS

SEQ ID NO: 113738 - protein, 272 aa, Artificial Sequence [sequence omitted]

SEQ ID NO: 113739 - DNA, 849 bp, Artificial Sequence
  derived and/or modified sequence
atggaggctgcggttaaggaggagattagtctggaagacgaagcagtggacaagaacatcttccgagactgcaacaaaattgcattctacaggcggcaaaagcagtggctctcaaaaaagtccacctaccaggcactgctggatagcgtcacgaccgatgaggactcgactagatttcagattattaacgaagctagtaaggtgaggtgtcaggatcaatccccgaccacattagatgccttcaaaggcaaagagaccacagtccaggaagaaacacaggatctgagcactcgtcaacacctagcgcaaaaggaagcggaagagcctgataagcagggccagataacctgggacatcagcaacgttgcgcctaagactgaaaacttcgaagacctacttgaacagaccccctgctccgcctgcttacaaggatttactagggacaatacgtcaagctcgttttctgaggatgcaggaatttcattaagcacctccgtcaagctgcccttagcctcatctagcaagccaaatgagaacgaagctcttcctaatcagcctccaagccagcaaatcagacacaactatcggcttctcgctagcacggtttccgccgaaatggcaagaaataggcagcttatatgggagctggcccgccagtccgaggcccatctggaccggcccgttgtgctgggagagcaggccagtgctcaaagagaggttgcttctatattatgccgcaagagtgtcctggccattaaccagctcgccgcaaccgtagagggcacaatcagcgttctgcaacagttcaatgaactgttggaccatcctttagatcctgggcgtagctag

SEQ ID NO: 113740 - DNA, 819 bp, Artificial Sequence
  derived and/or modified sequence
atgaggagcctcgacttggcgagtcagctgcttaggaatcaaatcgtcacagaccccgacaacctgatggaggacgctgcatgggctaagcactgcgaccagaatctcgtagctagtgacgccccaggcgaggaaggaaccgggatcctgaagtctaaaagaacccaagccgccgatcatcagcccattctcaaaacggtgaaggccagtgatgaggattgccaactgaggatttcggaccgaatccgtgagacaagtgatctggaggattcttgggacgagtcttctggggctggttgtagccagggcacaccatcctattcttccagccactcactgttccgaggagccgtggctccatgccagagctcgcctatggcccggctcggagtgtccggcgagccatctccttgcacctcgaccaaccgctccacccccggagtcgcaagtacgccccagacaccagtcagtagcagccgagccgggttcgtctccggaggagaccgacctcttaccagcgaaccccccccacgttgggctaggcggcggagacggtctgttgctcgtaccatagccgccgagctggccgagaatcgcagacttgccagagagctgtcgaaacgggaggaggagaagctggataggttgatcgctatcggagaggaagcctccgcgcagcaggacactgcgaatgagctccgacgggacgcagtcattgcagtgcggagattggccaccgctgtggaggaggctaccggcgctttccagttgggactcgagaagttactacagagactaatctcaaacacaaagtcttag

SEQ ID NO: 113741 - DNA, 1437 bp, Artificial Sequence
  derived and/or modified sequence
ataatcaagacaaatttgccaaataaatcattgtagaaacgctagtttgggcctgaaaaattccaggagcaagagtcaagatttgtcactccatgagaatctggaggggactcccttcccagaaacttgacgatgaagtactggttgtaattttagaaagacacccaatcggcttttttaaaagatcgcccagggcccttgtcctgagagctgggagctggtcggagtgacagagaagccatggaagcagcagtgaaagaggaaataagtcttgaagatgaagctgtagataaaaacattttcagagactgtaacaagatcgcattttacaggcgtcagaaacagtggctttccaagaagtccacctatcaggcattattggattcagtcacaacagatgaagacagcaccaggttccaaatcatcaatgaagcaagtaaggtcaggtgccaggaccagagcccaacaactctggatgccttcaaaggcaaagaaaccacagtccaggaggagacacaggatctcagcacaagacagcacctggctcaaaaggaagctgaggagcctgataaacaaggacaaattacctgggacatcagcaacgtagctcccaagactgagaactttgaggacctcttggaacaaactccatgctcagcctgtttgcaaggtttcaccagagacaacacttccagcagcttctccgaggatgcaggaatatctctgagcacctctgtgaagttaccccttgcctcttcatctaagcctaatgaaaatgaagctttgcccaaccagccaccttctcagcagataaggcacaactaccgcttattagccagtactgtgtctgcagaaatggccaggaacaggcagctaatttgggaactggccagacaatcagaagcacacctggacaggccagttgtccttggggaacaggccagtgcccagcgtgaggttgccagtattctttgtagaaaatcagtgcttgcaataaaccaactggctgcaactgtagaagggacaattagtgtcctacagcaatttaatgaactattagaccatcctctggatcccgggaggtcttgatcacagctggtagaggtggccactcactgttctatgtcttttaggttaacagttctttacataacagtgaagagtcctggtgcctcaggaaaagcaagatcaacctaccaaggaagagttgatggagtcataattttcctacttaacacccactgcaaatttaaatatgtgttctagggctgtttgttaattctattatggtctttactaattgtgattcccagttctgggtgaataaaaagtttttgttttaatgtaattgtgatcaacactatgcttgaagacatagacaaagctatttctaccaccatgatgtttacaaaatatctggtattttcgcctatatgg

SEQ ID NO: 113742 - DNA, 849 bp, Artificial Sequence
  derived and/or modified sequence
atggaggccgctgtgaaggaggagatcagcctggaggatgaagctgtggacaagaacatcttccgggactgcaacaagatcgccttctaccgccggcagaagcagtggctgagcaagaagagcacctaccaggccctgctggacagcgtgaccacagatgaggacagcacccgcttccagatcatcaatgaggccagcaaggtgcgctgccaggaccagagccccaccaccctggatgccttcaagggcaaggagaccaccgtgcaggaggagacccaggacctgagcacccggcagcacctggcccagaaggaggccgaggagccagacaagcagggccagatcacctgggacatcagcaatgtggcccccaagacagaaaattttgaggacctgctggagcagaccccctgcagcgcctgcctgcagggcttcacccgggacaacaccagcagcagcttctctgaagatgctggcatcagcctgagcacctctgtgaagctgcccctggccagcagcagcaagcccaatgaaaatgaggccctgcccaaccagccccccagccagcagatccgccacaactaccgcctgctggccagcacagtgtctgctgagatggccaggaaccggcagctgatctgggagctggcccggcagagcgaggcccacctggacaggcctgtggtgctgggggagcaggccagcgcccagcgggaggtggccagcatcctgtgcaggaagtctgtgctggccatcaaccagctggccgccaccgtggagggcaccatctctgtgctgcagcagttcaatgagctgctggaccaccccctggaccccggccgctcctag

SEQ ID NO: 113743 - DNA, 849 bp, Artificial Sequence
  derived and/or modified sequence
atggaggccgccgtgaaggaggagatcagcctggaggacgaggccgtcgacaaaaatatctttcgcgactgtaataaaattgcattttacagaaggcagaaacagtggttgtcgaagaaatcaacttaccaggcacttctcgacagcgtgaccactgacgaagattccactagattccagataatcaatgaggcctccaaggtgcggtgtcaagatcagagcccaactacactcgatgcttttaaagggaaagagaccacagtgcaggaggaaactcaggatctgtctacaagacaacaccttgcccagaaagaggctgaggagcccgacaagcagggtcaaatcacttgggatattagcaacgtggccccgaaaactgagaatttcgaggatctccttgaacagaccccctgcagtgcctgcttgcagggttttaccagagataacactagcagttcattcagtgaggatgcgggcatatccttatccaccagtgtaaagctcccacttgccagcagttctaagcctaacgagaatgaggcgctccccaaccaaccgccctctcagcaaattagacacaactataggctgctggcctccactgtgagtgctgagatggcaaggaatagacagttgatttgggagctcgccaggcagtccgaagcccatctggataggccggtggttttaggtgaacaggcatccgcacagcgcgaggttgcgtcgatcctttgccgaaaatctgtcctggctatcaaccagctggccgcaaccgtcgagggcacgatatcagtgctgcaacagttcaacgagttactggatcaccctctcgatccaggtcggtcttag

SEQ ID NO: 113744 - DNA, 819 bp, Artificial Sequence
  derived and/or modified sequence
atgcggagcctggacctggccagccagctgctgcggaaccagatcgtgaccgaccccgacaatttgatggaagacgccgcctgggcaaaacattgtgatcagaacttagttgccagcgatgcaccaggagaagagggtacaggtatcctgaagagtaagcgtacacaagccgcagaccaccagccaatcttaaagaccgtcaaagcctccgacgaggactgccagttgagaatttctgatcgcattcgtgagacatccgaccttgaagactcatgggacgaatcctcaggcgcaggctgctcgcagggtaccccctcatacagttcctctcattcgctgttcaggggcgctgtggcaccctgccagagtagtcccatggccagactgggcgtcagtggagaaccctcaccatgtacttccacaaacaggagcactcccggggttgcctcgacaccacagacccccgtgtccagctctcgtgctggtttcgtttccggcggagaccgacctctcacctccgagcccccacccaggtgggccaggaggcgccgcagaagtgtggcccggacaattgcagcggaactcgcagagaaccgaagattggcccgggaactttcaaagcgggaagaagagaaactggaccgccttattgctataggtgaggaggcgtccgcacaacaggacaccgccaatgaattgcggagagatgcagtgatcgcagttcgtaggctggcgaccgccgtcgaggaggccactggggccttccagctgggcttagaaaaactactgcagagactaatctctaacacaaagtcgtag

SEQ ID NO: 113745 - DNA, 849 bp, Artificial Sequence
  derived and/or modified sequence
atggaggcggctgtcaaggaggagatctccctcgaagatgaagccgtcgataaaaacatatttagagactgcaacaaaattgcgttctaccgacggcagaagcagtggctctccaagaaatccacctaccaggccctactggattccgttacaacagacgaagattcaactcgcttccagatcatcaacgaggcatctaaagtgcggtgtcaagaccaatccccgaccacgctggatgccttcaaaggtaaggagactactgtgcaggaggaaacgcaggacttgtccacgaggcagcacctcgcacagaaggaggccgaagaacccgataagcaaggccagattacgtgggacatcagcaacgtggcccctaagaccgagaatttcgaggacctgttggagcagacaccctgcagcgcttgcctccaggggtttaccagagataacacaagttcctcctttagtgaagacgctggcatttccttatccacttcagtgaagcttcctctcgcaagctcaagcaagcccaacgagaacgaggctctgcctaatcagccaccatcccaacagattcgccacaattatagactgcttgcctctaccgtctcggcagaaatggcacgaaatagacagctcatttgggagctggccagacagagcgaagcacaccttgatagaccagtggtcctgggagagcaggcgagcgcacagagggaggtggcctcaattctgtgccgaaagtcagtattagctatcaatcagcttgccgctaccgttgagggaacgatttctgttctgcagcaatttaacgagctgctggatcaccccttggacccagggaggagctag

SEQ ID NO: 113746 - DNA, 819 bp, Artificial Sequence
  derived and/or modified sequence
atgagaagcctggacctggcaagtcagctgttgcggaatcagatcgtcaccgacccagacaatctcatggaggatgccgcatgggctaaacactgtgaccaaaatcttgtggcttctgatgccccaggcgaagaaggcactggcattctgaagagcaagagaacccaggccgctgaccatcaacctatcctgaagacagtaaaggcatcagacgaagactgccagctccggatatccgatcggatccgcgagacttcggacttggaagatagctgggacgagtcctccggggctggctgtagtcaagggacacctagttattcatccagtcacagtcttttccgcggagccgtggcaccatgccagtcctctcccatggcaagattgggcgtgtcaggggagccctccccatgcactagcaccaacaggtccacacccggagtggcctctacacctcaaacacccgtgtccagcagcagagcagggtttgtctcaggcggtgaccggccactgacatcggagcctcccccaaggtgggctcgcagaagaaggcgatcagtggccaggacaattgcagccgaactggccgaaaataggaggctggcccgagagctgtcaaaacgggaggaggagaaattggataggttaattgctataggtgaggaggcctctgcccagcaggacaccgctaacgaattaaggagggacgctgtgatcgccgtccggaggctcgcaactgctgtagaggaggccaccggggcttttcaactggggttagagaaactgctgcagcggctgatcagcaatacaaagtcatag

SEQ ID NO: 113747 - DNA, 849 bp, Artificial Sequence
  derived and/or modified sequence
atggaggccgccgtgaaggaggagatcagcctggaggacgaggccgtggacaagaacatcttcagagactgcaacaagatcgccttctacagaagacagaagcagtggctgagcaagaagagcacctaccaggccctgctggacagcgtgaccaccgacgaggacagcaccagattccagatcatcaacgaggccagcaaggtgagatgccaggaccagagccccaccaccctggacgccttcaagggcaaggagaccaccgtgcaggaggagacccaggacctgagcaccagacagcacctggcccagaaggaggccgaggagcccgacaagcagggccagatcacctgggacatcagcaacgtggcccccaagaccgagaacttcgaggacctgctggagcagaccccctgcagcgcctgcctgcagggcttcaccagagacaacaccagcagcagcttcagcgaggacgccggcatcagcctgagcaccagcgtgaagctgcccctggccagcagcagcaagcccaacgagaacgaggccctgcccaaccagccccccagccagcagatcagacacaactacagactgctggccagcaccgtgagcgccgagatggccagaaacagacagctgatctgggagctggccagacagagcgaggcccacctggacagacccgtggtgctgggcgagcaggccagcgcccagagagaggtggccagcatcctgtgcagaaagagcgtgctggccatcaaccagctggccgccaccgtggagggcaccatcagcgtgctgcagcagttcaacgagctgctggaccaccccctggaccccggcagaagctag

SEQ ID NO: 113748 - DNA, 819 bp, Artificial Sequence
  derived and/or modified sequence
atgagaagcctggacctggccagccagctgctgagaaaccagatcgtgaccgaccccgacaacctgatggaggacgccgcctgggccaagcactgcgaccagaacctggtggccagcgacgcccccggcgaggagggcaccggcatcctgaagagcaagagaacccaggccgccgaccaccagcccatcctgaagaccgtgaaggccagcgacgaggactgccagctgagaatcagcgacagaatcagagagaccagcgacctggaggacagctgggacgagagcagcggcgccggctgcagccagggcacccccagctacagcagcagccacagcctgttcagaggcgccgtggccccctgccagagcagccccatggccagactgggcgtgagcggcgagcccagcccctgcaccagcaccaacagaagcacccccggcgtggccagcaccccccagacccccgtgagcagcagcagagccggcttcgtgagcggcggcgacagacccctgaccagcgagcccccccccagatgggccagaagaagaagaagaagcgtggccagaaccatcgccgccgagctggccgagaacagaagactggccagagagctgagcaagagagaggaggagaagctggacagactgatcgccatcggcgaggaggccagcgcccagcaggacaccgccaacgagctgagaagagacgccgtgatcgccgtgagaagactggccaccgccgtggaggaggccaccggcgccttccagctgggcctggagaagctgctgcagagactgatcagcaacaccaagagctag

SEQ ID NO: 113749 - protein, 561 aa, Artificial Sequence
  derived and/or modified sequence
MRRFVYCKVVLATSLMWVLVDVFLLLYFSECNKCDDKKERSLLPALRAVISRNQEGPGEMGKAVLIPKDDQEKMKELFKINQFNLMASDLIALNRSLPDVRLEGCKTKVYPDELPNTSVVIVFHNEAWSTLLRTVYSVINRSPHYLLSEVILVDDASERDFLKLTLENYVKNLEVPVKIIRMEERSGLIRARLRGAAASKGQVITFLDAHCECTLGWLEPLLARIKEDRKTVVCPIIDVISDDTFEYMAGSDMTYGGFNWKLNFRWYPVPQREMDRRKGDRTLPVRTPTMAGGLFSIDRNYFEEIGTYDAGMDIWGGENLEMSFRIWQCGGSLEIVTCSHVGHVFRKATPYTFPGGTGHVINKNNRRLAEVWMDEFKDFFYIISPGVVKVDYGDVSVRKTLRENLKCKPFSWYLENIYPDSQIPRRYYSLGEIRNVETNQCLDNMGRKENEKVGIFNCHGMGGNQVFSYTADKEIRTDDLCLDVSRLNGPVIMLKCHHMRGNQLWEYDAESCLSVNKVADGSQHPTVETCNDSTLQKWLLRNYTRMEIFRNIFGNSTDYIL

SEQ ID NO: 113750 - DNA, 1686 bp, Artificial Sequence
  derived and/or modified sequence
atgagaagattcgtgtactgcaaggtggtgctggccaccagcctgatgtgggtgctggtggacgtgttcctgctgctgtacttcagcgagtgcaacaagtgcgacgacaagaaggagagaagcctgctgcccgccctgagagccgtgatcagcagaaaccaggagggccccggcgagatgggcaaggccgtgctgatccccaaggacgaccaggagaagatgaaggagctgttcaagatcaaccagttcaacctgatggccagcgacctgatcgccctgaacagaagcctgcccgacgtgagactggagggctgcaagaccaaggtgtaccccgacgagctgcccaacaccagcgtggtgatcgtgttccacaacgaggcctggagcaccctgctgagaaccgtgtacagcgtgatcaacagaagcccccactacctgctgagcgaggtgatcctggtggacgacgccagcgagagagacttcctgaagctgaccctggagaactacgtgaagaacctggaggtgcccgtgaagatcatcagaatggaggagagaagcggcctgatcagagccagactgagaggcgccgccgccagcaagggccaggtgatcaccttcctggacgcccactgcgagtgcaccctgggctggctggagcccctgctggccagaatcaaggaggacagaaagaccgtggtgtgccccatcatcgacgtgatcagcgacgacaccttcgagtacatggccggcagcgacatgacctacggcggcttcaactggaagctgaacttcagatggtaccccgtgccccagagagagatggacagaagaaagggcgacagaaccctgcccgtgagaacccccaccatggccggcggcctgttcagcatcgacagaaactacttcgaggagatcggcacctacgacgccggcatggacatctggggcggcgagaacctggagatgagcttcagaatctggcagtgcggcggcagcctggagatcgtgacctgcagccacgtgggccacgtgttcagaaaggccaccccctacaccttccccggcggcaccggccacgtgatcaacaagaacaacagaagactggccgaggtgtggatggacgagttcaaggacttcttctacatcatcagccccggcgtggtgaaggtggactacggcgacgtgagcgtgagaaagaccctgagagagaacctgaagtgcaagcccttcagctggtacctggagaacatctaccccgacagccagatccccagaagatactacagcctgggcgagatcagaaacgtggagaccaaccagtgcctggacaacatgggcagaaaggagaacgagaaggtgggcatcttcaactgccacggcatgggcggcaaccaggtgttcagctacaccgccgacaaggagatcagaaccgacgacctgtgcctggacgtgagcagactgaacggccccgtgatcatgctgaagtgccaccacatgagaggcaaccagctgtgggagtacgacgccgagagctgcctgagcgtgaacaaggtggccgacggcagccagcaccccaccgtggagacctgcaacgacagcaccctgcagaagtggctgctgagaaactacaccagaatggagatcttcagaaacatcttcggcaacagcaccgactacatcctgtag

SEQ ID NO: 113751 - DNA, 1686 bp, Artificial Sequence
  derived and/or modified sequence
atgcgccgcttcgtgtactgtaaagtcgtgctcgccacaagcctcatgtgggttctggtcgacgtgtttctgcttttgtacttctccgaatgcaacaagtgcgacgataaaaaggaaagaagcctactgccggccttacgagctgtcatctctcgaaaccaagaaggccctggggaaatgggtaaagctgtgttgattccaaaagatgaccaagaaaaaatgaaggagctgttcaagatcaaccagtttaatctcatggcttcagatttaatcgcactcaaccgttctttgcctgacgtacgtctcgagggctgtaaaaccaaggtgtaccctgacgagctgcccaacaccagcgtagtcattgtgtttcataacgaagcttggagtaccctgctccgaaccgtgtacagcgtgataaatcgctccccacactatctgctgtccgaagtgatactggtggatgacgcatctgagcgagatttccttaagctcaccctcgagaactacgtcaaaaatcttgaagtgccagtgaaaattatccgaatggaagagcgaagtgggctcatacgcgcacgcctgcgcggcgccgccgcaagtaaaggacaggttataacttttcttgatgcgcattgcgagtgcactctggggtggctcgaacctcttctagcccgcattaaggaggaccggaagacagtggtgtgccccattattgatgtcatttccgatgatacctttgaatatatggccggctcagacatgacttatggggggttcaattggaagctcaatttcaggtggtatcccgtgccacagagagaaatggacagaaggaagggcgatcgaactctgcccgtgaggactcccacaatggccggaggcctatttagtatcgacagaaattattttgaagaaattggaacctacgatgctgggatggacatctgggggggtgaaaatctggagatgtcctttaggatctggcagtgcggaggttcactggagattgtgacgtgctcccacgtggggcatgtcttcagaaaggcgacaccttatacattccccgggggcaccggacacgttattaacaaaaataaccgcagactcgccgaagtctggatggacgagtttaaagattttttttatattataagccctggcgtggtgaaagtggattatggagacgtgtcagtcagaaaaaccctccgggaaaacttgaaatgtaagccattctcttggtaccttgaaaatatatacccagacagccaaatccccaggagatactattcgctcggcgaaataaggaacgtggaaacaaatcagtgtctcgataatatgggccgaaaggagaacgagaaagtgggaatttttaactgtcacggaatggggggtaatcaggtgttctcgtacacagcagacaaagagattcgcaccgatgatctgtgccttgatgtgtcacggctgaacggccctgttattatgcttaagtgtcatcacatgcgcggcaaccaattatgggagtatgatgccgaaagctgcttgagtgtaaataaggtagcagatggcagtcagcatccaaccgtggaaacctgcaacgattccacactgcagaagtggctgcttaggaattatacccgtatggagatctttcggaatatattcgggaactctacggactatatattgtag

SEQ ID NO: 113752 - DNA, 1686 bp, Artificial Sequence
  derived and/or modified sequence
atgagaagatttgtgtactgcaaggtggtgctggccaccagcctgatgtgggtgctggtggatgtgttcctgctgctgtacttcagcgagtgcaacaagtgtgatgacaagaaggagaggagcctgctgcctgccctgcgggccgtcatcagcaggaaccaggagggccctggagagatgggcaaggctgtgctgatccccaaggatgaccaggagaagatgaaggagctgttcaagatcaaccagttcaacctgatggccagtgacctgattgccctgaacagaagcctgcctgatgtgcggctggagggctgcaagaccaaggtgtacccagatgagctgcccaacacctctgtggtgattgtgttccacaatgaggcctggagcaccctgctgaggacagtgtacagcgtcatcaacagaagcccccactacctgctgtctgaggtgatcctggtggatgatgccagcgagcgggacttcctgaagctgaccctggagaactacgtgaagaacctggaggtgcctgtgaagatcatccgcatggaggagaggagcggcctcatccgggcccggctgcggggagctgctgccagcaagggccaggtgatcaccttcctggatgcccactgtgagtgcaccctgggctggctggagcccctgctggcccgcatcaaggaggacaggaagacagtggtgtgccccatcattgatgtgatcagtgatgacacctttgagtacatggccggcagtgacatgacctatggaggcttcaactggaagctgaacttccgctggtaccctgtgccccagcgggagatggacaggaggaagggggacaggaccctgcctgtgaggacccccaccatggccggcggcctcttcagcattgacaggaactactttgaggagatcggcacctatgatgctggcatggacatctggggcggggagaacctggagatgtccttccgcatctggcagtgtggcggcagcctggagatcgtgacctgcagccacgtgggccacgtgttcaggaaggccaccccctacaccttccctgggggcactggacatgtgatcaacaagaacaacagaaggctggccgaggtgtggatggatgagttcaaggacttcttctacatcatcagccctggggtggtgaaggtggactatggagatgtgtctgtgaggaagaccctgcgggagaacctgaagtgcaagcccttctcctggtacctggagaacatctacccagacagccagatcccccggcgctactacagcctgggggagatcagaaatgtggagaccaaccagtgcctggacaacatgggcaggaaagaaaatgagaaggtgggcatcttcaactgccacggcatgggcggcaaccaggtgttctcctacacagctgacaaggagatcagaacagatgacctgtgcctggatgtgtcccggctgaatggacctgtgatcatgctgaagtgccaccacatgaggggcaaccagctgtgggagtatgatgctgagagctgcctgtctgtgaacaaggtggctgatggcagccagcaccccaccgtggagacctgcaatgacagcaccctgcagaagtggctgctgaggaactacaccaggatggagatcttcaggaacatctttggaaacagcacagactacatcctgtag

SEQ ID NO: 113753 - DNA, 1686 bp, Artificial Sequence
  derived and/or modified sequence
atgcggcggttcgtgtactgcaaggtggtgctggccaccagcctgatgtgggtattggtggatgtgttcctcctgctttactttagtgagtgtaacaagtgtgatgataagaaggagcgcagtttgctcccggcccttagggccgttatatcaaggaaccaggagggcccaggagagatgggcaaggcagttcttatacctaaggatgaccaggagaagatgaaggagttgtttaagatcaatcaatttaacctaatggcttctgatctgatagccttaaatcgaagcttgcccgatgtgcggctcgaaggatgtaagactaaggtgtatcccgatgagctgcccaacacctctgttgtaatcgttttccataacgaagcgtggtctactctgcttagaacagtttattccgtcatcaatcggagtcctcactacctgctgtcggaggtgatattagttgatgacgcctccgagagagattttttgaaactcaccctggaaaattatgtcaaaaacttggaagtcccagtgaagataattagaatggaggagcgctccggactgattagagctcgcttgaggggcgctgccgcgagcaaaggccaagtgattacattccttgacgcacattgtgaatgtacccttggatggctcgaaccattgctggcgcggatcaaagaggataggaaaacagtcgtatgccctattatcgacgtcatttccgacgatacttttgaatatatggccggatcggatatgacttatggcggctttaattggaaacttaatttccggtggtatccagtaccgcagagagagatggaccggagaaagggggaccgcaccctaccagtgcgcacaccaaccatggccggcgggctcttcagcatcgatagaaactactttgaggagatcggtacttatgatgccggaatggatatttggggaggagagaaccttgagatgagcttcagaatctggcaatgcggggggtctctggaaatcgtgacctgttcccacgtggggcatgtgtttaggaaggctactccgtataccttccccggcggcactgggcatgtgatcaataagaataaccggaggctggcagaggtgtggatggatgagtttaaggacttcttttatatcatctccccaggcgtggttaaggtggactacggcgatgtgtctgttagaaagaccctgagggagaacctgaaatgtaagcccttttcatggtatctggagaacatctaccccgattcccagatccccaggcgatactatagtctgggagaaattcgaaacgtggaaaccaatcagtgtctggataatatgggacggaaagaaaatgagaaggttgggattttcaattgccacggtatgggagggaaccaggtgttcagctatactgccgacaaagagatccgaacagatgacttatgcctagatgtgagtcggttgaacggtccagtcataatgcttaagtgtcaccacatgcgaggcaaccagctgtgggagtatgatgctgaatcctgccttagcgtgaataaggttgccgacggctcccagcaccccaccgtcgaaacatgtaacgactctacgctgcagaaatggctgttgcgcaactacaccagaatggagattttcaggaacatcttcggaaactctaccgactatattctgtag

SEQ ID NO: 113754 - DNA, 1686 bp, Artificial Sequence
  derived and/or modified sequence
atgagacggtttgtgtactgcaaggtcgtgcttgccacaagtctgatgtgggtgctcgtggacgtttttctgttgttgtacttcagtgagtgcaacaaatgcgatgacaagaaagagcgctctctgctgccagccttaagagcagtcatcagccgcaatcaagagggcccaggagagatgggaaaggcagtgctcatcccaaaagatgatcaagagaagatgaaggagttgtttaaaattaatcaattcaatttaatggcctctgacttaatcgccctgaatcgatcccttcctgacgtgcgcttggaaggctgcaaaacgaaggtctatcctgacgaactgcccaacaccagcgtcgttattgtgtttcacaacgaagcctggtccaccctgcttcggaccgtctattctgtgattaatagatcacctcactatctcctcagcgaggtgatccttgtggacgatgccagcgagcgcgacttcctgaagctgactctagagaactacgtcaagaatctagaagtccctgtcaaaatcatccgcatggaggagagaagtggactcattcgggcacgcctccgaggcgcagcagctagcaaagggcaggtgattacctttctggatgcacattgcgaatgtaccctcggatggttagagcccctgttggccaggattaaagaagaccggaagaccgtggtctgtcctattatcgacgttatttccgatgacacatttgagtacatggctgggagcgacatgacatatggaggcttcaattggaagttgaatttccgctggtatccggtcccacagagagagatggatcgccgtaaaggcgacaggacattgcccgttcggactccaacaatggctggaggcttatttagcatcgacagaaattactttgaggagatcgggacttacgatgccggaatggatatatggggaggggaaaatttggagatgagttttcgaatctggcagtgcggcggatctctggaaatcgtgacctgcagccatgtgggccatgtgttccgaaaagccacaccttacacgttccccggaggtacggggcacgtgatcaacaagaataaccgaagattggccgaggtgtggatggacgaattcaaggatttcttttatattatctcccctggggttgtcaaagtggattacggcgatgtgagtgttcgcaagactctgcgggaaaacctgaagtgtaagcccttctcttggtatcttgaaaacatttacccagactctcagatccctagacgctattactccctcggtgagattagaaatgtagagaccaaccagtgtctcgataacatgggaagaaaagagaatgaaaaggtcggaattttcaactgccacggcatgggcggtaatcaggtgttctcctataccgctgataaagagatcaggaccgacgacctgtgcctcgacgtgagccggctgaacggccctgtgatcatgcttaagtgtcaccatatgcggggaaaccaactctgggaatatgatgctgaaagctgcctgtctgtgaataaggtcgccgacggttctcagcaccccaccgtggagacatgcaacgatagcaccttgcagaaatggctgctgaggaactacacccggatggagatttttcggaatatttttggtaactccacagactacatattatag

SEQ ID NO: 113755 - DNA, 2591 bp, Artificial Sequence
  derived and/or modified sequence
atgaggagatttgtctactgcaaggtggttctagccacttcgctgatgtgggttcttgttgatgtcttcttactgctgtacttcagtgaatgtaacaaatgtgatgacaagaaggagagatctctgctgcctgcattgagggctgttatttcaagaaaccaagaagggccaggagaaatgggaaaagctgtgttgattcctaaagatgaccaggagaaaatgaaagagctgtttaaaatcaatcagtttaaccttatggccagtgatttgattgcccttaatagaagtctgccagatgtaagattagaaggatgtaagacaaaagtctaccctgatgaacttccaaacacaagtgtagtcattgtgtttcataatgaagcttggagcactctccttagaactgtttacagtgtgataaatcgttccccacactatctactctcagaggtcatcttggtagatgatgccagtgaaagagattttctcaagttgacattagagaattacgtgaaaaatttagaagtgccagtaaaaattattaggatggaagaacgctctgggttaatacgtgcccgtcttcgaggagcagctgcttcaaaagggcaggtcataacttttcttgatgcacactgtgaatgcacgttaggatggctggagcctttgctggcaagaataaaggaagacaggaaaacggttgtctgccctatcattgatgtgattagtgatgatacttttgaatatatggctgggtcagacatgacttatgggggttttaactggaaactgaatttccgctggtatcctgttccccaaagagaaatggacaggaggaaaggagacagaacattacctgtcaggacccctactatggctggtggcctattttctattgacagaaactactttgaagagataggaacttacgatgcaggaatggatatctggggtggagagaatcttgaaatgtcttttaggatttggcaatgtggaggctccttggagattgttacttgctcccatgttggtcatgtttttcggaaggcaactccatacacttttcctggtggcactggtcatgtcatcaacaagaacaacaggagactggcagaagtttggatggatgaatttaaagatttcttctacatcatatccccaggtgttgtcaaagtggattatggagatgtgtcagtcagaaaaacactaagagaaaatctgaagtgtaagcccttttcttggtacctagaaaacatctatccggactcccagatcccaagacgttattactcacttggtgagataagaaatgttgaaaccaatcagtgtttagacaacatgggccgcaaggaaaatgaaaaagtgggtatattcaactgtcatggtatgggaggaaatcaggtattttcttacactgctgacaaagaaatccgaaccgatgacttgtgcttggatgtttctagactcaatggacctgtaatcatgttaaaatgccaccatatgagaggaaatcagttatgggaatatgatgctgagtcttgtctctcagtgaacaaagtagctgatggctcccagcatcctactgtggaaacctgtaatgatagcactttgcaaaaatggctactaagaaactatacaagaatggaaatttttagaaatatttttgggaattctactgattacattctctaatgatttttggagagactcacgttgcgacatgttaacagtaaccaatgtctcgatgaaccttctgaagaagacaaaatggtgcctacaatgcaggactgtagtggaagcagatcccaacagtggctgctaaggaacatgaccttgggcacatgaagatcatgtcctccaagccatgaaagtgtctacgcttttgtttttccattatttcaattgggggaaaatattaactttgctgaattgaaagttttaaaaatccttttagtattctaaaacacaattgtttctaattcgtttctagaaatgtttgcttatttccctactaaaatttgtatctgatcaaagcacataagaatataaataatagcaaactactattaaacaacagaacaacttgtaaaacaaattgtgtttgctttaagaaaaatgtttattgcactcatgtcatagggttaattggaggttattttatttttggttgtcatggtgattgaaagagataatgtaaatgccttataaaatcttcattatgaaatattatcagttgctttataaactcactctttttatggatccttcatggaaacatgtttgatttctgtgtctacaacagggccacatattaaattacttctgaatggtgaattcatcttacaaaatgttccaagttttggacaaggaaaaacattacattggatattgaattcatggagcctttacagaagcatcacatttaaaccaatgtgaattcaaaaaagagaaggaaactttttaaattcaatttagagtacataaaaaaagaaatccgcgaagcattgaggggaacaagatgagtctaatccgcagcacttcgatcactgtgagagaactcaaagtgggttgcaatcattcctaacacaggctgaaac

SEQ ID NO: 113756 - protein, 230 aa, Artificial Sequence
  derived and/or modified sequence
MKNPMLEVVSLLLEKLLLISNFTLFSSGAAGEDKGRNSFYETSSFHRGDVLEVPRTHLTHYGIYLGDNRVAHMMPDILLALTDDMGRTQKVVSNKRLILGVIVKVASIRVDTVEDFAYGANILVNHLDESLQKKALLNEEVARRAEKLLGFTPYSLLWNNCEHFVTYCRYGTPISPQSDKFCETVKIIIRDQRSVLASAVLGLASIVCTGLVSYTTLPAIFIPFFLWMAG

SEQ ID NO: 113757 - protein, 69 aa, Artificial Sequence
  derived and/or modified sequence
MKNPMLEVVSLLLEKLLLISNFTLFSSGAAGEDKGRNSFYETSSFHRGDVLEVPRTHLTHYGIYLGDNR

SEQ ID NO: 113758 - DNA, 693 bp, Artificial Sequence
  derived and/or modified sequence
atgaaaaacccgatgttggaagtggtctcactactcttggagaagctgctactgatttctaactttacactgttttccagcggcgccgctggcgaggacaagggccggaactccttttacgagacttcttcttttcaccgcggtgacgtgcttgaagtcccgcgcacacatctcacccactatggtatttatttgggtgataatcgggttgcccatatgatgcccgacatcctgttggcactcaccgacgatatgggtcgcactcagaaggtggtgtctaataagcgcctcatactgggtgtaattgtaaaggtcgcaagtatccgggtggatacagttgaggacttcgcctacggcgccaacattctcgttaaccaccttgacgaatctctgcagaaaaaggcactcttaaacgaagaggtagcaagacgagcagagaaactcctcggctttactccgtattccttgctgtggaataactgcgagcatttcgttacttattgcagatacgggactcccattagcccccaatctgacaagttttgtgaaacagtcaagataatcatcagggatcagagatctgtgttagcctctgcggtgttgggactggcctccatagtctgcaccggccttgtgtcttataccaccctgcccgctatatttattccattctttttgtggatggctggctag

SEQ ID NO: 113759 - DNA, 210 bp, Artificial Sequence
  derived and/or modified sequence
atgaaaaatccgatgctggaagtggtcagcctgctgctggaaaagctgcttctgattagcaattttactttgttttctagcggcgctgctggtgaagataaggggagaaattctttctacgaaaccagcagcttccatcggggtgacgtgcttgaggtccctaggacccatctgacccactatggcatctacctgggtgataaccggtag

SEQ ID NO: 113760 - DNA, 693 bp, Artificial Sequence
  derived and/or modified sequence
atgaagaaccccatgctcgaagttgtctctctcctcctggagaaactgctcctgatctccaactttactttattctcaagcggagctgcaggagaagacaagggaagaaatagcttctacgaaacaagctcctttcatcgcggagacgttctagaggtgccaagaacacacctgacccattacggaatctacctgggtgacaaccgtgtagcccatatgatgcccgatatcttgctagcactgaccgatgacatgggccggacccagaaagtggttagtaataaacggcttatccttggcgttatcgtgaaggtggcttcaatccgagtggacactgtcgaggacttcgcttacggagcaaacattcttgtgaatcacttggacgaaagtctgcaaaaaaaggcacttttgaacgaagaagtcgcaagaagagccgagaagttgctgggatttaccccatacagtttgctctggaacaattgcgagcacttcgtgacatattgtagatacggaaccccaatctcaccacagagcgacaaattctgtgagacagttaaaattatcataagggatcagcggtccgtgctggcatcagccgttctcggactggcctcaatagtctgcacgggcctggtcagttatacgacactcccagctatctttattcccttcttcttgtggatggccggctag

SEQ ID NO: 113761 - DNA, 693 bp, Artificial Sequence
  derived and/or modified sequence
atgaagaaccccatgctggaggtggtgtccctgctgctggagaagctgctgctgatcagcaacttcaccctcttcagcagtggagctgctggggaggacaagggcaggaacagcttctatgagaccagcagcttccacagaggagatgtgctggaggtgcccaggacccacctgacccactacggcatctacctgggggacaacagagtggcccacatgatgccagacatcctgctggccctgacagatgacatgggccgcacccagaaggtggtgagcaacaagaggctcatcctgggcgtcatcgtgaaggtggccagcatccgggtggacacagtggaggactttgcctacggggccaacatcctggtgaaccacctggatgagagcctgcagaagaaggccctgctgaatgaggaggtggccaggagagctgagaagctgctgggcttcaccccctacagcctgctgtggaacaactgtgagcactttgtgacctactgccgctatggcacccccatcagcccccagagcgacaagttctgtgagaccgtgaagatcatcatccgggaccagaggtctgtgctggccagcgctgtgctgggcctggccagcatcgtgtgcaccggcctggtgtcctacaccaccctgcctgccatcttcatccccttcttcctgtggatggccggctag

SEQ ID NO: 113762 - DNA, 210 bp, Artificial Sequence
  derived and/or modified sequence
atgaagaaccccatgctggaggtggtgtccctgctgctggagaagctgctgctgatcagcaacttcaccctcttcagcagtggagctgctggggaggacaagggcaggaacagcttctatgagaccagcagcttccacagaggagatgtgctggaggtgcccaggacccacctgacccactacggcatctacctgggggacaacagatag

SEQ ID NO: 113763 - DNA, 4928 bp, Artificial Sequence
  derived and/or modified sequence
taaaaagtcgcagcgaagcctgcacctccgagcaccgcgcgcggccctgcccccggcacggcccccaggtgcgctccttctccggctgcttgtagcactggtctcactgtccccgccgtcagccaccggttccttatccgtctcattccccattgtggcttggctgagccggtcgccaggcctcgctgtcctcctttgccttcctctctcctcagcggccgtactttgcgccgtacctcacctggcctgcaggatgaagaaccccatgctggaggtggtgtctttactactggagaagctgctcctcatctccaacttcacgctctttagttcgggcgccgcgggcgaagacaaagggaggaacagtttttatgaaaccagctctttccaccgaggcgacgtgctggaggtgccccggacccacctgacccactatggcatctacctaggagacaaccgtgttgcccacatgatgcccgacatcctgttggccctgacagacgacatggggcgcacgcagaaggtggtctccaacaagcgtctcatcctgggcgttattgtcaaagtggccagcatccgcgtggacacagtggaggacttcgcctacggagctaacatcctggtcaatcacctggacgagtccctccagaaaaaggcactgctcaacgaggaggtggcgcggagggctgaaaagctgctgggctttaccccctacagcctgctgtggaacaactgcgagcacttcgtgacctactgcagatatggcaccccgatcagtccccagtccgacaagttttgtgagactgtgaagataattattcgtgatcagagaagtgttcttgcttcagcagtcttgggattggcgtctatagtctgtacgggcttggtatcatacactacccttcctgcaatttttattccattcttcctatggatggctggctaacttcatacccccatgtcagtgtgtgtattctgtatgtaaatatgtttatatttatagagcatcaatcaatataagcattattgagaaaaatgtgacccgtaacactgtgttctggataaaaatgtgattaggaatcacgcaaagtgcttactgtgtaagcccaagaacaaaggctttctgaatcttctcaggcagttcagatttaaagcaccatccaaaccttggaaatacgacagggtgtggtagaattcagcaatatgagaaaaccagcccctaaaatgatagccacaagagattaattgtgtttttttttctcctgtaatccttgtactgttcggctgaatttgaagattggaagacttatattgagaccagtaactttactgtaaatttactttgtttcattgaaaaaacaaattgataaacatattaaactggaagaattttctttattcaaatgaaaacatgtttgatgactggtcaaaaaataagctcataatctatttttttcatgtagtatataagtcaagaatgttttattgtcattatgtgaaaccaatattggcaaatagtactttaatgatgaagtaaatgaccagaaattatagaaatctgtgttttcctgtaaaaatagcactatagtatcacttgaacaatttgatttggctttacttactaggaagcctggaattcattatttttttccttttatgtgccactgtggctactttaaatcactctgagaggtaaatggatataggattgaagttatgtgggtatttggcatgtgtgtgtgaaataaatatgtagatagtcacatatacacagactgagagataaattgttcttgattgctttattatcatcatactagtgtgttcattatagagtatctgtagaggtgaatgtaaaagtaagtccaatctattttcttatgtcattgaatttgtagtgttaacttgcatatatgttattggatgggttgtcttttaaagcatttactaatgtactctgaaatttttaaaagccttcagatttgttttctagtcacttttttccatatcatttctaattatagtttatatccttaaaagaaggatgccacagtagtatgtaaaacccaaacaagtagaacccaagcaaataaaattatttaaaataattttaaagtggcttagtactgccagtcatgtaaattgattctgctgagggtcttataagaattgagatataacaatggtaaaacaagcattcaagcacttttacaaaattaccaaattcttaaaatgaagccacagctagacttgcatttcaggtattaaaattgctttcttaactgtcaagaatcacaaaataacaaatcatattatgagtgaatatggggagggcggggccaatcagtcaatgataatctgaacaaattttaagagcagattttagattaataatgttttatcaccactaatttgcccacaacaaactcagtatttaatttttcaaattaaatattaaattatttaagtattttaaataattaaaacattaaatggcaacaccatagaatataggtgttctctggacctattctaaccacttaaaattatcttaagtatgcatacataaaagcaaccactatgagaactaccgtgttagtggtttttcacttactgtatattacccttgtaggaatagtttaaggaaattcatttcttaaaaatatagtgtcctcaaataattaatttttttgcaaactttagttattacaggcagcaaaaaccactgtctgaaactaaatctgtgttcaaagatgaagacccctcattaaaagccaaggacgttcttaagattggaactgacataattagtcttgacttacttcattaaagcaagattcaattccttgttcatttgagtgttcattatatgccaggcattgaccagttgcaattttatggtccagaattaatattattattcgtaaactagctataatagagtatatacagtgctgtgggaatacaggggaagaagcaattaaatctgctagaagggtaagagaaatctgtatgcaggaggcaatgctagcattaagccaagaaatagtgtgaggtgatcttatcacactgatgtgttcaactgtttatgggaaaaggaaactaggatggttttatttgtgaaatgttctacaacgctagaactgttgaacttcttgggagaaaaggagaatctttgttttgttgtgctgagtttgattagttgcttaaccaagtagaaagaaaagcacatcttcctgatcacagttataaaagaaaccctgaggccgggcgcggtggctcaagcctgtaaccccagcactttgggaggccaaggagggaggatcacaaggtcaggagatcgagaccatcctggctaacacggtgaaaccccatctctactaaaaatacaaaattagctgggcgtggtggccggcgcctgtagtcccagctactcatgaggttgaggcaggagaatggcgtgaaccgaggaggcggagcttgcagtgagtggaaattgcgccactgcactccagcctgggcaacaaagtgagactccatctcaaaaaaaaaaaaaaaaaaaaaaaaaaaaaaagaagaagaaaccctgagccattaatgtgtctcgtaacttgaggaagttcatgaattctctgggcttcatccattaagattcatccttatgctcctgcaagtttcttatatttatgtatttctattctgatttctgaaatgataacctagtagtgtctgatgaagttttttcatgcttattttattctttgtcacagatgaaagaagaataggactaattggggctaagatgaattaatgtaagtgtcagatactaggcaggtgttagggatgaaatgatgaatgaggcatggacctgttcctcagagtttatggcccagtagacataattgtattaggactttctgcagttgacatttgcataaagctgactgactgaaggaacagaaagtgagacagacagatatgaccaaatttatacaaaccatgtaccaacacttgaaagatgggtggatattttccaggaaacagattttgggcaggacattccatgcactggaaatagcatgaacaaatgcatgaaaattgcctacaacatgcctggcacatagctgtgaggtaccctatgagttgttgacttgaaaacatggaactgcacagggcattcaggcaagtgcaagtggttcaggggccagcgcagagcagagtgctgagtaaagatgtcagaaaaggaaagcaatggtctggtacaagtcttgtatagaacaagaagtttagacttttgaacaggcaatcgagatttggggttcagaaagataaatcccaaaagtatggagaacaaaggaactcattttaaaggactagctaagatgctcaatctctaaaaaaaaaaggatctgtattcgtgagagtagagagaaaggttgtttaggaagagtcaacagactttagcaaaatccttttatttgattcatgcataactcctgatggagtgtcaaggaagactcattcacttttctttcctgccagaaagttggttcttgcaaaatagattaacttgatgactatgtgtatattggatactcctaattttagctctgttagatatgtttctttctaaggacaagcaactatgtatagacttgttgtttgaattttttttcagtatatatatgtttcttgtttttctatttttctacttcatactgttaatgtcaaatatcaaaaatgttttccagcaatatcaagttatggcaatggcaaaagtccttgttgtagatgagaagcatataagaaatggttgccaatctttgttttgtatgatctatttagagttttaaccaacctagatctgtcagctaagctaattttatatttggtatacatgcatgtcaaataaagttaattttacatac

SEQ ID NO: 113764 - DNA, 546 bp, Artificial Sequence
  derived and/or modified sequence
tctgctcctcgggcggccttgagcagtgcctaacgttgagcgtgaggctcgtgctccgggtctcgcgggcggccgcctcgggcgtcgagtcccggagattggacagacaccagagcctggggaccgcggagtgaccgggtggggctggagggcggcgccgcgccttctggggagacgcggaggtatcaggacctgggctatgctcctgattttatacagactgccatggctccagatataaaagaccaaataaaaagataagaattgctggcaacatatgcactaaacttcgttttgaaaaatccccttgatgccgatcactgagaagtgatccacaggatgaagaaccccatgctggaggtggtgtctttactactggagaagctgctcctcatctccaacttcacgctctttagttcgggcgccgcgggcgaagacaaagggaggaacagtttttatgaaaccagctctttccaccgaggcgacgtgctggaggtgccccggacccacctgacccactatggcatctacctaggagacaaccgt

SEQ ID NO: 113765 - DNA, 2654 bp, Artificial Sequence
  derived and/or modified sequence
acagaatgtagccacctttcttaacggtccgggaaaccagaggtctctccagctactcagggatgaagaaccccatgctggaggtggtgtctttactactggagaagctgctcctcatctccaacttcacgctctttagttcgggcgccgcgggcgaagacaaagggaggaacagtttttatgaaaccagctctttccaccgaggcgacgtgctggaggtgccccggacccacctgacccactatggcatctacctaggagacaaccgtgttgcccacatgatgcccgacatcctgttggccctgacagacgacatggggcgcacgcagaaggtggtctccaacaagcgtctcatcctgggcgttattgtcaaagtggccagcatccgcgtggacacagtggaggacttcgcctacggagctaacatcctggtcaatcacctggacgagtccctccagaaaaaggcactgctcaacgaggaggtggcgcggagggctgaaaagctgctgggctttaccccctacagcctgctgtggaacaactgcgagcacttcgtgacctactgcagatatggcaccccgatcagtccccagtccgacaagttttgtgagactgtgaagataattattcgtgatcagagaagtgttcttgcttcagcagtcttgggattggcgtctatagtctgtacgggcttggtatcatacactacccttcctgcaatttttattccattcttcctatggatggctggctaacttcatacccccatgtcagtgtgtgtattctgtatgtaaatatgtttatatttatagagcatcaatcaatataagcattattgagaaaaatgtgacccgtaacactgtgttctggataaaaatgtgattaggaatcacgcaaagtgcttactgtgtaagcccaagaacaaaggctttctgaatcttctcaggcagttcagatttaaagcaccatccaaaccttggaaatacgacagggtgtggtagaattcagcaatatgagaaaaccagcccctaaaatgatagccacaagagattaattgtgtttttttttctcctgtaatccttgtactgttcggctgaatttgaagattggaagacttatattgagaccagtaactttactgtaaatttactttgtttcattgaaaaaacaaattgataaacatattaaactggaagaattttctttattcaaatgaaaacatgtttgatgactggtcaaaaaataagctcataatctatttttttcatgtagtatataagtcaagaatgttttattgtcattatgtgaaaccaatattggcaaatagtactttaatgatgaagtaaatgaccagaaattatagaaatctgtgttttcctgtaaaaatagcactatagtatcacttgaacaatttgatttggctttacttactaggaagcctggaattcattatttttttccttttatgtgccactgtggctactttaaatcactctgagaggtaaatggatataggattgaagttatgtgggtatttggcatgtgtgtgtgaaataaatatgtagatagtcacatatacacagactgagagataaattgttcttgattgctttattatcatcatactagtgtgttcattatagagtatctgtagaggtgaatgtaaaagtaagtccaatctattttcttatgtcattgaatttgtagtgttaacttgcatatatgttattggatgggttgtcttttaaagcatttactaatgtactctgaaatttttaaaagccttcagatttgttttctagtcacttttttccatatcatttctaattatagtttatatccttaaaagaaggatgccacagtagtatgtaaaacccaaacaagtagaacccaagcaaataaaattatttaaaataattttaaagtggcttagtactgccagtcatgtaaattgattctgctgagggtcttataagaattgagatataacaatggtaaaacaagcattcaagcacttttacaaaattaccaaattcttaaaatgaagccacagctagacttgcatttcaggtattaaaattgctttcttaactgtcaagaatcacaaaataacaaatcatattatgagtgaatatggggagggcggggccaatcagtcaatgataatctgaacaaattttaagagcagattttagattaataatgttttatcaccactaatttgcccacaacaaactcagtatttaatttttcaaattaaatattaaattatttaagtattttaaataattaaaacattaaatggcaacaccatagaatataggtgttctctggacctattctaaccacttaaaattatcttaagtatgcatacataaaagcaaccactatgagaactaccgtgttagtggtttttcacttactgtatattacccttgtaggaatagtttaaggaaattcatttcttaaaaatatagtgtcctcaaataattaatttttttgcaaactttagttattacaggcagcaaaaaccactgtctgaaactaaatctgtgttcaaagatgaagacccctcattaaaagccaaggacgttcttaagattggaactgacataattagtcttgacttacttcattaaagcaagattcaattc

SEQ ID NO: 113766 - DNA, 693 bp, Artificial Sequence
  derived and/or modified sequence
atgaagaaccccatgctggaggtggtgagcctgctgctggagaagctgcttctgatctccaacttcaccctgttctcaagcggggctgccggagaagacaaggggcggaattccttctacgagacgagctcattccatagaggagacgtgctggaggtcccaagaactcatctgacccactacgggatctaccttggagacaacagagtcgcccatatgatgccagatattttgctggctctgaccgatgatatgggtaggactcaaaaggtggtctcaaacaagcggctgattctgggtgtaattgtgaaggtcgccagtatccgggtcgacactgtggaagatttcgcatatggggccaatatcctggttaaccatctagatgagtcactgcagaagaaggcattactgaacgaggaagtagcccgccgtgctgaaaaactgctgggttttacaccatacagtttattatggaacaattgtgaacatttcgttacctattgccgatacggcacccccatttccccccaatctgataagttctgcgagactgtgaaaataatcattcgagaccagaggtctgtgctggcatcggctgtgctcgggctggcctcaatcgtgtgcacagggctcgtgtcctataccaccctacctgctatctttatccccttctttctctggatggccggctag

SEQ ID NO: 113767 - DNA, 210 bp, Artificial Sequence
  derived and/or modified sequence
atgaagaaccccatgctggaggtggtgagcctgctgctggagaagctccttttgatctccaattttacgctgttctcttctggtgcggcgggcgaggataaaggccggaattccttctacgaaactagttctttccacagaggcgacgtgctcgaggtaccccggacgcatttaacccattacggaatttacctgggagacaaccgctag

SEQ ID NO: 113768 - DNA, 693 bp, Artificial Sequence
  derived and/or modified sequence
atgaagaaccccatgctggaggtggtgagcctgctgctggagaagctcctgctgatctctaacttcacactattttcttcaggcgcagccggtgaggacaaggggcgtaattcattctacgagaccagttccttccacagaggggacgtcttggaggtccctcgtactcacctaacccactatggcatctacttgggcgacaatagagtggcacacatgatgccagatatcctgctcgcactgacggacgacatgggccgaactcagaaggtggtctccaacaaacggttaatactgggcgtcatagtcaaagttgcaagcatccgcgtggacacagtggaggacttcgcatatggagccaacatattggtgaaccatctggacgaatccttgcaaaaaaaggcgctgctcaacgaggaagtggcacgacgcgcggagaagctcctggggtttacaccttattctcttctgtggaacaactgtgaacactttgtcacgtactgtcggtatgggacccccatcagtcctcagagcgacaagttttgcgaaacagtcaaaattatcatcagggaccagcgctcagtgctcgcctccgctgtgctcggcctcgccagcatcgtgtgtaccggcctcgtttcctacaccacgttgcctgccatctttatccctttctttctgtggatggccgggtag

SEQ ID NO: 113769 - DNA, 693 bp, Artificial Sequence
  derived and/or modified sequence
atgaaaaaccctatgctcgaggtcgtctcgctgcttttggaaaagctacttctgatttctaactttacactgttcagcagtggtgccgcaggcgaggacaagggccgaaatagtttttacgaaacttcaagctttcacagaggcgatgttcttgaggtccctaggacccatctgactcactacggcatttatttaggagataatcgggtggctcacatgatgccggatattctcttagccttgactgatgacatgggaagaacgcagaaagtcgtgtctaataaacgcctgatcctcggagttattgtaaaagtggcctcaatccgcgttgataccgtcgaggatttcgcatacggggctaatatcctggtaaatcatctggacgaaagcttgcaaaagaaggctctgctgaatgaggaggtggcgaggcgcgctgagaagctgctgggttttactccatacagtctgctctggaataactgcgaacactttgtgacctactgtaggtatggcaccccaatctcaccccagagtgacaagttctgcgagaccgtcaaaattatcattcgcgatcaaaggagcgtcttagcatcagccgtcttagggttggcctctatcgtgtgcactggtctcgtgagctacacaactctgcctgccatatttataccattctttctgtggatggccggatag

SEQ ID NO: 113770 - DNA, 210 bp, Artificial Sequence
  derived and/or modified sequence
atgaaaaacccaatgctggaggttgtcagtctgctcttggagaagcttctgctgatttctaattttactctgttttcttctggcgcagccggtgaggataagggaagaaatagcttttacgagacttcctctttccatagaggggatgtgcttgaagtcccgcgtacgcatttgacccactatgggatttacctcggtgacaacagatag

SEQ ID NO: 113771 - DNA, 693 bp, Artificial Sequence
  derived and/or modified sequence
atgaagaaccccatgctcgaggtggtgagcctgctgctggagaagcttctactcattagtaatttcactctttttagctccggagccgcaggcgaagataagggccgtaattcgttctacgaaacatctagctttcacaggggggacgttctcgaagttccacggactcacctcacgcattacggtatttaccttggagacaaccgtgtcgcccacatgatgccagacattctactggcgctgactgacgacatggggaggacccagaaggttgtgtcgaacaaacgcctgatcttaggggtcatcgtgaaggttgcttccattagggtagacactgtggaggacttcgcctacggcgctaacatcttggtcaaccatctggacgaaagtctccagaagaaagcacttctgaatgaggaggtcgctagaagggccgaaaaacttttaggcttcacaccatacagcctcctatggaataactgtgagcattttgtaacatactgccgctacgggacccccatctctccacaaagcgacaaattctgtgagactgtcaaaatcatcattagggatcagcggagcgtgttggcgagcgccgttttgggtctggcttccatcgtgtgtactggactggtttcgtataccacattacctgccatttttatcccgttttttttgtggatggccggatag

SEQ ID NO: 113772 - DNA, 693 bp, Artificial Sequence
  derived and/or modified sequence
atgaagaaccccatgctggaggtggtgagcctgctgctggagaagctgctgctgatcagcaacttcaccctgttcagcagcggcgccgccggcgaggacaagggcagaaacagcttctacgagaccagcagcttccacagaggcgacgtgctggaggtgcccagaacccacctgacccactacggcatctacctgggcgacaacagagtggcccacatgatgcccgacatcctgctggccctgaccgacgacatgggcagaacccagaaggtggtgagcaacaagagactgatcctgggcgtgatcgtgaaggtggccagcatcagagtggacaccgtggaggacttcgcctacggcgccaacatcctggtgaaccacctggacgagagcctgcagaagaaggccctgctgaacgaggaggtggccagaagagccgagaagctgctgggcttcaccccctacagcctgctgtggaacaactgcgagcacttcgtgacctactgcagatacggcacccccatcagcccccagagcgacaagttctgcgagaccgtgaagatcatcatcagagaccagagaagcgtgctggccagcgccgtgctgggcctggccagcatcgtgtgcaccggcctggtgagctacaccaccctgcccgccatcttcatccccttcttcctgtggatggccggctag

SEQ ID NO: 113773 - DNA, 210 bp, Artificial Sequence
  derived and/or modified sequence
atgaagaaccccatgctggaggtggtgagcctgctgctggagaagctgctgctgatcagcaacttcaccctgttcagcagcggcgccgccggcgaggacaagggcagaaacagcttctacgagaccagcagcttccacagaggcgacgtgctggaggtgcccagaacccacctgacccactacggcatctacctgggcgacaacagatag

SEQ ID NO: 113774 - protein, 253 aa, Artificial Sequence
  derived and/or modified sequence
MTQGTEDLKGPGQRCENEPLLDPVGPEPLGPESQSGKGDMVEMATRFGSTLQLDLEKGKESLLEKRLVAEEEEDEEEVEEDGPSSCSEDDYSELLQEITDNLTKKEIQIEKIHLDTSSFVEELPGEKDLAHVVEIYDFEPALKTEDLLATFSEFQEKGFRIQWVDDTHALGIFPCLASAAEALTREFSVLKIRPLTQGTKQSKLKALQRPKLLRLVKERPQTNATVARRLVARALGLQHKKKERPAVRGPLPP

SEQ ID NO: 113775 - protein, 36 aa, Artificial Sequence
  derived and/or modified sequence
MTQGTEDLKGPGQRCENEPLLDPVGPEPLGPESQSG

SEQ ID NO: 113776 - protein, 96 aa, Artificial Sequence
  derived and/or modified sequence
MTQGTEDLKGPGQRCENEPLLDPVGPEPLGPESQSGKGDMVEMATRFGSTLQLDLEKGKESLLEKRLVAEEEEDEEEVEEDGPSSCSEDDYSELLQ

SEQ ID NO: 113777 - DNA, 762 bp, Artificial Sequence
  derived and/or modified sequence
atgacccagggcaccgaggacctgaagggccccggccagagatgcgagaacgagcccctgctggaccccgtgggccccgagcccctgggccccgagagccagagcggcaagggcgacatggtggagatggccaccagattcggcagcaccctgcagctggacctggagaagggcaaggagagcctgctggagaagagactggtggccgaggaggaggaggacgaggaggaggtggaggaggacggccccagcagctgcagcgaggacgactacagcgagctgctgcaggagatcaccgacaacctgaccaagaaggagatccagatcgagaagatccacctggacaccagcagcttcgtggaggagctgcccggcgagaaggacctggcccacgtggtggagatctacgacttcgagcccgccctgaagaccgaggacctgctggccaccttcagcgagttccaggagaagggcttcagaatccagtgggtggacgacacccacgccctgggcatcttcccctgcctggccagcgccgccgaggccctgaccagagagttcagcgtgctgaagatcagacccctgacccagggcaccaagcagagcaagctgaaggccctgcagagacccaagctgctgagactggtgaaggagagaccccagaccaacgccaccgtggccagaagactggtggccagagccctgggcctgcagcacaagaagaaggagagacccgccgtgagaggccccctgcccccctag

SEQ ID NO: 113778 - DNA, 111 bp, Artificial Sequence
  derived and/or modified sequence
atgacccagggcaccgaggacctgaagggccccggccagagatgcgagaacgagcccctgctggaccccgtgggccccgagcccctgggccccgagagccagagcggctag

SEQ ID NO: 113779 - DNA, 402 bp, Artificial Sequence
  derived and/or modified sequence
atgacccagggcaccgaggacctgaagggccccggccagagatgcgagaacgagcccctgctggaccccgtgggccccgagcccctgggccccgagagccagagcggcaagggcgacatggtggagatggccaccagattcggcagcaccctgcagctggacctggagaagggcaaggagagcctgctggagaagagactggtggccgaggaggaggaggacgaggaggaggtggaggaggacggccccagcagctgcagcgaggacgactacagcgagctgctgcaggagatcaccgacaacctgaccaagaaggagatccagatcgagaagatccacctggacaccagcagcttcgtggaggagctgcccggcgagaaggacctggcccacgtggtgtag

SEQ ID NO: 113780 - DNA, 291 bp, Artificial Sequence
  derived and/or modified sequence
atgacccagggcaccgaggacctgaagggccccggccagagatgcgagaacgagcccctgctggaccccgtgggccccgagcccctgggccccgagagccagagcggcaagggcgacatggtggagatggccaccagattcggcagcaccctgcagctggacctggagaagggcaaggagagcctgctggagaagagactggtggccgaggaggaggaggacgaggaggaggtggaggaggacggccccagcagctgcagcgaggacgactacagcgagctgctgcagtag

SEQ ID NO: 113781 - DNA, 762 bp, Artificial Sequence
  derived and/or modified sequence
atgacgcaaggaacggaggatttgaaggggcccgggcaacgttgcgagaacgagcccctcctggatcccgtaggacctgagcctctagggccagagagtcagagtggaaaaggtgacatggtagagatggcaaccaggtttggctccacactgcagttggacctcgagaaaggtaaagagagtctgcttgagaagcgcttggtggccgaagaagaggaagacgaagaggaagtggaggaagacggaccatcatcttgcagtgaggatgattattcggagttgttacaggagattacggataacctaacaaaaaaggaaattcagatagagaaaatacacttggatactagctccttcgttgaggagttgccgggcgaaaaagaccttgcccatgtagtcgagatttacgacttcgagcccgctctgaagacagaagatctcctggccactttctcagagtttcaagagaaaggctttcggatccagtgggtcgacgacacacatgctctgggcatttttccttgtcttgcatcagccgccgaggctttaacaagggaatttagtgtgttgaaaatcaggcctctaactcaaggtactaagcagtcgaaactaaaagcgctgcaaagacccaagctgcttcgtttagtgaaagagcgccctcagacaaatgccaccgtggctaggagactggtagctagagcactgggtctgcagcataagaaaaaagaaaggcccgcggtgaggggccccctcccaccttag

SEQ ID NO: 113782 - DNA, 762 bp, Artificial Sequence
  derived and/or modified sequence
atgacacaaggcacagaagacctgaagggacccggccagcgctgcgagaatgagcccttactcgaccctgtaggccctgagcccttaggtccagagtcacaatctggaaagggcgatatggtcgaaatggccactcgcttcggtagcactttacaactggacttggaaaaggggaaagagagcctgctcgaaaaacggctggttgccgaggaagaggaagatgaggaagaggttgaggaggatgggccatcttcctgtagcgaagatgactactcagagctccttcaggagatcaccgataatctcaccaagaaagagatacagattgagaaaatccacttggacacatcgtccttcgtggaagaattgcctggtgaaaaagatcttgcacacgtggtggagatctacgacttcgaacccgccctgaagactgaggatcttctggccacatttagcgagtttcaggagaagggatttagaatccagtgggttgacgatacccacgccctgggcatttttccctgcttggccagtgcagccgaggctctcacacgggagttttcagtgctgaaaatcagacctttgacacagggtaccaaacagtctaaattaaaagcactccagagacccaagctgttacgcctggtaaaggaacgtcctcagacaaacgcgacggtcgcaaggaggctcgtggcccgtgctctgggcctgcagcataaaaagaaagaaaggcccgccgtgagaggccctctccctccgtag

SEQ ID NO: 113783 - DNA, 111 bp, Artificial Sequence
  derived and/or modified sequence
atgacacagggtacggaggatctaaagggccctggccagcgatgcgaaaacgagcccctcctggaccccgttggcccagaacccctaggccctgaaagtcagtcaggctag

SEQ ID NO: 113784 - DNA, 402 bp, Artificial Sequence
  derived and/or modified sequence
atgactcagggtaccgaggatctgaagggccctggccagcggtgcgaaaacgaaccactcctcgatcccgtcgggcccgagccccttggccccgagagccagagcgggaagggagacatggtggagatggctacccggttcggtagcaccctgcagctggacctcgagaagggtaaggagagtctcttggagaaaaggctcgtagctgaggaggaagaggacgaagaggaggtggaggaagatgggccctcaagctgctctgaagatgattactcggaactgctgcaggagatcacagataatttgaccaaaaaggagattcagatcgaaaaaatccatcttgacacctcttccttcgtcgaggaactgcccggcgagaaagacctcgcccatgttgtgtag

SEQ ID NO: 113785 - DNA, 291 bp, Artificial Sequence
  derived and/or modified sequence
atgacacagggcacagaagacctgaagggtccgggtcaacggtgtgagaacgagcctctgttggatcctgtcggacccgagcctctcggccctgagagtcagtccggaaaaggtgacatggtcgagatggccactaggttcggtagcaccttgcagcttgatctcgaaaaagggaaggaaagtttgttagaaaagaggctggttgcagaggaggaagaggacgaggaggaggtcgaagaggacgggccttcaagctgctctgaggatgattactccgagttgcttcagtag

SEQ ID NO: 113786 - DNA, 762 bp, Artificial Sequence
  derived and/or modified sequence
atgacccagggcacagaggacctgaagggccctggccagagatgtgaaaatgagcccctgctggaccctgtgggccctgagcccctgggccctgagagccagagcgggaaaggagacatggtggagatggccaccaggtttggcagcaccctgcagctggacctggagaagggcaaggagagcctgctggagaagaggctggtggccgaggaggaggaggatgaggaggaggtggaggaggatggccccagcagctgcagtgaagatgactacagcgagctgctgcaggagatcacagacaacctgaccaagaaggagatccagatcgagaagatccacctggacaccagcagctttgtggaggagctgcccggggagaaggacctggcccacgtggtggagatctatgactttgagcccgccctgaagacagaggacctgctggccaccttcagcgagttccaggagaagggcttccgcatccagtgggtggatgacacccacgccctgggcatcttcccctgcctggccagcgctgctgaggccctgacccgggagttctctgtgctgaagatccggcccctgacccagggcaccaagcagagcaagctgaaggccctgcagaggcccaagctgctgcggctggtgaaggagcggccccagaccaatgccaccgtggcccggcggctggtggcccgggccctgggcctgcagcacaagaagaaggagaggcctgctgtgcggggccccctgcccccatag

SEQ ID NO: 113787 - DNA, 111 bp, Artificial Sequence
  derived and/or modified sequence
atgacccagggcacagaggacctgaagggccctggccagagatgtgaaaatgagcccctgctggaccctgtgggccctgagcccctgggccctgagagccagagcggctag

SEQ ID NO: 113788 - DNA, 402 bp, Artificial Sequence
  derived and/or modified sequence
atgacccagggcacagaggacctgaagggccctggccagagatgtgaaaatgagcccctgctggaccctgtgggccctgagcccctgggccctgagagccagagcgggaaaggagacatggtggagatggccaccaggtttggcagcaccctgcagctggacctggagaagggcaaggagagcctgctggagaagaggctggtggccgaggaggaggaggatgaggaggaggtggaggaggatggccccagcagctgcagtgaagatgactacagcgagctgctgcaggagatcacagacaacctgaccaagaaggagatccagatcgagaagatccacctggacaccagcagctttgtggaggagctgcccggggagaaggacctggcccacgtggtgtag

SEQ ID NO: 113789 - DNA, 291 bp, Artificial Sequence
  derived and/or modified sequence
atgacccagggcacagaggacctgaagggccctggccagagatgtgaaaatgagcccctgctggaccctgtgggccctgagcccctgggccctgagagccagagcgggaaaggagacatggtggagatggccaccaggtttggcagcaccctgcagctggacctggagaagggcaaggagagcctgctggagaagaggctggtggccgaggaggaggaggatgaggaggaggtggaggaggatggccccagcagctgcagtgaagatgactacagcgagctgctgcagtag

SEQ ID NO: 113790 - DNA, 762 bp, Artificial Sequence
  derived and/or modified sequence
atgacccagggcaccgaggacctgaagggccccggccagcggtgcgaaaacgagcccctgctggaccctgttggtcccgagccgttaggcccggagagtcagtctgggaaaggagacatggttgagatggctaccaggttcggcagtacacttcaactggacctggagaaaggcaaagaaagtctgctggagaaacgcttggtggcggaggaagaagaggatgaggaagaagtggaagaagatggtcccagctcatgttcggaggacgactattccgagctgctgcaagagattactgataacttgacaaagaaagaaatccagattgagaagatccacctcgacacttcatccttcgttgaagaactgccgggagaaaaggatctagcccatgttgtagagatttatgattttgagcctgccctgaagaccgaagatcttctggccactttctctgagttccaagaaaaaggattccgcattcagtgggttgatgacacccatgcccttggcatttttccttgtctggcaagtgcggccgaggccctgactagggagtttagtgtgcttaagatacgtccactaacacaggggacgaaacagagcaaactcaaagctctccagagaccgaaactgctcaggctggtcaaggagcggccccaaacaaacgccacagtggctagaagacttgtggcacgcgctttggggctccagcataaaaagaaagaaagaccagctgtccgcggtcccctgcccccatag

SEQ ID NO: 113791 - DNA, 762 bp, Artificial Sequence
  derived and/or modified sequence
atgacccagggcaccgaggacctgaagggccccggccagcggtgcgagaacgagccgctcctcgatccagtcggtcccgagcccctgggacctgaaagtcagtccgggaagggagacatggttgaaatggccacccggttcggaagtacattgcaactggatttggagaaaggtaaagagtcactactcgagaagagacttgtcgctgaagaggaagaggacgaggaagaggtggaggaggatggcccatctagttgttccgaagatgattactcagagcttctgcaggagattacggataatctgactaaaaaagaaattcaaattgagaagatccacctggacaccagcagctttgtcgaggagctccccggcgaaaaggacctggcacatgtcgttgaaatatatgacttcgagcccgcgctgaaaaccgaggacctgctcgctacattctccgagtttcaggaaaaaggctttagaatacaatgggttgacgatactcacgcactcggcatatttccttgcctcgcatccgcggctgaggcattaacgagagaattctcagtcctgaagatcagacctctgacgcagggcaccaagcagtcaaaactgaaggccctgcagcgccccaagctcctaagactagtaaaagagaggcctcagacaaatgcgacagtagccaggcgcctcgtggctagggccctgggcctgcagcataagaagaaagagaggcccgccgtccgcgggcccctgcccccctag

SEQ ID NO: 113792 - DNA, 111 bp, Artificial Sequence
  derived and/or modified sequence
atgacccagggcaccgaggacctgaagggccccggccagcggtgcgagaatgaacccctactggatccagtgggcccggaaccgttggggcccgaatcacagagcggatag

SEQ ID NO: 113793 - DNA, 402 bp, Artificial Sequence
  derived and/or modified sequence
atgacccagggcaccgaggacctgaagggccccggccagcggtgcgaaaacgagcctctgctcgatcctgttggccccgaaccacttgggcctgaatcccagtctgggaaaggagacatggtggagatggcaacaaggttcgggagtaccctgcaacttgacctagagaaaggaaaagagtctctgttggagaagcggctggtggccgaggaagaagaagacgaagaggaggtcgaagaggatggaccatcttcctgctctgaagacgactattctgagttgctccaagagatcaccgataacctgacaaagaaggaaatccagatcgagaagattcacctagacacatcctcctttgtcgaagaattacctggggaaaaggaccttgctcatgtcgtgtag

SEQ ID NO: 113794 - DNA, 291 bp, Artificial Sequence
  derived and/or modified sequence
atgacccagggcaccgaggacctgaagggccccggccagcggtgcgagaatgaacccctgctagatcccgttggacccgaaccactaggccctgaatctcagtcaggaaaaggcgacatggtcgagatggccacgcgctttggctcaaccttgcaattagacctcgaaaaaggaaaagaaagtttgctcgaaaagcggctggtcgcagaagaggaggaggacgaagaggaagtggaggaagacggcccaagtagttgctctgaggatgattattccgaactgctgcagtag

SEQ ID NO: 113795 - DNA, 762 bp, Artificial Sequence
  derived and/or modified sequence
atgacacagggcacagaagacttgaagggacctggccagagatgcgagaacgaacccttgcttgaccccgtagggccagagcctttgggtccagagtctcagagcggcaagggagatatggtcgagatggccacacggttcggatccaccctccagctggatttggagaaagggaaagagagcctgcttgaaaagcggttggtcgcagaggaggaggaggacgaggaggaggtcgaagaggacggaccttcgagctgctccgaggatgactattctgaactgctgcaagagatcactgacaacctcactaagaaagagattcagatagaaaaaatccacctagacactagctcgtttgtggaggaacttcctggcgagaaagacctggcgcacgtcgttgagatctatgatttcgaacccgctctgaagacggaagatctgctcgctaccttctccgagtttcaggagaaaggtttccgcatccagtgggtggatgatacccatgctttgggaatcttcccatgcctggcatccgccgcagaagcacttaccagggagttctcagttctgaaaattcggcctttgacgcagggcacaaagcagtccaaactgaaagcactgcagcggcctaaactgctccggctggtaaaggaaagaccccaaaccaacgcaacagtggctaggcggctggtggctagagctttaggattacagcacaagaaaaaggagagacctgctgtgcggggaccattaccaccttag

SEQ ID NO: 113796 - DNA, 762 bp, Artificial Sequence
  derived and/or modified sequence
atgacccaggggacagaagatctcaaagggcctggccagaggtgcgagaatgagcctctgctggacccagtgggcccagaacctctggggcctgagtcacaaagcggcaagggggacatggtcgagatggcaacaaggttcggcagcacgctgcagctggatttggagaaaggaaaagaaagcctgctcgaaaaaaggctggttgctgaagaggaggaggatgaagaggaggtggaggaagatgggccttcaagttgcagcgaggacgactatagcgaacttctgcaggaaataactgataaccttaccaagaaggaaatccagattgagaaaattcatctggacacatcatcctttgttgaagagctcccaggggaaaaggatctcgcacacgttgtcgagatttacgatttcgagcctgcactaaagaccgaggacctcctggccacgttttcagagttccaggagaaaggatttagaatccagtgggtggatgacacccatgcactgggcatttttccttgtttggccagcgctgcggaggctctgacacgcgagttctccgttctcaagatcagaccactcacacagggcaccaaacagagcaaactgaaggcactccaacgaccgaagctgctcagattagttaaggaacgcccacagaccaatgccaccgtggcaagaaggctggtcgcacgggcactgggcttgcagcataaaaagaaggaaaggcccgctgtacggggaccactgcccccttag

SEQ ID NO: 113797 - DNA, 111 bp, Artificial Sequence
  derived and/or modified sequence
atgacccagggcaccgaggatctgaaagggcctggacaaaggtgtgaaaacgaaccgcttttagacccagtcggaccagaaccgcttggacccgaatctcagagcggatag

SEQ ID NO: 113798 - DNA, 402 bp, Artificial Sequence
  derived and/or modified sequence
atgactcagggaactgaggacctgaaaggcccagggcaacggtgcgagaacgagccactgttggatcccgtggggcctgagccactgggcccagagagtcaaagcgggaagggggatatggtcgagatggccacacgattcggcagcacacttcaactggacctggagaaaggtaaggagagcctgttggaaaagcggctggttgcagaggaggaggaggacgaggaggaagtcgaagaggacggtccgtccagttgctctgaggatgactactctgaactgctccaagagatcactgataacctgactaaaaaagagattcagattgagaaaatccatttggatacttcaagttttgtggaggagctgcccggagagaaggatctggctcatgtggtttag

SEQ ID NO: 113799 - DNA, 291 bp, Artificial Sequence
  derived and/or modified sequence
atgacccaaggcaccgaagatctgaagggcccaggccaacggtgcgagaacgaaccactcttggatcccgttgggcctgagccactgggccctgagtcccagtccggcaagggggacatggtggaaatggcaacaaggttcgggtcaacactgcagctggatctcgaaaagggaaaagagagcctcctagaaaaaagattggtggctgaggaggaagaagacgaggaggaggtggaagaggacggcccaagttcatgctcggaagatgactatagcgaactgcttcagtag

SEQ ID NO: 113800 - DNA, 1489 bp, Artificial Sequence
  derived and/or modified sequence
tgtctgggtctcggttttgccatgaatatgaaagctagtcgtgtcactctaggagaagcggtttgtgttggtggcaggtgcgccccctcccaataggtgacaagaacacgcactctcccgttcctgcgttacctcccccaggccgcgcggtggcgctgcgtctctgcagcggcccgggtctctctagggcgctcgggcgcgctggcccctggggacgccgagggcggctgcgacgcgccgagaggccgcggctctcccacctgtcaccctggcccttctctgcttggatggtgtcttcctctcctcagccgagaatgacttcgtccaccggatccaggaggaactggaccgctttctgctgcagaagcagctgtcaaaggttcttcttttccccccactctccagtcgcctccggtacctgatccatagaacagcagagaattttgatctcttgagcagcttctccgttggggagggctggaagaggaggacggtcatctgtcaccaggacatcagggtacccagttcggatggcctctctggcccctgccgcgctcctgcctcctgccccagcaggcaggaagaatgggggctgacctctacctcggtgctcaagagagaggccccagctggcagggacccagaagagcctggagatgttggtgctggagaccccaactctgatcagggactccctgtgctgatgactcagggaacagaggacctaaagggcccaggacaaaggtgtgagaatgagccactgctggaccctgttggccctgagcctctggggcctgagagtcagtcagggaagggagacatggtggagatggccacacggtttgggtccaccctgcagctagacctggaaaaggggaaggagagtctgttggagaagaggctggtggcagaggaggaagaggacgaagaggaggtggaagaggatggccccagcagctgctcggaggacgattacagtgagctgctgcaggagatcacagacaacctgacgaagaaggagattcagatagagaagatccatttggacacatcctccttcgtggaggagctgcctggagagaaggaccttgcccacgtggtagagatctatgactttgaaccagcgctcaagacggaggacctgctggcaacgttttctgagttccaagagaaggggttcaggattcagtgggtggatgatactcacgcactcggcatctttccctgcctggcctcagctgcggaagccctgacccgggagttctcggtgctcaagatccggcccctcacacagggaaccaagcagtcaaagctcaaagccttgcagaggccaaaactcctgcgtctggtgaaggagaggccacagacaaatgcgactgtggcccggcggctggtggcccgggccctgggactccaacacaaaaagaaagagcggcctgctgtccggggtccgctgccgccctgaggcctggagacccaactggcctgg

SEQ ID NO: 113801 - protein, 97 aa, Artificial Sequence
  derived and/or modified sequence
MKGFIDDANYSVGLLDEGTNLGNVIDNYVYEHTLTGKNAFFVGDLGKIVKKHSQWQNVVAQIKPFYTVKCNSAPAVLEILAALGTGFACSSKNEMAL

SEQ ID NO: 113802 - DNA, 102 bp, Artificial Sequence
  derived and/or modified sequence
atgaagggctttatcgatgacgctaattatagcgtcggccttctcgacgaagggaccaacctgggaaatgtaattgacaactatgtgtatgaacatacatag

SEQ ID NO: 113803 - DNA, 294 bp, Artificial Sequence
  derived and/or modified sequence
atgaaaggctttattgacgatgctaactactctgtggggctcctggatgagggtactaatctgggcaacgttatcgacaactatgtttatgagcacacattaaccggcaagaatgcattcttcgtcggggacttgggcaaaattgtgaagaagcatagccaatggcagaacgtggtcgcgcagatcaaacccttttacacagtgaaatgcaacagtgctcctgctgtcctggagatactggccgcactggggacgggatttgcctgttcatcaaagaacgaaatggccttatag

SEQ ID NO: 113804 - DNA, 102 bp, Artificial Sequence
  derived and/or modified sequence
atgaagggcttcattgatgatgccaactacagcgtgggcctgctggatgagggcaccaacctgggcaatgtgattgacaactacgtgtatgagcacacctag

SEQ ID NO: 113805 - DNA, 294 bp, Artificial Sequence
  derived and/or modified sequence
atgaagggcttcattgatgatgccaactacagcgtgggcctgctggatgagggcaccaacctgggcaatgtgattgacaactacgtgtatgagcacaccctgaccgggaagaatgccttctttgtgggggacctgggcaagatcgtgaagaagcacagccagtggcagaatgtggtggcccagatcaagcccttctacacagtgaagtgcaacagcgccccagctgtgctggagatcctggccgccctgggcactggatttgcctgcagcagcaagaatgagatggccctgtag

SEQ ID NO: 113806 - DNA, 102 bp, Artificial Sequence
  derived and/or modified sequence
atgaagggcttcatcgacgacgccaactacagcgtgggcctgctggacgaaggtactaacctgggaaatgtgattgacaactacgtgtatgaacatacatag

SEQ ID NO: 113807 - DNA, 294 bp, Artificial Sequence
  derived and/or modified sequence
atgaagggcttcatcgacgacgccaactacagcgtgggcctgctggacgaggggacaaatctcggaaacgtgattgataattatgtctatgaacataccctgaccggcaagaatgcctttttcgtgggggaccttggcaagattgttaagaagcactctcagtggcagaacgtggtggcgcagataaagcctttctatactgtcaaatgtaattccgccccagccgtgctcgagatactggcggccttaggcactggattcgcttgttcctccaaaaatgagatggccttatag

SEQ ID NO: 113808 - DNA, 102 bp, Artificial Sequence
  derived and/or modified sequence
atgaagggattcattgacgatgccaactactctgtggggctactggacgaaggtacaaatctaggcaacgtgatcgacaattacgtgtatgagcacacctag

SEQ ID NO: 113809 - DNA, 294 bp, Artificial Sequence
  derived and/or modified sequence
atgaaggggttcatcgacgacgccaattattctgtgggcctgctggacgagggtacaaacctgggcaatgtgattgataactatgtctacgaacatacactaacagggaagaatgcattctttgttggcgacctggggaaaatcgttaagaaacactcacagtggcagaacgtggtggcacagatcaaaccgttctacaccgtgaaatgtaatagcgctcctgcggtgctggagatactagccgcacttggaacaggatttgcctgtagctccaagaacgagatggccttgtag

SEQ ID NO: 113810 - DNA, 773 bp, Artificial Sequence
  derived and/or modified sequence
cttttttcttctgccgtcgccttctctgcctcttctcatcctttctcgctctgctgctctgcagtgtgacgagtccgaatcctcttcccacccagcccgcgcctttcttcttttgcctgcgctgttctatttctccttcggccgccgccgccactgctgcacacagctggtgtcggtgccgcgcttttacccccaagtcgttcccgcagcctatggcccaggccgccttgggtatttctgctcaaggtaaccacatccctctttaaaaattccgccgaaaaagagaagacgctttacccgactctttgggccgttatctcacgagttctttcctcatcatccataaatgtcattcattgagcatgtgatcagcttctcctagatagatgaaacattttgcctccaccaggagtgccttgatcctggtgagatacactttagggcgaactttctgaccaagtatacaactacccagagggcctaggagaagtgctgtatagagagcagttcgacttcaacgctgagccaccttgggaacctagctgatgataggggggttccatctcccaacttgtccattttgttgcatattctaaggacccagacataggcttggtggcccgtctcttgtctttcctggtttatgactttcggctttgtggaatacggctgagatgaaaggatttattgatgatgcaaactactccgttggcctgttggatgaaggaacaaaccttggaaatgttattgataactatgtttatgaacatacc

SEQ ID NO: 113811 - DNA, 660 bp, Artificial Sequence
  derived and/or modified sequence
acacatggaggttcctggagagtggcgggcccagggagggcatggaggtttcacatccctccccctgtatcttgccctatgtgtctcttcatctgtatccttcgcaatatcctttataataaaccagtaaacacagggcgaactttctgaccaagtatacaactacccagagggcctaggagaagtgctgtatagagagcagttcgacttcaacgctgagccaccttgggaacctagctgatgataggggggttccatctcccaacttgtccattttgttgcatattctaaggacccagacataggcttggtggcccgtctcttgtctttcctggtttatgactttcggctttgtggaatacggctgagatgaaaggatttattgatgatgcaaactactccgttggcctgttggatgaaggaacaaaccttggaaatgttattgataactatgtttatgaacataccctgacagggaaaaatgcattttttgtgggagatcttggaaagattgtgaagaaacacagtcaatggcagaatgtagtggctcagataaagccattctacacagtgaagtgcaactctgctccagctgtacttgagattttggcagctcttggaaccggatttgcttgttccagtaaaaatgaaatggcttta

SEQ ID NO: 113812 - DNA, 102 bp, Artificial Sequence
  derived and/or modified sequence
atgaagggcttcatcgacgacgccaactacagcgtgggcctgctggacgagggcaccaacctgggcaacgtgatcgacaactacgtgtacgagcacacctag

SEQ ID NO: 113813 - DNA, 294 bp, Artificial Sequence
  derived and/or modified sequence
atgaagggcttcatcgacgacgccaactacagcgtgggcctgctggacgagggcaccaacctgggcaacgtgatcgacaactacgtgtacgagcacaccctgaccggcaagaacgccttcttcgtgggcgacctgggcaagatcgtgaagaagcacagccagtggcagaacgtggtggcccagatcaagcccttctacaccgtgaagtgcaacagcgcccccgccgtgctggagatcctggccgccctgggcaccggcttcgcctgcagcagcaagaacgagatggccctgtag

SEQ ID NO: 113814 - DNA, 900 bp, Artificial Sequence
  derived and/or modified sequence
atgggcggcccccgggccctgctggccgccctgtgggccctggaggccgctggaacagcggcactgagaatcggagcgttcaatatccaatccttcggcgattctaaagtgtcagaccccgcgtgtggatccatcatagccaagatcctggccgggtacgacctggccctagtgcaagaggttcgcgatcccgatctctccgccgtgtccgccctcatggaacagattaattccgtgtcagagcacgaatactcttttgtgagctcccaaccattaggcagagatcagtacaaggaaatgtatctctttgtgtatagaaaagacgcagtatccgtcgtcgacacatacctttatcctgaccccgaagatgtgttttcccgtgaacctttcgtggtgaaattttcagccccgggaacaggcgagcgtgctccccccctcccatcccggcgagcgctcaccccgccacctcttcccgccgccgcacagaacttggtactcattccactgcacgctgctccacaccaggcagtcgcggaaatcgatgccctttatgatgtttacttagatgtgatcgacaaatgggggaccgatgatatgctctttctcggtgactttaatgctgattgctcttacgtcagggctcaagattgggccgcgatccggctccggtccagtgaggttttcaaatggctcattcctgactccgccgacaccaccgtggggaattcagattgtgcctatgaccgtatcgtggcctgtggcgcccggctccggaggtctctgaaaccacaaagcgccaccgtacacgatttccaggaggaatttggtctggaccagacccaggctctggcgatctctgaccacttccccgtggaagtcaccttaaagttccataggtag

SEQ ID NO: 113815 - DNA, 900 bp, Artificial Sequence
  derived and/or modified sequence
atgggtgggccaagagctcttcttgccgcattgtgggcactggaggctgctggaaccgcggcactgcgcataggagctttcaacattcagagctttggagacagcaaggtgtcagatccagcatgtggctctatcatcgcaaagatcctggccggatacgacctcgcgctggtccaggaggtgcgcgacccagacttatctgctgtttcagctctgatggagcagatcaacagtgtgtctgaacatgagtattctttcgtttccagccagcctctaggtcgagaccagtacaaggagatgtatctgtttgtataccgcaaagatgcagtgagtgtggttgacacttatctctacccagatcctgaagacgtgttttctcgggagccttttgtggtgaagttctccgctccgggaacaggtgagcgggcaccaccacttccctccaggagggcattgacgccgcctccactgcctgcagctgctcagaatctggtattaatacccttacacgcagccccacaccaggctgtcgctgaaattgatgctctctatgacgtgtatctcgatgtgattgacaagtgggggacagatgatatgctgttccttggcgatttcaatgctgattgttcatatgttcgggcacaggactgggcggcaatcagactgagatcaagtgaggtctttaagtggctcattccagactctgctgacactactgtcggaaactccgattgcgcatacgatcgcatcgttgcttgcggagctaggctcagacggtccctgaaaccacagagtgccactgtgcacgatttccaggaagagttcgggctggatcagacgcaggcacttgccatctcagaccatttcccggttgaggtgaccctgaaatttcacaggtag

SEQ ID NO: 113816 - DNA, 837 bp, Artificial Sequence
  derived and/or modified sequence
atggggggaccaagggccctgttggccgctctctgggccctggaggccgcagggacagccgctcttcggataggagcatttaacatacaatccttcggtgactctaaagtatccgacccagcttgcggaagtatcattgccaagatcctagcgggatacgatttggctctagtgcaagaagttcgggatcccgatttgtccgccgtttcagctctcatggaacagatcaattcagttagtgaacatgagtactcattcgtgtccagtcaacctcttgggagagaccagtacaaagagatgtatctgtttgtctaccgcaaggatgcagtgagtgttgtggatacctatctatacccggatccagaggacgtgttcagcagagagccctttgtggtgaaattttctgccccaggcacagcccaaaatttagtgctcatccccctgcacgctgcaccacaccaagccgttgcagaaatcgacgcattgtacgacgtgtatctggatgtgattgataagtggggtactgacgacatgctattcctgggcgacttcaatgccgattgtagttacgtcagagctcaggactgggcagccatccgactgcgctctagtgaagtttttaagtggctcattccagactcagcggacaccacggtcggaaacagtgattgtgcttatgacaggatcgttgcctgtggagcccgtcttagaaggtccctgaagccccaaagtgcaaccgtccatgatttccaggaagagttcggcttggaccagacccaggccttggccattagcgatcacttccccgttgaggtgactctgaagttccaccgctag

SEQ ID NO: 113817 - DNA, 900 bp, Artificial Sequence
  derived and/or modified sequence
atgggcggtccccgagcccttttagcagccttgtgggccctggaggctgccggaaccgccgctcttcggatcggggcattcaacatccagtccttcggagactccaaagtttcagaccccgcatgcgggtcaataatagccaagattctggcaggctacgatctggctctggtccaggaggttagggatcccgacctgtctgccgtcagtgccttgatggaacagatcaactcggtgagcgaacatgagtacagcttcgtctctagccagcccctgggacgagatcagtataaggagatgtacctgtttgtttatcgcaaggacgcggtgagcgtggttgatacttacctctaccccgaccccgaggacgtgttcagtcgcgaacccttcgtggtaaagttcagcgcccctggaacaggcgaacgggcacctccgctccccagccgacgcgctcttaccccccctcctcttcccgcagccgcacagaatctcgtgctgatccctctgcacgccgctcctcatcaggcagtggccgagattgatgcgctctacgatgtgtacctcgatgtgattgataaatggggcacagatgatatgctcttcctgggcgattttaatgcggattgttcctacgttagagcccaggactgggccgctatcaggctgaggtcttctgaggtcttcaagtggctgattcctgattctgcagacacaaccgttggaaacagtgattgcgcatatgacagaatcgtcgcctgcggcgctcggctcaggcgttctctgaaaccacagtccgccaccgtgcacgactttcaggaggaattcggcttagaccagactcaggcattggccatctcagatcactttcctgtggaagtcaccctgaagtttcatagatag

SEQ ID NO: 113818 - DNA, 900 bp, Artificial Sequence
  derived and/or modified sequence
atgggtggaccaagggctctgttagccgcactgtgggctttggaagccgctggcacagccgccctgaggatcggcgcattcaatatccagtctttcggggactctaaggttagtgatccagcatgtggatccattatcgctaagatactcgccggctatgatctcgccctcgtgcaggaggtgcgcgatcctgacctctccgccgtttccgccctgatggaacagatcaatagcgtgagtgagcacgaatatagttttgtcagttcacaacccttaggccgggatcagtacaaggagatgtacctgtttgtttataggaaagatgctgtctccgtcgtggacacatacctttaccccgacccagaagacgtcttttcgcgggagccatttgtggttaagttctctgcccccggcacgggtgaacgagccccccctcttcctagccgtcgggcccttacaccacctcctttacccgccgccgctcagaatctggtgttgatccctctgcacgcggccccacaccaagcagtagccgagattgacgcactttacgacgtgtatcttgatgtgatcgacaagtgggggactgatgatatgttatttttaggcgatttcaatgctgactgctcatatgttagggctcaagactgggccgccatccgactccggtcttccgaggtgttcaaatggctaatccccgattcggcggacaccacagtgggcaacagtgactgtgcttacgacagaattgtagcttgcggggcccgcctcagacgcagccttaagccccagagcgcaactgtgcacgatttccaagaagagtttggacttgatcagactcaagccctggcaatttccgatcactttcccgtggaggtcactttgaagtttcacagatag

SEQ ID NO: 113819 - DNA, 837 bp, Artificial Sequence
  derived and/or modified sequence
atgggtggaccaagggcgttgctcgctgccctttgggctttagaggccgctgggaccgctgccctgcggatcggagcttttaacatccagtcctttggcgattcaaaagtctccgatcccgcctgcggctccatcatcgcgaaaattttagctggatacgacttagccctggtgcaggaagtacgtgaccccgacctgagtgccgtgagcgccctgatggagcagattaactctgtttccgagcatgaatatagcttcgtcagttcccaacctctgggacgggatcaatataaggaaatgtatttgtttgtgtacagaaaagacgccgttagcgtggttgatacgtatctgtatcctgaccccgaggatgtgttttccagggaacctttcgtcgttaaattttctgccccaggcactgcacagaacctggtgctgattcccctccatgccgcaccccatcaggccgttgccgaaattgatgcactgtatgacgtatatctcgacgtgatcgacaaatggggcaccgatgacatgctgttccttggcgactttaacgccgactgttcctatgtaagagcccaggattgggcggctattaggctgaggagtagtgaggtcttcaaatggttgatcccagattcagcagatacaacagtcggcaatagcgactgtgcctatgacaggatagtggcatgcggagctcgactccgccgctccctcaagcctcaatcagcaacagttcacgatttccaggaggaatttggtctggatcaaactcaagcactcgcaatctctgaccactttcccgtagaggtaaccttaaagttccaccgctag

SEQ ID NO: 113820 - DNA, 900 bp, Artificial Sequence
  derived and/or modified sequence
atgggaggtccacgagcactgctggcagccctgtgggccctggaggcggccgggactgccgccctccgcattggagcttttaatatccaatcattcggcgactcaaaagtttcagaccctgcctgcggttccattatagcgaaaatcctggctggttacgaccttgcgcttgtacaggaagtacgtgatcctgatctgtctgctgtatcggcgctgatggagcagatcaattccgtgagtgaacacgagtacagcttcgtttcatcccagcccctcgggcgagaccagtataaagaaatgtatctgttcgtctacaggaaggacgctgtgagcgtggtggacacctacctgtacccggaccccgaggacgtcttctctagagaaccattcgtcgtgaagtttagcgccccaggaacaggagagagagcacctcccctgccctcccgacgggccctcacacccccaccattgcccgcggccgcacagaacctcgtgctgattccacttcatgctgccccccaccaagcggtcgcagagatcgacgcactgtatgatgtatatttagatgtcattgataaatgggggactgatgatatgttgttcctgggcgatttcaacgctgattgttcttacgtcagagcccaggattgggctgccatcagactgagatctagtgaagtttttaagtggctcatacctgactcggccgacacgaccgtgggaaactcagattgtgcctacgaccgcatcgttgcctgcggagctcgactacggcgaagtctgaaaccccagagcgcaacagtacatgatttccaagaggaattcgggctagaccaaacccaggccctggctatcagcgatcattttcccgtcgaggtcacactgaaattccatcgatag

SEQ ID NO: 113821 - DNA, 900 bp, Artificial Sequence
  derived and/or modified sequence
atgggaggcccacgagctctgctggcagctctttgggctctggaggcagcgggcacggcagccctcaggataggcgccttcaacattcagtccttcggggacagcaaagttagcgaccctgcgtgtggcagcatcatcgcaaagatcttggcaggatatgatctagctctagtgcaggaagtgagagaccctgacctcagcgctgtttccgcccttatggaacaaattaattcagttagtgaacatgagtactcgttcgtcagcagccagcctttaggacgtgatcaatataaggagatgtatttatttgtgtacaggaaagacgccgtcagtgtggttgatacgtacctgtaccccgatcccgaagatgtattttcccgagagccattcgtggtaaagttttcagcccctggaactggagagagagctccacctctgccgtcacgtcgcgccctaacacccccaccccttcctgccgctgctcagaaccttgtgcttatacctctgcacgccgcgccacaccaggcggtagccgaaatcgacgcactgtatgacgtgtacttagatgtaatagacaaatggggaaccgatgatatgctctttctcggagactttaatgccgattgctcttacgtgcgtgctcaagattgggctgccatacgtctgcgaagttcggaagtgtttaagtggctgatccctgatagcgcggacactacagttgggaactctgattgcgcctatgatagaattgtggcctgcggagcaaggctgagacggagcctgaagcctcagtccgccacagtccacgacttccaagaggagttcggcctcgatcaaacccaggccctggcaatctctgaccacttccccgtagaagtgaccctgaaatttcacagatag

SEQ ID NO: 113822 - DNA, 837 bp, Artificial Sequence
  derived and/or modified sequence
atgggaggacctcgcgctctcttggcagcattgtgggcactggaggccgctgggactgctgctctaagaatcggtgccttcaatattcagtctttcggggattccaaggtgtctgaccccgcatgcggctcaattatcgccaagatcttggccgggtacgatttggcgctcgttcaggaagtacgcgatccagacctgtccgccgttagcgccctgatggagcaaattaatagtgtgtcagagcatgaatattcgttcgtatcctctcaaccactcgggagggatcaatataaggaaatgtacttgttcgtgtacaggaaggatgctgtgtctgttgtggacacctacctgtatccagatccagaagacgtgttcagcagagagcccttcgttgtgaaatttagcgcacccggcactgcccaaaatctagtactgataccactacatgcagctccacatcaggctgtggcagaaatagacgcactttatgatgtatatttggatgttattgacaaatgggggacggatgacatgctttttctcggggacttcaatgccgactgtagttatgtccgggcacaggattgggcagcaatcagactgagatcgtcagaagttttcaagtggttaattcccgatagtgcggataccacggttggcaattcagactgtgcatacgatcggattgtggcttgcggcgctaggctcagaagatccttaaaaccacaatctgcgactgttcacgacttccaggaagagttcgggctggaccagacgcaagcactagctattagcgaccactttcctgttgaggtgacactcaagtttcataggtag

SEQ ID NO: 113823 - DNA, 900 bp, Artificial Sequence
  derived and/or modified sequence
atgggcggaccacgagctctactggctgccctgtgggctttggaagccgcaggcacagcagctctcagaatcggcgcatttaatattcagtccttcggcgatagcaaagtgagcgatcctgcttgtgggagcatcatcgcaaaaatcctcgccggatatgatctcgcactcgtccaggaagtgcgggaccccgatttatcagcagtttctgctctgatggagcaaatcaacagtgttagcgagcatgagtactccttcgtaagcagtcagcctcttggtcgagatcagtataaagagatgtacctgtttgtgtatcgaaaggacgcggtatctgttgttgatacttacttgtaccctgacccagaagatgttttctctcgagagccatttgtggttaagtttagtgcaccaggcacaggagaacgggccccaccactgccgtctagaagggccctgactccccccccacttcctgccgctgcccaaaacctcgttttgattcccctgcatgccgcccctcaccaggccgtcgccgagattgacgccctgtacgatgtgtacctcgatgtcattgacaaatgggggactgatgatatgctgtttttaggcgacttcaacgcagactgctcctacgtgcgcgctcaagattgggcagcgatcagactacgcagctccgaagtgtttaaatggctgattcccgactcagctgacactacagtgggaaattcagattgcgcctacgaccgtattgtggcatgcggggctaggttgagaaggagtctcaaaccacagagtgcaacagtgcatgattttcaggaagagttcggtctggatcagacccaagcgcttgccatctctgaccactttccagttgaagtcacactcaaatttcataggtag

SEQ ID NO: 113824 - DNA, 900 bp, Artificial Sequence
  derived and/or modified sequence
atgggcggccccagagccctgctggccgccctgtgggccctggaggccgccggcaccgccgccctgagaatcggcgccttcaacatccagagcttcggcgacagcaaggtgagcgaccccgcctgcggcagcatcatcgccaagatcctggccggctacgacctggccctggtgcaggaggtgagagaccccgacctgagcgccgtgagcgccctgatggagcagatcaacagcgtgagcgagcacgagtacagcttcgtgagcagccagcccctgggcagagaccagtacaaggagatgtacctgttcgtgtacagaaaggacgccgtgagcgtggtggacacctacctgtaccccgaccccgaggacgtgttcagcagagagcccttcgtggtgaagttcagcgcccccggcaccggcgagagagccccccccctgcccagcagaagagccctgacccccccccccctgcccgccgccgcccagaacctggtgctgatccccctgcacgccgccccccaccaggccgtggccgagatcgacgccctgtacgacgtgtacctggacgtgatcgacaagtggggcaccgacgacatgctgttcctgggcgacttcaacgccgactgcagctacgtgagagcccaggactgggccgccatcagactgagaagcagcgaggtgttcaagtggctgatccccgacagcgccgacaccaccgtgggcaacagcgactgcgcctacgacagaatcgtggcctgcggcgccagactgagaagaagcctgaagccccagagcgccaccgtgcacgacttccaggaggagttcggcctggaccagacccaggccctggccatcagcgaccacttccccgtggaggtgaccctgaagttccacagatag

SEQ ID NO: 113825 - DNA, 837 bp, Artificial Sequence
  derived and/or modified sequence
atgggcggccccagagccctgctggccgccctgtgggccctggaggccgccggcaccgccgccctgagaatcggcgccttcaacatccagagcttcggcgacagcaaggtgagcgaccccgcctgcggcagcatcatcgccaagatcctggccggctacgacctggccctggtgcaggaggtgagagaccccgacctgagcgccgtgagcgccctgatggagcagatcaacagcgtgagcgagcacgagtacagcttcgtgagcagccagcccctgggcagagaccagtacaaggagatgtacctgttcgtgtacagaaaggacgccgtgagcgtggtggacacctacctgtaccccgaccccgaggacgtgttcagcagagagcccttcgtggtgaagttcagcgcccccggcaccgcccagaacctggtgctgatccccctgcacgccgccccccaccaggccgtggccgagatcgacgccctgtacgacgtgtacctggacgtgatcgacaagtggggcaccgacgacatgctgttcctgggcgacttcaacgccgactgcagctacgtgagagcccaggactgggccgccatcagactgagaagcagcgaggtgttcaagtggctgatccccgacagcgccgacaccaccgtgggcaacagcgactgcgcctacgacagaatcgtggcctgcggcgccagactgagaagaagcctgaagccccagagcgccaccgtgcacgacttccaggaggagttcggcctggaccagacccaggccctggccatcagcgaccacttccccgtggaggtgaccctgaagttccacagatag

SEQ ID NO: 113826 - DNA, 900 bp, Artificial Sequence
  derived and/or modified sequence
atgggcgggccccgggctctgctggccgccttatgggctttagaagccgctggcaccgccgccctgcggatcggagctttcaatattcagtctttcggggattcaaaggtgagcgacccggcgtgtggttcgataattgctaaaatcctggccggttacgatctcgcactggtacaagaggtgcgagatcccgacttgtctgccgtatcagccctgatggagcagattaattcggtgagtgagcatgaatactcattcgtcagctctcagccgttagggcgggatcaatacaaggagatgtacctcttcgtgtatcggaaggatgctgtgtctgtggtggatacctacctgtatccagacccagaggacgtcttctcacgagagcccttcgtagtcaaattctctgctccgggaaccggagaaagggcaccccccttgcctagcaggcgcgccttaactccaccccccctcccagcggcagcccagaacctggtcctgattccactccatgccgctcctcaccaggctgttgccgagatcgatgccctctacgatgtttacctcgatgtgattgataagtggggtaccgacgacatgctatttctaggagacttcaatgctgactgcagctacgtccgggctcaggactgggccgctatcaggttaagaagcagcgaggtgttcaagtggttgattcctgacagcgccgatactactgttggcaattcagattgcgcctacgaccggatcgtcgcctgcggcgcgagattaaggcggtctctgaagccacaaagcgctacagtacacgattttcaagaagagttcggcttggaccagacacaggccctggcaatttctgaccattttccagttgaggtgacattgaaattccacaggtag

SEQ ID NO: 113827 - DNA, 837 bp, Artificial Sequence
  derived and/or modified sequence
atgggtggacccagagccctattggcggccttgtgggctctggaagctgccggcacagctgccctgcgcatcggagctttcaacatccagtcttttggcgatagcaaagtcagcgacccagcgtgtggcagcattattgccaaaatacttgctggctacgacctggctctggttcaggaggtgcgagacccggatctcagcgcagtctccgccctgatggagcagatcaattcagttagtgagcacgagtattcgttcgtgtcctcccaacccctgggccgggaccagtacaaagagatgtacctcttcgtatatagaaaagatgctgtgtcagtcgtggacacatacctgtacccagaccccgaagacgttttttcccgggagccctttgtggtgaagttctccgctcccggcaccgctcaaaacctggtactgattccactgcatgccgctcctcaccaagctgttgccgaaattgatgcactgtatgacgtttacttggacgtgattgacaagtggggcaccgatgacatgcttttcctaggcgattttaacgcagactgttcctacgtgagagcccaggactgggcagctattcgtctgagaagcagcgaggtgtttaagtggctgataccagattcagcggatacaacagttggtaattcagattgcgcctatgacagaattgtagcatgcggggccagactgcgaaggtccctgaagccccagtccgccaccgtgcacgactttcaggaagaatttggtctggaccagacccaagccctcgccatttccgatcacttccccgtggaggtgaccctgaaatttcatcgatag

SEQ ID NO: 113828 - DNA, 900 bp, Artificial Sequence
  derived and/or modified sequence
atgggcggaccccgggcgctgctggccgcactatgggccctggaggcagcaggtacggctgccctccggataggggcatttaatattcaaagcttcggcgacagcaaagtgagtgaccccgcgtgtggttccataattgcaaaaatcctcgcggggtacgatctggccttggtgcaagaggtgcgggaccccgatttatcagcagtgtctgccctcatggaacaaatcaactccgtttctgaacatgaatattctttcgtcagctcacaacccctaggccgggatcaatacaaggagatgtatctgtttgtgtaccggaaagacgctgtgagcgtggttgatacctacctctaccccgatcccgaggatgtattctcccgcgaaccgttcgtggttaaattcagtgcacctggaacgggcgaaagagcgccaccattgccatccagacgggcgttgaccccgccccccctgcccgcagcggcgcagaatctagtgcttattccattacatgcggccccgcaccaggcagtggccgaaattgatgccttgtatgacgtttacctcgatgtaattgataagtggggcacagacgatatgcttttccttggtgactttaacgctgactgtagttatgttcgtgcgcaggattgggctgccattcgcctgaggtccagcgaagttttcaaatggctcatccctgactcagcagacacaacagtgggtaactctgactgcgcatacgatcgcatagtcgcctgcggagctaggctgcgccggtcactgaagccacagtccgccactgtgcacgatttccaagaagagtttggactggatcagactcaggcactagccatttctgatcactttcctgtggaggtgaccctcaaattccacagatag

SEQ ID NO: 113829 - DNA, 900 bp, Artificial Sequence
  derived and/or modified sequence
atgggcggcccccgggccctgctggccgccctgtgggccctggaggccgccggcacagctgccctgcgcatcggggccttcaacatccagagctttggagacagcaaggtgtctgaccctgcctgtggcagcatcatcgccaagatcctggccggctatgacctggccctggtgcaggaggtgcgggaccctgacctgtctgctgtgtctgccctgatggagcagatcaacagcgtgtctgagcacgagtacagctttgtgagcagccagcccctgggccgggaccagtacaaggagatgtacctgtttgtgtacaggaaggatgctgtgtctgtggtggacacctacctgtacccagaccctgaagatgtgttcagccgggagccctttgtggtgaagttcagcgcccctggcactggagagcgggccccacccctgcccagcagaagagccctgaccccaccacccctgcctgctgctgcccagaacctggtgctgatccccctgcatgctgccccccaccaggccgtggccgagattgatgccctgtatgatgtgtacctggatgtgattgacaagtggggcacagatgacatgctgttcctgggggacttcaatgctgactgcagctatgtgcgggcccaggactgggccgccatccggctgcggagcagcgaggtgttcaagtggctgatcccagattctgctgacaccaccgtgggcaacagcgactgtgcctatgaccgcatcgtggcctgtggggcccggctgcggcgcagcctgaagccccagagcgccaccgtgcatgacttccaggaggagtttggcctggaccagacccaggccctggccatcagtgaccacttccctgtggaggtgaccctgaagttccacaggtag

SEQ ID NO: 113830 - DNA, 837 bp, Artificial Sequence
  derived and/or modified sequence
atgggcggcccccgggccctgctggccgccctgtgggccctggaggccgccggcacagctgccctgcgcatcggggccttcaacatccagagctttggagacagcaaggtgtctgaccctgcctgtggcagcatcatcgccaagatcctggccggctatgacctggccctggtgcaggaggtgcgggaccctgacctgtctgctgtgtctgccctgatggagcagatcaacagcgtgtctgagcacgagtacagctttgtgagcagccagcccctgggccgggaccagtacaaggagatgtacctgtttgtgtacaggaaggatgctgtgtctgtggtggacacctacctgtacccagaccctgaagatgtgttcagccgggagccctttgtggtgaagttcagcgcccctggaacagcccagaacctggtgctgatccccctgcacgccgccccccaccaggccgtggccgagattgatgccctgtatgatgtgtacctggatgtgattgacaagtggggcacagatgacatgctgttcctgggggacttcaatgctgactgcagctatgtgcgggcccaggactgggccgccatccggctgcggagcagcgaggtgttcaagtggctgatcccagacagcgctgacaccaccgtgggcaacagcgactgtgcctatgacagaattgtggcctgtggggcccggctgcggcgcagcctgaagccccagagcgccaccgtgcatgacttccaggaggagtttggcctggaccagacccaggccctggccatcagtgaccacttccctgtggaggtgaccctgaagttccacaggtag

SEQ ID NO: 113831 - DNA, 900 bp, Artificial Sequence
  derived and/or modified sequence
atgggcggcccccgggccctgctggccgccctgtgggccctggaggcggctgggacagctgcactgaggataggggccttcaacatccagagtttcggggattcaaaggtcagcgatcctgcctgcgggtccatcatcgcgaaaatccttgccggctatgacctcgcactcgtgcaggaggtccgcgatccagatctttctgctgtatctgcccttatggagcagatcaattctgtgtctgaacacgagtactcattcgttagtagccagcctttgggacgggaccagtataaggagatgtacctgttcgtctaccggaaggatgcggtgtcagtggtcgacacatatctctatccagacccggaagacgtgttctcccgggaaccatttgttgtgaaattttcggctcccggaaccggggagcgcgcccccccacttccctcccgacgggctctcactccacctcccctccctgcagctgcccagaacctcgtgcttattccactgcacgcagcaccacatcaggcggtcgcggaaattgacgcactgtacgacgtgtatctggacgttatcgataagtgggggaccgacgatatgctgtttttgggcgatttcaacgctgattgctcctatgtgcgcgcacaggactgggctgccatccggctgcgatcctcagaggtgtttaagtggcttatccctgatagcgctgatacgactgttggaaacagcgactgtgcctacgaccgtatcgtggcatgcggagcccgtcttagacgcagcctcaaaccccagtctgcgaccgttcacgattttcaggaggagtttggactggaccagacacaggcattggcaatctcagaccacttcccagtcgaggttactctgaaatttcaccgctag

SEQ ID NO: 113832 - DNA, 837 bp, Artificial Sequence
  derived and/or modified sequence
atgggcggcccccgggccctgctggccgccctgtgggccctggaggccgctggcacagcagccctgcgcatcggcgccttcaatattcaatctttcggcgatagcaaggtcagtgatcctgcctgcggatccattatcgccaagattctcgccgggtacgacctggcactggttcaggaggttagagaccccgacctttcagctgtttcagccctaatggagcagatcaactccgtgtctgaacacgagtactctttcgtgagttctcagccactgggaagagatcagtacaaggaaatgtacctgttcgtgtacagaaaggatgccgtgtcagttgttgatacgtatctttatcctgaccccgaggacgtgttctctagagagccgttcgtggtcaaattctcagcgcctggaacagcacaaaacctcgtgctcatccctctacacgcggctccacaccaggccgtagccgagatagacgcactctatgacgtgtatctggatgtaatcgacaaatgggggactgatgacatgctgtttcttggcgactttaacgcagattgctcctacgtccgagcacaggactgggcggctattcgtctgagaagcagcgaggtcttcaaatggctgatccccgacagcgctgataccacagtgggcaattctgactgtgcctatgataggatcgtcgcctgtggcgcaagactccggagatctctgaagccacaatccgccactgtgcacgattttcaggaggaattcgggttggaccagacgcaagctctcgctatatccgatcatttccccgtcgaggtgacattgaaatttcaccgctag

SEQ ID NO: 113833 - RNA, 900 nt, Artificial Sequence
  derived and/or modified sequence
auggguggaccaagggcucuguuagccgcacugugggcuuuggaagccgcuggcacagccgcccugaggaucggcgcauucaauauccagucuuucggggacucuaagguuagugauccagcauguggauccauuaucgcuaagauacucgccggcuaugaucucgcccucgugcaggaggugcgcgauccugaccucuccgccguuuccgcccugauggaacagaucaauagcgugagugagcacgaauauaguuuugucaguucacaacccuuaggccgggaucaguacaaggagauguaccuguuuguuuauaggaaagaugcugucuccgucguggacacauaccuuuaccccgacccagaagacgucuuuucgcgggagccauuugugguuaaguucucugcccccggcacgggugaacgagcccccccucuuccuagccgucgggcccuuacaccaccuccuuuacccgccgccgcucagaaucugguguugaucccucugcacgcggccccacaccaagcaguagccgagauugacgcacuuuacgacguguaucuugaugugaucgacaagugggggacugaugauauguuauuuuuaggcgauuucaaugcugacugcucauauguuagggcucaagacugggccgccauccgacuccggucuuccgagguguucaaauggcuaauccccgauucggcggacaccacagugggcaacagugacugugcuuacgacagaauuguagcuugcggggcccgccucagacgcagccuuaagccccagagcgcaacugugcacgauuuccaagaagaguuuggacuugaucagacucaagcccuggcaauuuccgaucacuuucccguggaggucacuuugaaguuucacagauag

SEQ ID NO: 113834 - RNA, 837 nt, Artificial Sequence
  derived and/or modified sequence
auggguggaccaagggcguugcucgcugcccuuugggcuuuagaggccgcugggaccgcugcccugcggaucggagcuuuuaacauccaguccuuuggcgauucaaaagucuccgaucccgccugcggcuccaucaucgcgaaaauuuuagcuggauacgacuuagcccuggugcaggaaguacgugaccccgaccugagugccgugagcgcccugauggagcagauuaacucuguuuccgagcaugaauauagcuucgucaguucccaaccucugggacgggaucaauauaaggaaauguauuuguuuguguacagaaaagacgccguuagcgugguugauacguaucuguauccugaccccgaggauguguuuuccagggaaccuuucgucguuaaauuuucugccccaggcacugcacagaaccuggugcugauuccccuccaugccgcaccccaucaggccguugccgaaauugaugcacuguaugacguauaucucgacgugaucgacaaauggggcaccgaugacaugcuguuccuuggcgacuuuaacgccgacuguuccuauguaagagcccaggauugggcggcuauuaggcugaggaguagugaggucuucaaaugguugaucccagauucagcagauacaacagucggcaauagcgacugugccuaugacaggauaguggcaugcggagcucgacuccgccgcucccucaagccucaaucagcaacaguucacgauuuccaggaggaauuuggucuggaucaaacucaagcacucgcaaucucugaccacuuucccguagagguaaccuuaaaguuccaccgcuag

SEQ ID NO: 113835 - RNA, 900 nt, Artificial Sequence
  derived and/or modified sequence
augggagguccacgagcacugcuggcagcccugugggcccuggaggcggccgggacugccgcccuccgcauuggagcuuuuaauauccaaucauucggcgacucaaaaguuucagacccugccugcgguuccauuauagcgaaaauccuggcugguuacgaccuugcgcuuguacaggaaguacgugauccugaucugucugcuguaucggcgcugauggagcagaucaauuccgugagugaacacgaguacagcuucguuucaucccagccccucgggcgagaccaguauaaagaaauguaucuguucgucuacaggaaggacgcugugagcgugguggacaccuaccuguacccggaccccgaggacgucuucucuagagaaccauucgucgugaaguuuagcgccccaggaacaggagagagagcaccuccccugcccucccgacgggcccucacacccccaccauugcccgcggccgcacagaaccucgugcugauuccacuucaugcugccccccaccaagcggucgcagagaucgacgcacuguaugauguauauuuagaugucauugauaaaugggggacugaugauauguuguuccugggcgauuucaacgcugauuguucuuacgucagagcccaggauugggcugccaucagacugagaucuagugaaguuuuuaaguggcucauaccugacucggccgacacgaccgugggaaacucagauugugccuacgaccgcaucguugccugcggagcucgacuacggcgaagucugaaaccccagagcgcaacaguacaugauuuccaagaggaauucgggcuagaccaaacccaggcccuggcuaucagcgaucauuuucccgucgaggucacacugaaauuccaucgauag

SEQ ID NO: 113836 - RNA, 900 nt, Artificial Sequence
  derived and/or modified sequence
augggaggcccacgagcucugcuggcagcucuuugggcucuggaggcagcgggcacggcagcccucaggauaggcgccuucaacauucaguccuucggggacagcaaaguuagcgacccugcguguggcagcaucaucgcaaagaucuuggcaggauaugaucuagcucuagugcaggaagugagagacccugaccucagcgcuguuuccgcccuuauggaacaaauuaauucaguuagugaacaugaguacucguucgucagcagccagccuuuaggacgugaucaauauaaggagauguauuuauuuguguacaggaaagacgccgucagugugguugauacguaccuguaccccgaucccgaagauguauuuucccgagagccauucgugguaaaguuuucagccccuggaacuggagagagagcuccaccucugccgucacgucgcgcccuaacacccccaccccuuccugccgcugcucagaaccuugugcuuauaccucugcacgccgcgccacaccaggcgguagccgaaaucgacgcacuguaugacguguacuuagauguaauagacaaauggggaaccgaugauaugcucuuucucggagacuuuaaugccgauugcucuuacgugcgugcucaagauugggcugccauacgucugcgaaguucggaaguguuuaaguggcugaucccugauagcgcggacacuacaguugggaacucugauugcgccuaugauagaauuguggccugcggagcaaggcugagacggagccugaagccucaguccgccacaguccacgacuuccaagaggaguucggccucgaucaaacccaggcccuggcaaucucugaccacuuccccguagaagugacccugaaauuucacagauag

SEQ ID NO: 113837 - RNA, 837 nt, Artificial Sequence
  derived and/or modified sequence
augggaggaccucgcgcucucuuggcagcauugugggcacuggaggccgcugggacugcugcucuaagaaucggugccuucaauauucagucuuucggggauuccaaggugucugaccccgcaugcggcucaauuaucgccaagaucuuggccggguacgauuuggcgcucguucaggaaguacgcgauccagaccuguccgccguuagcgcccugauggagcaaauuaauagugugucagagcaugaauauucguucguauccucucaaccacucgggagggaucaauauaaggaaauguacuuguucguguacaggaaggaugcugugucuguuguggacaccuaccuguauccagauccagaagacguguucagcagagagcccuucguugugaaauuuagcgcacccggcacugcccaaaaucuaguacugauaccacuacaugcagcuccacaucaggcuguggcagaaauagacgcacuuuaugauguauauuuggauguuauugacaaaugggggacggaugacaugcuuuuucucggggacuucaaugccgacuguaguuauguccgggcacaggauugggcagcaaucagacugagaucgucagaaguuuucaagugguuaauucccgauagugcggauaccacgguuggcaauucagacugugcauacgaucggauuguggcuugcggcgcuaggcucagaagauccuuaaaaccacaaucugcgacuguucacgacuuccaggaagaguucgggcuggaccagacgcaagcacuagcuauuagcgaccacuuuccuguugaggugacacucaaguuucauagguag

SEQ ID NO: 113838 - RNA, 900 nt, Artificial Sequence
  derived and/or modified sequence
augggcggaccacgagcucuacuggcugcccugugggcuuuggaagccgcaggcacagcagcucucagaaucggcgcauuuaauauucaguccuucggcgauagcaaagugagcgauccugcuugugggagcaucaucgcaaaaauccucgccggauaugaucucgcacucguccaggaagugcgggaccccgauuuaucagcaguuucugcucugauggagcaaaucaacaguguuagcgagcaugaguacuccuucguaagcagucagccucuuggucgagaucaguauaaagagauguaccuguuuguguaucgaaaggacgcgguaucuguuguugauacuuacuuguacccugacccagaagauguuuucucucgagagccauuugugguuaaguuuagugcaccaggcacaggagaacgggccccaccacugccgucuagaagggcccugacuccccccccacuuccugccgcugcccaaaaccucguuuugauuccccugcaugccgccccucaccaggccgucgccgagauugacgcccuguacgauguguaccucgaugucauugacaaaugggggacugaugauaugcuguuuuuaggcgacuucaacgcagacugcuccuacgugcgcgcucaagauugggcagcgaucagacuacgcagcuccgaaguguuuaaauggcugauucccgacucagcugacacuacagugggaaauucagauugcgccuacgaccguauuguggcaugcggggcuagguugagaaggagucucaaaccacagagugcaacagugcaugauuuucaggaagaguucggucuggaucagacccaagcgcuugccaucucugaccacuuuccaguugaagucacacucaaauuucauagguag

SEQ ID NO: 113839 - DNA, 795 bp, Artificial Sequence
  derived and/or modified sequence
atgaacgtgttcgtgaccctgcagatcctggtggacttcgtgaagaagcagctgaagaccgtgttcgagagactgagactggagcagcagagaatcgagaacgacctgagcgactggagcatcaagatcctggaccacagcctggaggagaagaccaaccccctgagcgagctgcccatcgagctggagagcctggagtgcccctaccccgacctgaagagcagcatcctgagcgagttctacaagttcacccagaagtaccagaagaagctgcaggacttcaacctgcagctggaggacatctacagaaactgccagctgagcgaggaggaccactggatctaccaggccatcctggaccagtaccccggcgacctgttcggcagaagaaccctgtacctggacatgctgcagagatacttcccccacaagagcagacacgacctggtggagcacgagaagtactgcgaccagtacagattcgccatcgagcagcagaacatcctgatcagcaactggaacaagaacaagaaggacttcatccagaaggccgtgctgaccctgaccgaggcctgcgccacccacgagatggagagcatgctggccaaggacaagaagaagcagcaggagctgtgcgccgacctgaaggccaaggtgagacagtggagagcccaccaggaggaggtggccagactggagatggagatcagcgccagaagaagagagaaggaggaggagaaggagaagctgtggaagaagaaggagctgctgcagagagccgagaagaagaagtag

SEQ ID NO: 113840 - DNA, 2694 bp, Artificial Sequence
  derived and/or modified sequence
atagagaccgatgctgttcagcgcgagagggcctggagagggtgggtgtgagagagaaggtgtctcaggtctcgggcgcgggagggggtggcggagaggacagggagattccccagcgctggctctgaaatctggggcaggctttccttgccttactgccaatcccaactgtgcctggtagggtttgtccctggcgtcaaaggtaggaacagctgagcccttagatgtacccctgacggcgagagcccaggagtgggcgtttcacttttcctgcgtttggggagtccctgaggctatgccctttgacctttgacatgtgtgcagcttctgcttctccagataatctggtattccatatgaaaaatgagatgagaaacatcaagtacaaaccagtagactatcaacaattgcgtgcattaactgaagcaaagaaattggcttctgcctctgcaaagctaaagatcagaaaagcaatgttgacttcaaagttatccaaagaacaaacactaataaaacaacacaagcaagtgtggtggcaggaataccagaggctgaatgaagtcagatgtaaaatggaatctgaaataaaatcccttctcaatgaagagaacattggaaatgaatgtctttgtgaccttacaaattttggttgactttgtgaagaaacaattgaaaactgtctttgaaagacttaggctggagcaacagagaatagaaaatgatctttcagactggagtataaagattctagatcattctttggaagaaaagactaacccgcttagtgaactgcccattgaattagaaagtttggaatgcccataccctgatttgaaatcttcaattctcagtgagttctataagtttacacagaaatatcagaagaagcttcaagactttaatctgcagttggaagacatatacagaaactgtcaactaagtgaagaagaccactggatttaccaggctattttggatcagtaccctggagatctctttggaagaaggactctgtatctggacatgttacaaagatattttcctcacaaatctaggcatgatttggttgaacacgagaaatattgtgaccaatatcgctttgctatagagcagcaaaatatcctgatatcaaattggaataaaaataagaaagactttatacagaaggctgtgctgacactcactgaggcttgtgcaacacatgaaatggagagcatgttggctaaggacaagaaaaagcaacaggaattgtgtgctgatctgaaagccaaggttcgtcaatggcgagcccaccaagaagaggtagcaagactggaaatggaaatttctgccagaagaagagaaaaggaagaggagaaagagaaactgtggaagaagaaggaattgttgcaaagagcagagaagaaaaaaaaaataaaaaaatactgggccaagaaaaaacagaagtggcaagaaatggaaatgagagatcttcagcgtctagaagaactgaagaaattaatcgctgaacagtcactaaaagacagagaaagggttaaatatagacaagaattattggaaaggcgtttgatggagaaaaaggaagtggcccttcaagaagctcatgaagacaaagagagagcacggcggctagaagcccttaggaaacaggttgctgttgttgctcaatttgatcctgttagaatgatgtcagatacaatggcatcaaaagctagaatgggcattgaaattgaagaagaatttattcttcaaaagccactcttcacattgaatacatacaatgaacagcagataatttctgaccctagacttcgcttcgagttagcacttcgagaagctggacttcatagaacactttatgctaaagagatattaccaaaaattagtcctcaaaaacctccaagaaaggacatggagtctactgtatttaaaatatagagctcatcctcaaattctatatgtaaagagcatttttctttgaaaacatgtatatggataataataattactactttctaaaatgtttgaaatatcagacatagaaatcatagcatctattaaaacaactttgcctttcttttgtgattcttagaattttatgcactatatttcctgtatctttaagttatatttaatagtactaaattcccccaaattatggaacttaattatggcacatatagtacttatactataatttagtaaactacatgttggaggttatgttatcctataaaaagagctcaaaataactttgtgagaattataaattatgtagctgctacctgctaatgttcatttctgcttgttatttcagaatttgactttttaattatggaagcttcattatcattaatacttctattatttcttgattattataagaggagactcaacctttctctaaatttagaaaccaatttggtacaccatgtttactgcaaaccaatcatccaaacaatttcattttgcaaattagcccttaagaataaattagaaattagaaatagcatttcaagcatgggaatatctgttttggtttggaaatatatatatttgtgtgattgtttagaagaaatatttaaaatttcataatatttggaatgctgtcaaaaattccaaattatctattaaatatttagatgattttatagaaaaggagcatttaaaataaaactcaaacataaatatttg

SEQ ID NO: 113841 - DNA, 795 bp, Artificial Sequence
  derived and/or modified sequence
atgaacgtctttgtcactctccagattcttgtggactttgttaaaaagcaattgaaaaccgtctttgagcggttacgcctggaacagcagcggatcgagaacgacctttctgattggtctatcaagatcctggatcactccctggaggagaagacgaatcctctctccgaacttcccatcgagctagagtctctagaatgtccttatcctgatcttaagagttccatactaagtgaattctacaaattcacccagaagtatcagaaaaagctgcaggactttaaccttcaactggaagacatctacagaaattgtcagctcagcgaagaggaccactggatctatcaagccatcctggatcaatatccaggagacttatttggacggcgtacactgtacctggacatgctacaacgctattttccccataaatcgcgccatgatctggtggagcacgaaaagtattgcgaccagtataggttcgcaatagagcagcagaatatcctgatttcaaactggaataagaataaaaaagacttcattcaaaaggccgtactcacacttaccgaggcatgtgcaacccacgagatggaatccatgctggccaaagacaagaagaagcagcaagagctgtgtgcagacctgaaagccaaagtccgacagtggcgggcccatcaggaagaagtggcccggttggagatggagatcagcgcgcggcgaagggagaaagaagaggaaaaggaaaaattgtggaagaagaaggagctgctccagcgcgcggagaagaagaaatag

SEQ ID NO: 113842 - DNA, 795 bp, Artificial Sequence
  derived and/or modified sequence
atgaatgtgtttgtgaccctgcagatcctggtggactttgtgaagaagcagctgaagacagtgtttgagcggctgcggctggagcagcagagaattgaaaatgacctgagtgactggagcatcaagatcctggaccacagcctggaggagaagaccaaccccctgtctgagctgcccatcgagctggagagcctggagtgcccctacccagacctgaagagcagcatcctgtctgagttctacaagttcacccagaagtaccagaagaagctgcaggacttcaacctgcagctggaggacatctacagaaactgccagctgtctgaggaggaccactggatctaccaggccatcctggaccagtacccaggggacctgtttggaagaaggaccctgtacctggacatgctgcagcgctacttcccccacaagagcagacatgacctggtggagcacgagaagtactgtgaccagtacagatttgccatcgagcagcagaacatcctgatcagcaactggaacaagaacaagaaggacttcatccagaaggctgtgctgaccctgacagaggcctgtgccacccatgagatggagagcatgctggccaaggacaagaagaagcagcaggagctgtgtgccgacctgaaggccaaggtgcggcagtggagggcccaccaggaggaggtggcccggctggagatggagatcagcgcccggcggcgggagaaggaggaggagaaggagaagctgtggaagaagaaggagctgctgcagagagctgagaagaagaagtag

SEQ ID NO: 113843 - DNA, 795 bp, Artificial Sequence
  derived and/or modified sequence
atgaacgtgttcgtgaccctgcagatcctggtggacttcgtgaagaaacagctcaagaccgtgtttgagagacttaggttggaacagcagcgtatcgaaaatgatctgtccgactggtccattaagatcctcgaccatagtttggaggaaaagactaatcccctgtccgaacttccaattgaattggaatctctcgaatgtccctacccggaccttaagtccagtatactatccgaattctataaatttacccaaaaatatcaaaagaagctgcaggattttaacctgcaattggaagacatttaccgcaattgtcaactgagcgaagaagaccattggatttatcaggcaatcctggatcagtatcccggggacctgttcgggagaaggacactctatctggatatgctccaaagatacttccctcacaaaagtaggcatgacttggtcgagcacgagaagtattgtgaccagtaccggttcgcaatagagcagcaaaacattctaatctcaaactggaataagaacaagaaggatttcatccagaaggctgtgctgacattgactgaggcatgtgccacacacgaaatggagtccatgctggcaaaggataaaaagaagcagcaggagctctgcgccgatctcaaggctaaggtgcgtcagtggagagcccatcaggaggaagtggccaggctggaaatggaaatctccgcgcgtcgccgtgagaaagaagaggaaaaagagaaactgtggaagaaaaaggaactcctccaacgagctgaaaagaaaaaatag

SEQ ID NO: 113844 - DNA, 795 bp, Artificial Sequence
  derived and/or modified sequence
atgaatgtgtttgtgactttacaaatcctggtcgactttgttaagaagcaactcaagactgtatttgagcgattgaggctggaacaacagcgcatagagaacgatctgtctgactggtctataaagatcctggaccactcgttggaggagaagaccaacccactgtccgaactccctattgagctcgagtcactagagtgcccttatccagatttgaaatctagcattctgtctgagttctataagtttacccagaaatatcagaagaaactccaggatttcaacctgcagttggaggacatctaccgcaattgtcagctgtctgaggaggaccactggatctatcaggctatccttgatcagtaccccggagatctgttcgggaggcggaccctgtacctggacatgctgcagcgatattttccccacaagtcacggcacgacctggtcgagcacgagaagtactgcgaccaatatagatttgctatagaacaacagaatattctgatcagtaactggaacaagaataagaaggactttatccaaaaggcagtgctcactttaacagaggcctgcgcaacccacgagatggagtccatgctggccaaagacaagaaaaaacagcaagagttatgcgcagaccttaaggctaaagtgaggcagtggagggctcaccaggaggaagtggcaaggctggagatggaaatttcagccagacgcagggagaaggaagaagagaaggaaaagctgtggaaaaaaaaagagctgctacagagggccgaaaagaagaagtag

SEQ ID NO: 113845 - protein, 20 aa, Artificial Sequence
  derived and/or modified sequence
TLRGDERILSILRHQNLLKE

SEQ ID NO: 113846 - protein, 24 aa, Artificial Sequence
  derived and/or modified sequence
RILSILRHQNLLKELQDLALQGAK

SEQ ID NO: 113847 - protein, 306 aa, Artificial Sequence
  derived and/or modified sequence
MRSAAVLALLLCAGQVTALPVNSPMNKGDTEVMKCIVEVISDTLSKPSPMPVSQECFETLRGDERILSILRHQNLLKELQDLALQGAKERAHQQKKHSGFEDELSEVLENQSSQAELKGRSEALAVDGAGKPGAEEAQDPEGKGEQEHSQQKEEEEEMAVVPQGLFRGGKSGELEQEEERLSKEWEDSKRWSKMDQLAKELTAEKRLEGQEEEEDNRDSSMKLSFRARAYGFRGPGPQLRRGWRPSSREDSLEAGLPLQVRGYPEEKKEEEGSANRRPEDQELESLSAIEAELEKVAHQLQALRRG

SEQ ID NO: 113848 - DNA, 921 bp, Artificial Sequence
  derived and/or modified sequence
atgcgatcagccgccgtcttggccctcctcctttgtgcagggcaagtgactgctctccccgtgaacagtcctatgaacaaaggagacaccgaggtaatgaagtgtattgtcgaagtgattagtgataccctatcaaagccctctccaatgccagtgtcccaggaatgcttcgaaactctccgaggtgacgagagaatcctgtccatcctgcgacatcaaaatctgctcaaggagctgcaagacctggctctccagggcgcaaaggaacgcgcacaccagcagaaaaagcactcaggcttcgaggacgaactgagtgaagttcttgaaaaccaaagctcccaagccgagttgaaaggtagaagtgaggcactggctgtggatggcgctggcaaacctggagccgaagaggcccaagatcccgagggcaaaggcgaacaggagcattctcaacagaaggaggaggaagaggaaatggctgtggtcccacagggactgtttcggggtgggaaatccggtgaactggagcaggaagaggagcgtcttagtaaggagtgggaggactctaaacggtggtctaagatggatcagctggcaaaggagttgaccgcagagaaacggctcgagggccaggaagaggaagaggacaatcgcgattctagcatgaagttgagtttccgagcccgggcatacggatttcgcggcccaggcccacagctcaggcgcggttggcggcctagcagccgcgaggactcattggaggctggcctccccctgcaggtacgcgggtatcccgaagagaaaaaagaggaggaaggctcagccaataggcgaccggaggatcaggagctcgagtctctatccgcaatcgaggcagaactggagaaagttgcacaccagttacaagctcttcggaggggctag

SEQ ID NO: 113849 - DNA, 921 bp, Artificial Sequence
  derived and/or modified sequence
atgaggtctgctgctgtgctggccctgctgctgtgtgccggccaggtgacagccctgcctgtgaacagccccatgaacaagggggacacagaggtgatgaagtgcatcgtggaggtgatcagtgacaccctgagcaagcccagccccatgcctgtgtcccaggagtgctttgagaccctgcggggagatgagcgcatcctgagcatcctgcggcaccagaacctgctgaaggagctgcaggacctggccctgcagggcgccaaggagcgggcccaccagcagaagaagcacagcggctttgaagatgagctgtctgaggtgctggagaaccagagcagccaggccgagctgaagggccgctctgaggccctggccgtggatggagctgggaagccaggagctgaggaggcccaggaccctgagggcaaaggagagcaggagcacagccagcagaaggaggaggaggaggagatggctgtggtgccccagggcctcttccggggcggcaagtctggagagctggagcaggaggaggagcggctgagcaaggagtgggaggacagcaagcgctggagcaagatggaccagctggccaaggagctgacagctgagaagaggctggagggccaggaggaggaggaggacaacagagacagctccatgaagctgtccttccgggcccgggcctacggcttccggggccctggcccccagctgcggcggggctggaggcccagcagccgggaggacagcctggaggccggcctgcccctgcaggtgcggggctacccagaggagaagaaggaggaggagggcagcgccaacagaagacctgaggaccaggagctggagagcctgagcgccattgaagctgagctggagaaggtggcccaccagctgcaggccctgcggcggggctag

SEQ ID NO: 113850 - DNA, 921 bp, Artificial Sequence
  derived and/or modified sequence
atgcggagcgccgccgtgctggccctgctgctgtgcgccggccaggtcactgcccttcccgtgaatagcccaatgaacaagggagacacagaggtgatgaaatgtatcgttgaagtcatatccgacacactgtcaaagccatctccgatgcccgtgagccaggaatgcttcgaaactttgcggggcgatgagcgtatactcagcatcctaaggcatcagaacctgctgaaggaacttcaggatttggcactgcagggggctaaggaaagggcccatcagcaaaagaagcactctgggttcgaggatgaactgagcgaggtgctggaaaatcagtcttcgcaggcggaactcaagggaaggagcgaagccctcgccgtggatggggccggcaagccaggcgccgaggaggctcaagaccccgagggaaagggcgagcaagaacacagccagcagaaggaggaagaggaggagatggccgtggtccctcaaggattgttcaggggcggcaagagtggggagcttgagcaagaggaggagcgtctcagcaaggagtgggaagactccaagcgctggtctaagatggatcagcttgccaaggagcttacagcagagaagagactcgaaggccaagaagaggaggaagacaatagggattctagcatgaagttatcgtttagagcccgtgcttatggatttcgcggcccgggaccccagttgaggaggggctggcggccttctagccgagaggatagccttgaagcgggactgcccttgcaggtaaggggatatccagaggagaagaaggaggaagagggaagcgccaaccggagacctgaggaccaggagctcgaatcactgtcagcaattgaggccgagcttgaaaaggtcgcccatcaactccaagccctgagacgggggtag

SEQ ID NO: 113851 - DNA, 921 bp, Artificial Sequence
  derived and/or modified sequence
atgagatctgccgcagtgcttgccctgcttctctgtgccggacaggtgaccgctcttccagtgaatagcccaatgaacaagggggataccgaagtcatgaaatgcatagtggaagtgatctcggataccctaagtaagccatcccccatgcccgtgagccaggagtgcttcgagactctgagaggcgatgaacggattctgagtatcctgaggcaccagaacctacttaaagagcttcaggacctagccctgcagggagccaaggaacgtgcccatcagcagaaaaaacatagcggcttcgaggacgagctctcagaggtactcgaaaaccagtccagtcaggctgaactgaaaggccgttcagaagctttggccgtagacggtgcaggcaagcccggagctgaggaagcccaggaccccgagggaaaaggcgaacaggagcactcccagcaaaaggaggaggaagaggagatggctgtggtcccacagggcttgtttcggggaggcaagagtggagagctggagcaagaagaagagaggctctctaaggagtgggaggatagcaaacgctggagcaaaatggatcaactcgcaaaggaacttacagcagagaagcggctggaaggccaagaagaagaagaggataaccgcgactctagtatgaaattatcgtttcgagcacgcgcttatgggtttcgcggacccggacctcagctgagaaggggatggcggcctagctccagggaagacagcctggaggccggtctccctctgcaggtgcggggttatccagaggaaaaaaaggaggaagaggggtctgcaaaccggaggccagaggaccaggagctggaatcactcagcgcaattgaggccgagctcgagaaggtcgcacaccaactacaggcgttgagacgaggctag

SEQ ID NO: 113852 - DNA, 1474 bp, Artificial Sequence
  derived and/or modified sequence
cgagccccgtgcaggggagcttgcgggaggatcgaccgacagacggacgcacgccgaggcactgcgcccccagccccgcgccggtgccaccgcagcccgaccccggccgccagtccagccgcccctcgcccggtgcctaggtgcccggccccacaccgccagctgctcggcgcccgggtccgccatgcgctccgccgctgtcctggctcttctgctctgcgccgggcaagtcactgcgctccctgtgaacagccctatgaataaaggggataccgaggtgatgaaatgcatcgttgaggtcatctccgacacactttccaagcccagccccatgcctgtcagccaggaatgttttgagacactccgaggagatgaacggatcctttccattctgagacatcagaatttactgaaggagctccaagacctcgctctccaaggcgccaaggagagggcacatcagcagaagaaacacagcggttttgaagatgaactctcagaggttcttgagaaccagagcagccaggccgagctgaaaggtcggtcggaggctctggctgtggatggagctgggaagcctggggctgaggaggctcaggaccccgaagggaagggagaacaggagcactcccagcagaaagaggaggaggaggagatggcagtggtcccgcaaggcctcttccggggtgggaagagcggagagctggagcaggaggaggagcggctctccaaggagtgggaggactccaaacgctggagcaagatggaccagctggccaaggagctgacggctgagaagcggctggaggggcaggaggaggaggaggacaaccgggacagttccatgaagctctccttccgggcccgggcctacggcttcaggggccctgggccgcagctgcgacgaggctggaggccatcctcccgggaggacagccttgaggcgggcctgcccctccaggtccgaggctaccccgaggagaagaaagaggaggagggcagcgcaaaccgcagaccagaggaccaggagctggagagcctgtcggccattgaagcagagctggagaaagtggcccaccagctgcaggcactacggcggggctgagacaccggctggcagggctggccccagggcaccctgtggccctggctctgctgtccccttggcaggtcctggccagatggcccggatgctgcttccggtagggaggcagcctccagcctgcccaagcccaggccaccctatcgccccctacgcgccttgtctcctactcctgactcctacctgccctggaacatcctttgcagggcagccccacaactttaaacattgacgattccttctctgaacacaggcagctttctagaagtttcccttcctccatcctatccactgggcacaactgcaataacttctgaccttttggtgaaagctgagaactcctgactgtaacatattctgtatgaactttat

SEQ ID NO: 113853 - DNA, 921 bp, Artificial Sequence
  derived and/or modified sequence
atgagaagcgccgccgtgctggccctgctgctgtgcgccggccaggtgaccgccctgcccgtgaacagccccatgaacaagggcgacaccgaggtgatgaagtgcatcgtggaggtgatcagcgacaccctgagcaagcccagccccatgcccgtgagccaggagtgcttcgagaccctgagaggcgacgagagaatcctgagcatcctgagacaccagaacctgctgaaggagctgcaggacctggccctgcagggcgccaaggagagagcccaccagcagaagaagcacagcggcttcgaggacgagctgagcgaggtgctggagaaccagagcagccaggccgagctgaagggcagaagcgaggccctggccgtggacggcgccggcaagcccggcgccgaggaggcccaggaccccgagggcaagggcgagcaggagcacagccagcagaaggaggaggaggaggagatggccgtggtgccccagggcctgttcagaggcggcaagagcggcgagctggagcaggaggaggagagactgagcaaggagtgggaggacagcaagagatggagcaagatggaccagctggccaaggagctgaccgccgagaagagactggagggccaggaggaggaggaggacaacagagacagcagcatgaagctgagcttcagagccagagcctacggcttcagaggccccggcccccagctgagaagaggctggagacccagcagcagagaggacagcctggaggccggcctgcccctgcaggtgagaggctaccccgaggagaagaaggaggaggagggcagcgccaacagaagacccgaggaccaggagctggagagcctgagcgccatcgaggccgagctggagaaggtggcccaccagctgcaggccctgagaagaggctag

SEQ ID NO: 113854 - protein, 231 aa, Artificial Sequence
  derived and/or modified sequence
MVSFPPQRYHYFLVLDFEATCDKPQIHPQEIIEFPILKLNGRTMEIESTFHMYVQPVVHPQLTPFCTELTGIIQAMVDGQPSLQQVLERVDEWMAKEGLLDPNVKSIFVTCGDWDLKVMLPGQCQYLGLPVADYFKQWINLKKGSSPGTASGTSCYQSEEAQRKENTPGVKAYSFAMGCWPKNGLLDMNKGLSLQHIGRPHSGIDDCKNIANIMKTLAYRGFIFKQTSKPF

SEQ ID NO: 113855 - protein, 222 aa, Artificial Sequence
  derived and/or modified sequence
MFVMLQVPWLQSCANLVQIGAPLPLLGCLGQYFEVLGSMEVLAGQYGMEIIEFPILKLNGRTMEIESTFHMYVQPVVHPQLTPFCTELTGIIQAMVDGQPSLQQVLERVDEWMAKEGLLDPNVKSIFVTCGDWDLKVMLPGQCQYLGLPVADYFKQWINLKKAYSFAMGCWPKNGLLDMNKGLSLQHIGRPHSGIDDCKNIANIMKTLAYRGFIFKQTSKPF

SEQ ID NO: 113856 - protein, 219 aa, Artificial Sequence
  derived and/or modified sequence
MATASPAADGGRGRPWEGGLVSWPPAPPLTLPWTWMGPSWGQHPGEIIEFPILKLNGRTMEIESTFHMYVQPVVHPQLTPFCTELTGIIQAMVDGQPSLQQVLERVDEWMAKEGLLDPNVKSIFVTCGDWDLKVMLPGQCQYLGLPVADYFKQWINLKKAYSFAMGCWPKNGLLDMNKGLSLQHIGRPHSGIDDCKNIANIMKTLAYRGFIFKQTSKPF

SEQ ID NO: 113857 - protein, 176 aa, Artificial Sequence
  derived and/or modified sequence
MATASPAADGGRGRPWEGGLVSWPPAPPLTLPWTWMGPSWGQHPGEIIEFPILKLNGRTMEIESTFHMYVQPVVHPQLTPFCTELTGIIQAMVDGQPSLQQVLERVDEWMAKEGLLDPNVKSIFVTCGDWDLKVMLPGQCQYLGLPVADYFKQWINLKKAYSFAMGCWPKNGLLDM

SEQ ID NO: 113858 - protein, 204 aa, Artificial Sequence
  derived and/or modified sequence
LQEIIEFPILKLNGRTMEIESTFHMYVQPVVHPQLTPFCTELTGIIQAMVDGQPSLQQVLERVDEWMAKEGLLDPNVKSIFVTCGDWDLKVMLPGQCQYLGLPVADYFKQWINLKKGSSPGTASGTSCYQSEEAQRKENTPGVKAYSFAMGCWPKNGLLDMNKGLSLQHIGRPHSGIDDCKNIANIMKTLAYRGFIFKQTSKPF

SEQ ID NO: 113859 - protein, 160 aa, Artificial Sequence
  derived and/or modified sequence
MEIESTFHMYVQPVVHPQLTPFCTELTGIIQAMVDGQPSLQQVLERVDEWMAKEGLLDPNVKSIFVTCGDWDLKVMLPGQCQYLGLPVADYFKQWINLKKAYSFAMGCWPKNGLLDMNKGLSLQHIGRPHSGIDDCKNIANIMKTLAYRGFIFKQTSKPF

SEQ ID NO: 113860 - DNA, 696 bp, Artificial Sequence
  derived and/or modified sequence
atggtgagcttccccccccagagataccactacttcctggtgctggacttcgaggccacctgcgacaagccccagatccacccccaggagatcatcgagttccccatcctgaagctgaacggcagaaccatggagatcgagagcaccttccacatgtacgtgcagcccgtggtgcacccccagctgacccccttctgcaccgagctgaccggcatcatccaggccatggtggacggccagcccagcctgcagcaggtgctggagagagtggacgagtggatggccaaggagggcctgctggaccccaacgtgaagagcatcttcgtgacctgcggcgactgggacctgaaggtgatgctgcccggccagtgccagtacctgggcctgcccgtggccgactacttcaagcagtggatcaacctgaagaagggcagcagccccggcaccgccagcggcaccagctgctaccagagcgaggaggcccagagaaaggagaacacccccggcgtgaaggcctacagcttcgccatgggctgctggcccaagaacggcctgctggacatgaacaagggcctgagcctgcagcacatcggcagaccccacagcggcatcgacgactgcaagaacatcgccaacatcatgaagaccctggcctacagaggcttcatcttcaagcagaccagcaagcccttctag

SEQ ID NO: 113861 - DNA, 669 bp, Artificial Sequence
  derived and/or modified sequence
atgttcgtgatgctgcaggtgccctggctgcagagctgcgccaacctggtgcagatcggcgcccccctgcccctgctgggctgcctgggccagtacttcgaggtgctgggcagcatggaggtgctggccggccagtacggcatggagatcatcgagttccccatcctgaagctgaacggcagaaccatggagatcgagagcaccttccacatgtacgtgcagcccgtggtgcacccccagctgacccccttctgcaccgagctgaccggcatcatccaggccatggtggacggccagcccagcctgcagcaggtgctggagagagtggacgagtggatggccaaggagggcctgctggaccccaacgtgaagagcatcttcgtgacctgcggcgactgggacctgaaggtgatgctgcccggccagtgccagtacctgggcctgcccgtggccgactacttcaagcagtggatcaacctgaagaaggcctacagcttcgccatgggctgctggcccaagaacggcctgctggacatgaacaagggcctgagcctgcagcacatcggcagaccccacagcggcatcgacgactgcaagaacatcgccaacatcatgaagaccctggcctacagaggcttcatcttcaagcagaccagcaagcccttctag

SEQ ID NO: 113862 - DNA, 660 bp, Artificial Sequence
  derived and/or modified sequence
atggccaccgccagccccgccgccgacggcggcagaggcagaccctgggagggcggcctggtgagctggccccccgccccccccctgaccctgccctggacctggatgggccccagctggggccagcaccccggcgagatcatcgagttccccatcctgaagctgaacggcagaaccatggagatcgagagcaccttccacatgtacgtgcagcccgtggtgcacccccagctgacccccttctgcaccgagctgaccggcatcatccaggccatggtggacggccagcccagcctgcagcaggtgctggagagagtggacgagtggatggccaaggagggcctgctggaccccaacgtgaagagcatcttcgtgacctgcggcgactgggacctgaaggtgatgctgcccggccagtgccagtacctgggcctgcccgtggccgactacttcaagcagtggatcaacctgaagaaggcctacagcttcgccatgggctgctggcccaagaacggcctgctggacatgaacaagggcctgagcctgcagcacatcggcagaccccacagcggcatcgacgactgcaagaacatcgccaacatcatgaagaccctggcctacagaggcttcatcttcaagcagaccagcaagcccttctag

SEQ ID NO: 113863 - DNA, 531 bp, Artificial Sequence
  derived and/or modified sequence
atggccaccgccagccccgccgccgacggcggcagaggcagaccctgggagggcggcctggtgagctggccccccgccccccccctgaccctgccctggacctggatgggccccagctggggccagcaccccggcgagatcatcgagttccccatcctgaagctgaacggcagaaccatggagatcgagagcaccttccacatgtacgtgcagcccgtggtgcacccccagctgacccccttctgcaccgagctgaccggcatcatccaggccatggtggacggccagcccagcctgcagcaggtgctggagagagtggacgagtggatggccaaggagggcctgctggaccccaacgtgaagagcatcttcgtgacctgcggcgactgggacctgaaggtgatgctgcccggccagtgccagtacctgggcctgcccgtggccgactacttcaagcagtggatcaacctgaagaaggcctacagcttcgccatgggctgctggcccaagaacggcctgctggacatgtag

SEQ ID NO: 113864 - DNA, 615 bp, Artificial Sequence
  derived and/or modified sequence
ctgcaggagatcatcgagttccccatcctgaagctgaacggcagaaccatggagatcgagagcaccttccacatgtacgtgcagcccgtggtgcacccccagctgacccccttctgcaccgagctgaccggcatcatccaggccatggtggacggccagcccagcctgcagcaggtgctggagagagtggacgagtggatggccaaggagggcctgctggaccccaacgtgaagagcatcttcgtgacctgcggcgactgggacctgaaggtgatgctgcccggccagtgccagtacctgggcctgcccgtggccgactacttcaagcagtggatcaacctgaagaagggcagcagccccggcaccgccagcggcaccagctgctaccagagcgaggaggcccagagaaaggagaacacccccggcgtgaaggcctacagcttcgccatgggctgctggcccaagaacggcctgctggacatgaacaagggcctgagcctgcagcacatcggcagaccccacagcggcatcgacgactgcaagaacatcgccaacatcatgaagaccctggcctacagaggcttcatcttcaagcagaccagcaagcccttctag

SEQ ID NO: 113865 - DNA, 696 bp, Artificial Sequence
  derived and/or modified sequence
atggtctccttcccacctcagagataccattatttcctggtactggactttgaggccacctgcgacaagccccagatccaccctcaggaaattattgaattccctatcctgaagttgaacggcagaaccatggaaattgagtccacgtttcacatgtacgtgcagcccgtagttcatccacagttaacacctttttgtactgaactgactggtatcatacaggccatggtagatggacagccctctctgcagcaggtcctggaaagggtggacgaatggatggccaaagagggactgctggatcccaatgtgaaatcaatcttcgttacttgcggagattgggacctgaaggtgatgctccctggccagtgccagtatctggggctcccagtcgcagactatttcaagcagtggattaatttgaagaaaggctcttctcccggaaccgcgtccggaacaagttgctatcagtcagaggaggcccagagaaaagaaaatacacctggagtgaaggcttactcttttgccatgggttgctggcctaagaacgggctcctcgacatgaacaaagggctctctttacagcatatcgggaggcctcactcaggcatagatgactgcaagaacatcgccaacatcatgaaaacacttgcataccgtgggtttatcttcaagcagacctctaagcccttttag

SEQ ID NO: 113866 - DNA, 669 bp, Artificial Sequence
  derived and/or modified sequence
atgtttgttatgttgcaggtgccttggcttcagagctgcgccaatctcgtccaaatcggcgcccccctccccctgctcggctgcctcggccagtactttgaggttttagggtcaatggaggtgctggccggacagtacggtatggaaattattgaatttcctattctcaagctgaatggtagaacaatggagattgagtctacattccacatgtacgtacagcccgttgtacaccctcagctcaccccgttttgcactgagctgacaggcattatacaggccatggtagacggtcaacccagcctccaacaagtgttagaaagagtcgatgagtggatggcaaaagagggactgcttgaccctaacgtcaagtccatttttgttacgtgtggggactgggaccttaaagtgatgttgccaggacagtgccaatatctgggccttcccgtggcggactacttcaaacagtggattaaccttaaaaaggcttattccttcgctatgggttgctggcctaaaaacggcctgttagacatgaataaagggctcagcctccagcatatcggacggccccactccggcatagatgactgcaagaacattgccaacataatgaagaccctagcttaccgaggcttcattttcaaacagacttccaaacccttctag

SEQ ID NO: 113867 - DNA, 660 bp, Artificial Sequence
  derived and/or modified sequence
atggccaccgccagcccggccgccgacggagggagggggcgaccgtgggaaggcggccttgtgtcctggccacccgcccccccgctcacactgccttggacttggatgggccccagctggggccagcacccgggggaaatcatagagttccccatcctgaagttaaacggcaggaccatggagattgagagcaccttccacatgtacgtgcaacccgttgtgcatccccaactgacccctttttgtaccgagctcacaggaatcattcaggcaatggttgatgggcagcctagccttcagcaggtgctggagagggtcgatgagtggatggcaaaagagggcctcctcgatccaaatgtgaagagtatttttgtgacgtgcggggactgggatctgaaggtcatgctccccggccagtgccagtatttgggactacccgtggccgactacttcaaacagtggataaaccttaagaaagcgtacagttttgccatggggtgttggcccaagaatggcctattagatatgaacaaaggattgtcactacagcacattggacggcctcactctggtatcgatgactgcaaaaatattgccaatatcatgaaaactctggcctaccgagggttcatcttcaagcagacaagcaagccattttag

SEQ ID NO: 113868 - DNA, 531 bp, Artificial Sequence
  derived and/or modified sequence
atggcgactgcctcccccgccgctgatgggggccggggaaggccctgggagggtgggctggtttcctggcccccagcaccccctcttactctaccttggacgtggatgggtcctagctgggggcagcaccccggtgagatcattgagtttccaatcctcaaactaaacgggcggacaatggaaatagagtctacattccatatgtacgtgcagccagtggtgcacccacagttgactcctttctgcaccgagctgaccggcatcatccaagccatggtcgatggtcagcccagcttgcaacaagtgctggagagagtcgacgagtggatggccaaagaaggattgctcgatcctaatgtgaaatccattttcgtgacatgcggggactgggatctgaaagtgatgcttcccggacaatgccaatacttggggttgcctgtggctgattacttcaagcagtggatcaatcttaagaaggcctacagtttcgccatgggttgctggcctaagaatggcctgctggacatgtag

SEQ ID NO: 113869 - DNA, 615 bp, Artificial Sequence
  derived and/or modified sequence
ctgcaggagattatagagtttcccatcctgaagctgaacggccgcacgatggagatcgaaagtacctttcatatgtatgtccaaccagtggtccatccccagctgactcccttctgcactgaactgacgggaatcatccaggcaatggtggacgggcagcccagcttgcagcaggttttggagagggtggacgaatggatggcgaaggagggtctactggaccccaatgtcaaaagtatttttgttacttgcggagactgggatctgaaagtgatgctcccaggccaatgtcagtaccttgggttgcccgtagccgactacttcaaacagtggatcaatctcaagaaaggtagcagccccggtacagcctcaggcactagttgttaccagagtgaagaagctcaaagaaaggagaatacccccggtgtgaaagcttactccttcgccatggggtgttggcctaaaaacgggcttctcgacatgaataaaggtctctctctccagcacatcggtcggccccactctggcatagatgactgtaagaatattgccaatatcatgaagactctcgcctatcggggctttatattcaagcaaacttccaaacccttttag

SEQ ID NO: 113870 - DNA, 1332 bp, Artificial Sequence
  derived and/or modified sequence
gaaattggctgagagaaaaggtcagggtcaggaataacagtttcattatctgagcaactggacatagaggctggcacttgggcacattgtcacaaatctttgtgttgggattaatgccactaacctgtagtgttggggttccatctctgatcattatcagctaaaaatcttcaaaatgtttgtcatgcttcaggtgccctggctgcagagttgtgccaacttggtgcagattggggcacctctcccactactgggctgtttgggccagtattttgaggttctgggaagtatggaagtactggctgggcaatatgggatggaaatcatcgagttccccatcctaaagctaaatggccggaccatggagattgagtctacctttcacatgtatgtccagcctgtagtccatccacagcttaccccattctgtacagagctcaccgggattattcaagccatggtggatggtcagccaagcctgcagcaagtgctggagagggtcgatgaatggatggcgaaggaaggcctcttagatccaaacgtcaagtcaatttttgtcacctgtggagactgggacttaaaagtcatgctcccaggccagtgccagtacttgggcttgccagtggcggattacttcaagcagtggattaatctgaaaaaggcttacagcttcgccatgggctgctggcccaagaatggacttctagacatgaacaagggcctcagcctgcaacacataggccggccccacagcggcattgacgactgcaagaacattgccaacatcatgaagacactcgcctatcgaggcttcatcttcaagcagacatcgaagccgttctgattggccgaggacaggatggggcaggacagggtagctgtttggcccagcccagaatcctcctctccctcaccagaggggaagagggagagtggcatagctctgtgtccagagtgtccccagctgccctgtgggctcatgcccttggcgtgggcttgtgcccttgcaagggcttggccacttggcccttctggagcagacactttgtgccccccatccccacccctcaatctcagcccagtatcagcccctcccattgcgggcctgggctagggggacccaggcactcaccgcctcctccctggtacacaggcttctgtggggccaccaagcccctcctgtgccccctcccatccatagtgcatggtgtgtggtgcccccagggctccaggacagatcaggccccaccttgtgtctacccccatccccgctgtgaacgtgccactgaataaagtcggggaaacgaggcactgggtgtgtgtgcaaagcca

SEQ ID NO: 113871 - DNA, 1340 bp, Artificial Sequence
  derived and/or modified sequence
tcggtgtgttgtggactcgtggtgctggctgccgctgttcaggcggccgggaacgggcggtggggagcgggcggagctggccctgcctctgcctggccggcgccgcagtcggcgcgggccgcgcccgccgccgccaactgccctgagcgcttgctgaggccgagggagacgtcggggcctgcacctggagggagcctgccgcgctggccccgaggagggggcgttgccatggcgacagcctctcccgctgctgacggggggcgggggcggccctgggaaggagggctggtctcctggccccccgcccctccccttactctcccctggacttggatgggcccgagttgggggcaacaccccggggaaatcatcgagttccccatcctaaagctaaatggccggaccatggagattgagtctacctttcacatgtatgtccagcctgtagtccatccacagcttaccccattctgtacagagctcaccgggattattcaagccatggtggatggtcagccaagcctgcagcaagtgctggagagggtcgatgaatggatggcgaaggaaggcctcttagatccaaacgtcaagtcaatttttgtcacctgtggagactgggacttaaaagtcatgctcccaggccagtgccagtacttgggcttgccagtggcggattacttcaagcagtggattaatctgaaaaaggcttacagcttcgccatgggctgctggcccaagaatggacttctagacatgaacaagggcctcagcctgcaacacataggccggccccacagcggcattgacgactgcaagaacattgccaacatcatgaagacactcgcctatcgaggcttcatcttcaagcagacatcgaagccgttctgattggccgaggacaggatggggcaggacagggtagctgtttggcccagcccagaatcctcctctccctcaccagaggggaagagggagagtggcatagctctgtgtccagagtgtccccagctgccctgtgggctcatgcccttggcgtgggcttgtgcccttgcaagggcttggccacttggcccttctggagcagacactttgtgccccccatccccacccctcaatctcagcccagtatcagcccctcccattgcgggcctgggctagggggacccaggcactcaccgcctcctccctggtacacaggcttctgtggggccaccaagcccctcctgtgccccctcccatccatagtgcatggtgtgtggtgcccccagggctccaggacagatcaggccccaccttgtgtctacccccatccccgctgtgaacgtgccactgaataaagt

SEQ ID NO: 113872 - DNA, 764 bp, Artificial Sequence
  derived and/or modified sequence
ggtgagtcggtgtgttgtggactcgtggtgctggctgccgctgttcaggcggccgggaacgggcggtggggagcgggcggagctggccctgcctctgcctggccggcgccgcagtcggcgcgggccgcgcccgccgccgccaactgccctgagcgcttgctgaggccgagggagacgtcggggcctgcacctggagggagcctgccgcgctggccccgaggagggggcgttgccatggcgacagcctctcccgctgctgacggggggcgggggcggccctgggaaggagggctggtctcctggccccccgcccctccccttactctcccctggacttggatgggcccgagttgggggcaacaccccggggaaatcatcgagttccccatcctaaagctaaatggccggaccatggagattgagtctacctttcacatgtatgtccagcctgtagtccatccacagcttaccccattctgtacagagctcaccgggattattcaagccatggtggatggtcagccaagcctgcagcaagtgctggagagggtcgatgaatggatggcgaaggaaggcctcttagatccaaacgtcaagtcaatttttgtcacctgtggagactgggacttaaaagtcatgctcccaggccagtgccagtacttgggcttgccagtggcggattacttcaagcagtggattaatctgaaaaaggcttacagcttcgccatgggctgctggcccaagaatggacttctagacatgaa

SEQ ID NO: 113873 - DNA, 1103 bp, Artificial Sequence
  derived and/or modified sequence
ctccaggaaatcatcgagttccccatcctaaagctaaatggccggaccatggagattgagtctacctttcacatgtatgtccagcctgtagtccatccacagcttaccccattctgtacagagctcaccgggattattcaagccatggtggatggtcagccaagcctgcagcaagtgctggagagggtcgatgaatggatggcgaaggaaggcctcttagatccaaacgtcaagtcaatttttgtcacctgtggagactgggacttaaaagtcatgctcccaggccagtgccagtacttgggcttgccagtggcggattacttcaagcagtggattaatctgaaaaagggcagcagtcctggaacagcctcaggaacctcatgctaccagtcagaggaagctcagagaaaggagaacacaccgggggtcaaggcttacagcttcgccatgggctgctggcccaagaatggacttctagacatgaacaagggcctcagcctgcaacacataggccggccccacagcggcattgacgactgcaagaacattgccaacatcatgaagacactcgcctatcgaggcttcatcttcaagcagacatcgaagccgttctgattggccgaggacaggatggggcaggacagggtagctgtttggcccagcccagaatcctcctctccctcaccagaggggaagagggagagtggcatagctctgtgtccagagtgtccccagctgccctgtgggctcatgcccttggcgtgggcttgtgcccttgcaagggcttggccacttggcccttctggagcagacactttgtgccccccatccccacccctcaatctcagcccagtatcagcccctcccattgcgggcctgggctagggggacccaggcactcaccgcctcctccctggtacacaggcttctgtggggccaccaagcccctcctgtgccccctcccatccatagtgcatggtgtgtggtgcccccagggctccaggacagatcaggccccaccttgtgtctacccccatccccgctgtgaacgtgccactgaataaagtcggggaaacgaggcactgggtgtgtgtgcaaagcca

SEQ ID NO: 113874 - DNA, 1067 bp, Artificial Sequence
  derived and/or modified sequence
agcattggggctttccagctctcacagaaccttcagcatccccagctgccggtcttggcatcttcgaagtaaggagaggaaatcatcgagttccccatcctaaagctaaatggccggaccatggagattgagtctacctttcacatgtatgtccagcctgtagtccatccacagcttaccccattctgtacagagctcaccgggattattcaagccatggtggatggtcagccaagcctgcagcaagtgctggagagggtcgatgaatggatggcgaaggaaggcctcttagatccaaacgtcaagtcaatttttgtcacctgtggagactgggacttaaaagtcatgctcccaggccagtgccagtacttgggcttgccagtggcggattacttcaagcagtggattaatctgaaaaaggcttacagcttcgccatgggctgctggcccaagaatggacttctagacatgaacaagggcctcagcctgcaacacataggccggccccacagcggcattgacgactgcaagaacattgccaacatcatgaagacactcgcctatcgaggcttcatcttcaagcagacatcgaagccgttctgattggccgaggacaggatggggcaggacagggtagctgtttggcccagcccagaatcctcctctccctcaccagaggggaagagggagagtggcatagctctgtgtccagagtgtccccagctgccctgtgggctcatgcccttggcgtgggcttgtgcccttgcaagggcttggccacttggcccttctggagcagacactttgtgccccccatccccacccctcaatctcagcccagtatcagcccctcccattgcgggcctgggctagggggacccaggcactcaccgcctcctccctggtacacaggcttctgtggggccaccaagcccctcctgtgccccctcccatccatagtgcatggtgtgtggtgcccccagggctccaggacagatcaggccccaccttgtgtctacccccatccccgctgtgaacgtgccactgaataaagtcggggaaacgag

SEQ ID NO: 113875 - DNA, 696 bp, Artificial Sequence
  derived and/or modified sequence
atggtgtccttccccccccagcgctaccactacttcctggtgctggactttgaggccacctgtgacaagccccagatccacccccaggagatcatcgagttccccatcctgaagctgaatggccgcaccatggagattgagagcaccttccacatgtatgtgcagcctgtggtgcacccccagctgacccccttctgcacagagctgaccggcatcatccaggccatggtggatggccagcccagcctgcagcaggtgctggagcgggtggatgagtggatggccaaggagggcctgctggaccccaacgtgaagagcatctttgtgacctgtggggactgggacctgaaggtgatgctgcccggccagtgccagtacctgggcctgcctgtggccgactacttcaagcagtggatcaacctgaagaagggcagcagccctggaacagccagcggcaccagctgctaccagagcgaggaggcccagaggaaagaaaacaccccaggagtgaaggcctacagctttgccatgggctgctggcccaagaatggcctgctggacatgaacaagggcctgagcctgcagcacatcggccggccccacagcggcattgatgactgcaagaacatcgccaacatcatgaagaccctggcctaccggggcttcatcttcaagcagaccagcaagcccttctag

SEQ ID NO: 113876 - DNA, 669 bp, Artificial Sequence
  derived and/or modified sequence
atgtttgtgatgctgcaggtgccctggctgcagagctgtgccaacctggtgcagattggagcccccctgcccctgctgggctgcctgggccagtactttgaggtgctgggctccatggaggtgctggccggccagtatggcatggagatcatcgagttccccatcctgaagctgaatggaagaaccatggagattgagagcaccttccacatgtatgtgcagcctgtggtgcacccccagctgacccccttctgcacagagctgaccggcatcatccaggccatggtggatggccagcccagcctgcagcaggtgctggagcgggtggatgagtggatggccaaggagggcctgctggaccccaacgtgaagagcatctttgtgacctgtggggactgggacctgaaggtgatgctgcccggccagtgccagtacctgggcctgcctgtggccgactacttcaagcagtggatcaacctgaagaaggcctacagctttgccatgggctgctggcccaagaatggcctgctggacatgaacaagggcctgagcctgcagcacatcggccggccccacagcggcattgatgactgcaagaacatcgccaacatcatgaagaccctggcctaccggggcttcatcttcaagcagaccagcaagcccttctag

SEQ ID NO: 113877 - DNA, 660 bp, Artificial Sequence
  derived and/or modified sequence
atggccacagccagccctgctgctgatggcggccggggccggccctgggagggcggcctggtgtcctggcccccagccccacccctgaccctgccctggacctggatgggccccagctggggccagcaccctggagagatcatcgagttccccatcctgaagctgaatggccgcaccatggagattgagagcaccttccacatgtatgtgcagcctgtggtgcacccccagctgacccccttctgcacagagctgaccggcatcatccaggccatggtggatggccagcccagcctgcagcaggtgctggagcgggtggatgagtggatggccaaggagggcctgctggaccccaacgtgaagagcatctttgtgacctgtggggactgggacctgaaggtgatgctgcccggccagtgccagtacctgggcctgcctgtggccgactacttcaagcagtggatcaacctgaagaaggcctacagctttgccatgggctgctggcccaagaatggcctgctggacatgaacaagggcctgagcctgcagcacatcggccggccccacagcggcattgatgactgcaagaacatcgccaacatcatgaagaccctggcctaccggggcttcatcttcaagcagaccagcaagcccttctag

SEQ ID NO: 113878 - DNA, 531 bp, Artificial Sequence
  derived and/or modified sequence
atggccacagccagccctgctgctgatggcggccggggccggccctgggagggcggcctggtgtcctggcccccagccccacccctgaccctgccctggacctggatgggccccagctggggccagcaccctggagagatcatcgagttccccatcctgaagctgaatggccgcaccatggagattgagagcaccttccacatgtatgtgcagcctgtggtgcacccccagctgacccccttctgcacagagctgaccggcatcatccaggccatggtggatggccagcccagcctgcagcaggtgctggagcgggtggatgagtggatggccaaggagggcctgctggaccccaacgtgaagagcatctttgtgacctgtggggactgggacctgaaggtgatgctgcccggccagtgccagtacctgggcctgcctgtggccgactacttcaagcagtggatcaacctgaagaaggcctacagctttgccatgggctgctggcccaagaatggcctgctggacatgtag

SEQ ID NO: 113879 - DNA, 615 bp, Artificial Sequence
  derived and/or modified sequence
ctgcaggagatcatcgagttccccatcctgaagctgaatggaagaaccatggagattgagagcaccttccacatgtatgtgcagcctgtggtgcacccccagctgacccccttctgcacagagctgaccggcatcatccaggccatggtggatggccagcccagcctgcagcaggtgctggagcgggtggatgagtggatggccaaggagggcctgctggaccccaacgtgaagagcatctttgtgacctgtggggactgggacctgaaggtgatgctgcccggccagtgccagtacctgggcctgcctgtggccgactacttcaagcagtggatcaacctgaagaagggcagcagccctggaacagccagcggcaccagctgctaccagagcgaggaggcccagaggaaggagaacaccccaggagtgaaggcctacagctttgccatgggctgctggcccaagaatggcctgctggacatgaacaagggcctgagcctgcagcacatcggccggccccacagcggcattgatgactgcaagaacatcgccaacatcatgaagaccctggcctaccggggcttcatcttcaagcagaccagcaagcccttctag

SEQ ID NO: 113880 - DNA, 696 bp, Artificial Sequence
  derived and/or modified sequence
atggtgagcttccccccccagcggtaccactacttcctggtgctggacttcgaagctacctgtgataagccccagatccatccgcaggagatcatcgagttccccattctcaaattaaatggacgaacaatggagattgaatcaacttttcatatgtacgtccagcccgtggtccatccccaattgactcccttctgtacagaactgaccggaattattcaggccatggttgacggccagccttccctgcagcaggttctagagagagttgacgaatggatggctaaggaaggcctcctcgatcccaacgtgaagagtatatttgtgacctgtggagattgggatctgaaggttatgctccctggacagtgccagtacctggggctgcctgttgccgattattttaaacagtggatcaacctcaagaaaggcagttctcctgggactgccagcggaactagttgttaccagagcgaagaagcccagagaaaggagaacaccccaggagtgaaggcttattcctttgctatgggttgctggcccaagaacggacttttagatatgaataaaggcttgagcctgcaacatatcggtagaccacactcaggcatcgacgattgcaaaaatatagctaacattatgaaaacactcgcctacagaggcttcatattcaagcagaccagtaagccattctag

SEQ ID NO: 113881 - DNA, 669 bp, Artificial Sequence
  derived and/or modified sequence
atgttcgtgatgctgcaggtgccctggctgcagagctgcgccaacctggtgcagattggggctcccctgcccctgcttgggtgtcttggacagtactttgaggtgctcggatccatggaggtattggccggccaatatggcatggagattatcgaatttccaatactgaaactgaatggcagaacaatggagattgaaagcacattccacatgtacgtgcagccagtagtgcatccccaattaacgccattctgtactgagctaaccggtattattcaagccatggtggatggtcagcctagcctgcaacaggtcttagagagagttgacgagtggatggccaaagaagggctgctggaccctaacgtgaagagtatcttcgttacatgtggagactgggacctgaaggtgatgctgccggggcagtgtcagtacctcggactcccagtggcagactactttaagcagtggataaatcttaaaaaggcctatagtttcgctatgggctgttggccaaagaatgggctgctggacatgaacaaagggttatcactgcaacatattgggcgtccccacagcgggatcgacgattgtaaaaacatcgctaatatcatgaagaccttggcttaccggggcttcatattcaagcagacatccaaacccttctag

SEQ ID NO: 113882 - DNA, 660 bp, Artificial Sequence
  derived and/or modified sequence
atggccaccgccagccccgccgccgacggcggccggggccggccctgggagggaggcctggtttcctggccgcctgctccgcccctgactctgccatggacatggatgggcccgagctgggggcagcaccccggagagataatcgagttccccatcctgaaacttaacgggcgcactatggagatcgaatcaaccttccacatgtatgtccaaccagtcgttcaccctcagttaactccattttgcacggagctgacgggaatcatccaggctatggtggatggacagccctcattgcagcaggtattggaaagggtcgatgaatggatggccaaagaaggattgctggacccaaacgtgaaaagcatcttcgtaacttgtggcgactgggatctgaaggtgatgctccctggtcagtgccagtatctaggattgccagtagccgactacttcaaacaatggattaacttaaagaaagcctattcctttgctatgggatgctggcctaagaacggccttttggacatgaacaaaggcctctcactgcaacacattggtaggccacattcaggaattgatgactgcaagaatatcgctaatattatgaaaactctggcctatagggggttcatatttaagcagacaagtaaacccttctag

SEQ ID NO: 113883 - DNA, 531 bp, Artificial Sequence
  derived and/or modified sequence
atggccaccgccagccccgccgccgacggcggccggggccggccctgggagggaggccttgtgagttggccccccgcccctcccttaacactcccttggacatggatgggtccttcatggggtcagcaccccggcgagataatcgaatttccaattctgaagctgaacggaagaacaatggaaattgagtccacctttcacatgtatgttcaacccgttgtgcatccccagctgacccccttttgcaccgagctgacgggcataattcaagctatggtggatgggcagccctccctgcagcaggtgctggaacgggtcgacgaatggatggccaaggaaggcttgctcgatccaaatgtgaaatccatctttgtgacctgcggagactgggatttgaaagtcatgctacccggccagtgccagtacctgggattgcctgtggccgactattttaagcaatggattaatctgaaaaaggcttattcgtttgcaatgggatgctggccaaaaaatggtctcctggatatgtag

SEQ ID NO: 113884 - DNA, 615 bp, Artificial Sequence
  derived and/or modified sequence
ctgcaggagatcatcgagttccccatcctgaagctgaacggccggacaatggagattgagagcaccttccacatgtacgtgcaacccgtcgttcaccctcagctgactcctttctgtacggagcttactgggatcatccaagccatggtggatggccaaccttccctccagcaggtattggagagggtggacgagtggatggccaaagaagggttgcttgacccaaatgtgaagtccatcttcgtgacctgcggcgactgggacctgaaggtgatgctgcccggacagtgccagtacctcggactgccggttgctgactactttaaacagtggattaacttgaagaagggatccagcccaggaactgcttccggcacatcttgctaccagtctgaagaagcccagcggaaagagaatactcccggggtgaaggcatatagtttcgcaatggggtgttggcccaagaatggactccttgacatgaacaaggggctttctttacagcatattggcagacctcattctggtatcgacgactgtaagaacattgccaatatcatgaaaacgttagcataccgtggctttattttcaaacagacgtcaaagccattttag

SEQ ID NO: 113885 - DNA, 696 bp, Artificial Sequence
  derived and/or modified sequence
atggtgtcctttccaccgcagaggtaccactattttctggtgctggactttgaggctacatgtgacaagccgcagatacatccgcaggaaatcatcgaatttcccatcttgaagttaaatgggcgaaccatggagattgaatccacctttcatatgtacgtgcaaccagttgtccacccccagctcacccccttttgtacagaactcacagggattatccaggccatggtggatgggcaacccagcttacagcaggttctggagcgcgtggatgagtggatggccaaggagggcttattagatccaaatgtgaaaagtatctttgtaacctgcggcgactgggatcttaaagtcatgcttccagggcagtgccagtaccttggcctgcctgtggccgactatttcaaacagtggatcaacttgaagaaaggctcctccccaggaactgcaagcggcaccagttgttatcagagcgaagaagcgcagcgcaaggagaacaccccaggcgtcaaagcttacagcttcgccatgggatgttggccaaaaaatggacttctagatatgaataaagggctgagcctccagcatatcggcaggccccacagcgggattgacgactgcaagaacattgctaacatcatgaaaactttggcttaccgcggatttatctttaagcaaacaagtaaacccttctag

SEQ ID NO: 113886 - DNA, 669 bp, Artificial Sequence
  derived and/or modified sequence
atgttcgtcatgctgcaggtcccttggttgcaatcatgtgctaatctggtgcagatcggtgcccctctgcctctcctcggatgtcttggacaatacttcgaggtgctgggatctatggaagtgctggccggacagtacgggatggagatcatcgagttccccattctcaagctgaacgggagaaccatggagatcgagtcgaccttccacatgtacgtacagccagttgtgcacccgcagctgactcccttctgcacagaactcacaggtatcatccaggccatggttgatggacagcccagtctgcagcaggttctcgagagggtggacgaatggatggccaaagaaggcctgctggatccgaacgtaaagtctatttttgtaacatgcggcgactgggacctcaaagtgatgttgccaggacagtgtcagtatctcgggctaccagtggcggactatttcaagcagtggattaacctgaagaaggcctacagttttgctatgggatgttggcctaagaacggtctcctggatatgaataaggggctgagcctacaacatatcgggaggccccactccgggatcgatgactgtaaaaacattgcaaatattatgaaaaccctcgcgtaccgtggctttattttcaagcagacctccaaacccttttag

SEQ ID NO: 113887 - DNA, 660 bp, Artificial Sequence
  derived and/or modified sequence
atggcgactgctagtcctgctgctgatggaggtaggggcagaccatgggaaggtgggctggtttcatggccacccgcacctcccctaaccctgccttggacgtggatggggccatcatggggccagcaccccggtgagatcattgagtttcccattctcaagctgaatggcagaaccatggagattgaaagcacgtttcacatgtacgtgcagccggtagtccacccacagttaacgccattctgcacagaactgaccggcatcattcaagcaatggtggacggacagccaagtttgcaacaagtcctggaaagagtggatgaatggatggccaaggagggcctcctcgatcctaatgtgaaaagcatcttcgttacatgtggggactgggacctgaaagtcatgctacccggacagtgtcagtatcttggcttaccagtggccgattatttcaaacagtggatcaatctgaaaaaggcttactcctttgccatggggtgctggcctaagaatggattactggacatgaacaaaggactttcgctgcagcacattggcaggcctcactctggcattgacgactgtaagaacatcgcaaatataatgaagacactagcatacagaggttttatctttaaacagaccagtaaaccattttag

SEQ ID NO: 113888 - DNA, 531 bp, Artificial Sequence
  derived and/or modified sequence
atggccacagccagcccagctgccgatggcggtcgcggtcgcccatgggagggaggcctggtgtcctggccccctgcccctccactcaccctgccctggacgtggatggggccatcgtggggccaacatcccggagagataattgaattcccaatacttaaacttaatggacggaccatggagatagagagcactttccatatgtacgtgcaacctgtggtgcacccacagctcactcctttctgcaccgagctgacaggtataatccaagccatggtggatggacagccgagtctgcagcaggtgctggaacgagtcgatgaatggatggcaaaggaaggactgctcgaccccaatgtcaagtctatatttgtgacttgcggggattgggacctgaaggtcatgctcccagggcagtgccagtacctggggctgcccgtggccgattatttcaagcaatggatcaacctgaaaaaagcctactcttttgccatgggctgctggcctaaaaatggcctgctcgatatgtag

SEQ ID NO: 113889 - DNA, 615 bp, Artificial Sequence
  derived and/or modified sequence
ttgcaagaaattattgagttcccgatcttgaagctgaacggcaggacgatggaaatcgagagcacctttcatatgtatgtgcagccagtggtgcaccctcagctgacgccattctgtacagaactgactggcataatccaggctatggttgatggccaaccatctctgcaacaagtcctagagcgtgtggatgaatggatggcaaaagaagggctactcgatcctaatgtcaagtcaatctttgtgacctgcggtgactgggatctaaaggttatgcttcccggtcagtgccagtatctggggctccctgtggccgattactttaaacagtggattaacctgaaaaagggctctagtcctggcaccgcctcaggaactagttgttatcagtctgaagaggcacaacgaaaggagaacactccaggggttaaagcttactctttcgccatgggatgctggccaaagaatgggcttcttgacatgaataagggattgagcctgcagcacattgggcgaccccactccggtattgatgattgcaagaacatcgctaatattatgaagacactcgcatatcgcggttttattttcaagcagacctcaaagccattctag

SEQ ID NO: 113890 - DNA, 483 bp, Artificial Sequence
  derived and/or modified sequence
atggagatcgagagcaccttccacatgtacgtgcagcccgtggtgcacccccagctgacccccttctgcaccgagctgaccggcatcatccaggccatggtggacggccagcccagcctgcagcaggtgctggagagagtggacgagtggatggccaaggagggcctgctggaccccaacgtgaagagcatcttcgtgacctgcggcgactgggacctgaaggtgatgctgcccggccagtgccagtacctgggcctgcccgtggccgactacttcaagcagtggatcaacctgaagaaggcctacagcttcgccatgggctgctggcccaagaacggcctgctggacatgaacaagggcctgagcctgcagcacatcggcagaccccacagcggcatcgacgactgcaagaacatcgccaacatcatgaagaccctggcctacagaggcttcatcttcaagcagaccagcaagcccttctag

SEQ ID NO: 113891 - DNA, 483 bp, Artificial Sequence
  derived and/or modified sequence
atggagatagagtcaactttccacatgtatgtgcagcctgttgttcacccccagttgacaccattttgtaccgagctcaccggaatcattcaggccatggtggacgggcagccatcccttcaacaggtgctggaacgcgtggacgagtggatggccaaggagggactcttagatccgaacgtcaagagtatattcgttacgtgcggggactgggacctcaaagtgatgttgcctggacagtgccaatatttaggtctgccggtagcagactatttcaaacagtggatcaatctcaagaaggcttattcctttgcaatggggtgttggcccaagaacggcctgctggatatgaacaagggtctctccctccagcacatcggtcggccccattcagggatcgatgactgcaaaaatatcgcaaacatcatgaagacactggcatacagaggctttatcttcaagcagacatcgaagcctttctag

SEQ ID NO: 113892 - DNA, 483 bp, Artificial Sequence
  derived and/or modified sequence
atggagattgagagcaccttccacatgtatgtgcagcctgtggtgcacccccagctgacccccttctgcacagagctgaccggcatcatccaggccatggtggatggccagcccagcctgcagcaggtgctggagcgggtggatgagtggatggccaaggagggcctgctggaccccaacgtgaagagcatctttgtgacctgtggggactgggacctgaaggtgatgctgcccggccagtgccagtacctgggcctgcctgtggccgactacttcaagcagtggatcaacctgaagaaggcctacagctttgccatgggctgctggcccaagaatggcctgctggacatgaacaagggcctgagcctgcagcacatcggccggccccacagcggcattgatgactgcaagaacatcgccaacatcatgaagaccctggcctaccggggcttcatcttcaagcagaccagcaagcccttctag

SEQ ID NO: 113893 - DNA, 483 bp, Artificial Sequence
  derived and/or modified sequence
atggagatcgagagcaccttccacatgtacgtgcagcccgtggtgcatcctcagctgaccccgttttgtacagagcttactggcatcattcaggccatggtggatggacagccttctctacagcaggtactggagcgggttgatgagtggatggcaaaagaggggctgctggacccgaatgttaagtccatatttgtcacatgtggagactgggacttaaaagtgatgctccccggtcagtgtcagtatcttggcctgcctgtcgctgattactttaagcagtggataaatctaaagaaggcctactcctttgctatgggctgctggcccaaaaacggcctgcttgacatgaataagggcctctcgcttcagcacataggaagaccccacagcggaattgatgattgcaagaatattgccaatatcatgaagacgctggcgtatagggggtttatttttaaacagacgtccaaacccttctag

SEQ ID NO: 113894 - DNA, 483 bp, Artificial Sequence
  derived and/or modified sequence
atggagattgagtcgacttttcacatgtatgttcaaccagtggtccacccgcagcttactccattttgtactgagctgacaggcatcatccaggccatggttgatggccagccctcgctgcagcaggttctcgagagggtggatgagtggatggccaaggagggtctgctggatccaaacgtgaagtccatcttcgtgacttgcggcgattgggatctgaaagtgatgctccccggacagtgccagtatctaggcctgcctgtggcggactattttaaacagtggatcaacctgaagaaagcctacagttttgccatgggatgttggcccaagaatggtcttctggacatgaataagggtctgagcctccagcacattggcagaccccatagcggcatagatgactgtaagaacatcgccaacattatgaagacgcttgcctaccgcggatttatctttaagcagactagcaaacccttttag

SEQ ID NO: 113895 - protein, 333 aa, Artificial Sequence
  derived and/or modified sequence
MGPLPAPSCTQRITWKGLLLTASLLNFWNPPTTAEVTIEAQPPKVSEGKDVLLLVHNLPQNLPGYFWYKGEMTDLYHYIISYIVDGKIIIYGPAYSGRETVYSNASLLIQNVTRKDAGTYTLHIIKRGDETREEIRHFTFTLYSKLPIPYITINNLNPRENKDVLAFTCEPKSENYTYIWWLNGQSLPVSPGVKRPIENRILILPSVTRNETGPYQCEIRDRYGGLRSNPVILNVLYGPDLPRIYPSFTYYRSGENLDLSCFTESNPPAEYFWTINGKFQQSGQKLFIPQITRNHSGLYACSVHNSATGKEISKSMTVKVSGPCHGDLTESQS

SEQ ID NO: 113896 - DNA, 1002 bp, Artificial Sequence
  derived and/or modified sequence
atgggacctttgcccgcccccagctgcacccagcgcattacgtggaagggactactgctgaccgcaagcctgctcaacttttggaacccacctacgactgctgaagtgacaatcgaggcacaacctccgaaggtgtccgaaggcaaagatgtgcttctgttggttcacaatctcccccagaacctccccggatacttttggtacaaaggcgaaatgactgatctatatcattacataattagctacatagtggacggcaaaataattatctacggtccagcttattccggtagagaaactgtttactcaaatgcctcacttttgatccagaacgtgacacgcaaggacgcgggcacttacacactgcacatcatcaaacgcggcgacgagactagagaggagatcaggcactttactttcacattgtatagcaagctccctataccttatataaccattaacaatctcaaccccagagagaacaaggacgtcctggctttcacatgcgaacccaagtctgaaaattacacatatatttggtggttgaacggccagagccttcctgtatcacctggcgttaagagacccatagaaaaccggatcctgattctcccaagtgttacccgcaacgagacaggtccctatcaatgtgagattagggaccggtacggagggctgcggtcaaatccagtgatcttaaatgtactgtacggacccgacctccctaggatttatccatctttcacatattataggtcgggagagaatttggatttgtcctgctttaccgaaagcaaccctcccgccgagtacttttggacaatcaacggcaagttccaacagtcaggacagaaactttttattcctcaaattactcgtaaccacagtggcctgtacgcctgtagcgtgcacaacagcgcgaccggcaaggaaatttctaagagtatgaccgtgaaagtctccggaccctgccacggggatctcacagagtcccagtcttag

SEQ ID NO: 113897 - DNA, 1002 bp, Artificial Sequence
  derived and/or modified sequence
atgggccccctgcctgcccccagctgcacccagaggatcacctggaagggcctgctgctgacagccagcctgctgaacttctggaacccccccaccacagctgaggtgaccatcgaggcccagccccccaaggtgtctgagggcaaggatgtgctgctgctggtgcacaacctgccccagaacctgcccggctacttctggtacaagggggagatgacagacctgtaccactacatcatctcctacatcgtggatggcaagatcatcatctacggccctgcctacagcggccgggagaccgtgtacagcaatgccagcctgctgatccagaatgtgaccaggaaggatgctggcacctacaccctgcacatcatcaagagaggagatgagacccgggaggagatccgccacttcaccttcaccctgtacagcaagctgcccatcccctacatcaccatcaacaacctgaacccccgggagaacaaggatgtgctggccttcacctgtgagcccaagtctgagaactacacctacatctggtggctgaatggccagagcctgcctgtgtccccaggagtgaagaggcccatcgagaaccgcatcctgatcctgcccagcgtgaccagaaatgagaccggcccctaccagtgtgagatccgggacagatatggaggcctgcggagcaaccctgtgatcctgaatgtgctgtatggccctgacctgccccgcatctaccccagcttcacctactacagaagtggagagaacctggacctgagctgcttcacagagagcaaccccccagctgagtacttctggaccatcaacgggaagttccagcagagcggccagaagctgttcatcccccagatcaccaggaaccacagcggcctgtatgcctgcagcgtgcacaacagcgccaccgggaaggagatcagcaagtccatgacagtgaaggtgtctggcccctgccacggggacctgacagagagccagagctag

SEQ ID NO: 113898 - DNA, 1002 bp, Artificial Sequence
  derived and/or modified sequence
atgggccccctgcccgcccccagctgcacccagcggatcacctggaaggggctcctactgaccgcatctttgcttaacttttggaacccacctacgactgctgaagtcaccatcgaagcccagccccccaaagtgagcgaaggaaaagatgtactgttgctagttcacaaccttccccaaaacctgcccggatatttctggtacaagggtgagatgaccgatctgtaccactatatcatctcatacattgttgatggcaaaattatcatttacgggccggcatattccgggcgggagaccgtctactccaacgcctctttgctgattcagaacgtgacacggaaggatgctggtacgtatacgctgcacattatcaagcgaggcgacgagacccgcgaggagatccgccactttacctttactctgtactcaaagcttccaatcccgtatataaccataaacaacctgaaccccagggagaataaggatgtgttagctttcacgtgcgaacccaagagcgaaaattacacatacatttggtggcttaatggccagtcgttacctgtgagcccgggtgtcaagaggcctatcgaaaaccgtatcttgatacttccgagcgtgaccagaaacgagaccggaccttaccagtgcgagattcgggatcggtacggcggactgagatccaatccagtgatcctgaacgttttatatggacccgatctgccccggatttacccatccttcacgtattacaggtccggagagaatcttgatttgtcatgtttcacggagtctaatcctcctgccgaatatttctggacaatcaacggaaaattccagcaatctggccagaagctgttcataccacagatcacccgaaaccattcaggcctttatgcctgctccgtacacaattccgcgacagggaaggagatcagcaaaagtatgacggttaaagtgagtgggccttgccacggcgacttgacagaatcacagtcgtag

SEQ ID NO: 113899 - DNA, 1398 bp, Artificial Sequence
  derived and/or modified sequence
agaaggaggaaggacagcacagctgacagccgtgctcagacagcttctggatcccaggctcatctccacagaggagaacacacaggcagcagagaccatggggcccctcccagccccttcctgcacacagcgcatcacctggaaggggctcctgctcacagcatcacttttaaacttctggaacccgcccaccactgccgaagtcacgattgaagcccagccacccaaagtttctgaggggaaggatgttcttctacttgtccacaatttgccccagaatcttcctggctacttctggtacaaaggggaaatgacggacctctaccattacattatatcgtatatagttgatggtaaaataattatatatgggcctgcatacagtggaagagaaacagtatattccaacgcatccctgctgatccagaatgtcacccggaaggatgcaggaacctacaccttacacatcataaagcgaggtgatgagactagagaagaaattcgacatttcaccttcaccttatactcgaagctgcccatcccctacatcaccatcaacaacttaaaccccagggagaataaggatgtcttagccttcacctgtgaacctaagagtgagaactacacctacatttggtggctaaacggtcagagcctccccgtcagtcccggggtaaagcgacccattgaaaacaggatactcattctacccagtgtcacgagaaatgaaacaggaccctatcaatgtgaaatacgggaccgatatggtggcctccgcagtaacccagtcatcctaaatgtcctctatggtccagacctccccagaatttacccttcattcacctattaccgttcaggagaaaacctcgacttgtcctgcttcacggaatctaacccaccggcagagtatttttggacaattaatgggaagtttcagcaatcaggacaaaagctctttatcccccaaattactagaaatcatagcgggctctatgcttgctctgttcataactcagccactggcaaggaaatctccaaatccatgacagtcaaagtctctggtccctgccatggagacctgacagagtctcagtcatgactgcaacaactgagacactgagaaaaagaacaggctgataccttcatgaaattcaagacaaagaagaaaaaaactcaatgttattggactaaataatcaaaaggataatgttttcataattttttattggaaaatgtgctgattctttgaatgttttattctccagatttatgaactttttttcttcagcaattggtaaagtatacttttgtaaacaaaaattgaaatatttgcttttgctgtctatctgaatgccccagaattgtgaaactattcatgagtattcataggtttatggt

SEQ ID NO: 113900 - DNA, 1002 bp, Artificial Sequence
  derived and/or modified sequence
atgggaccactgcctgctccctcgtgcacccagcgcatcacctggaagggcctgttactaaccgcctccttattgaacttctggaatcccccaactaccgctgaggtaacaatcgaggcccagccgccaaaagttagcgaaggcaaggacgtgctgctgctagtacacaacctgccccaaaatctgccgggttacttttggtataagggagagatgaccgatttgtaccattacatcattagctatattgttgacggtaagatcatcatctatggcccagcctactcagggagggagacggtctactccaacgcttcgctgctgatccaaaacgtaacccgtaaggatgcaggtacctatacgcttcatattattaagcggggtgatgaaacgagggaggaaattcgacacttcaccttcacactgtattctaagctgcctatcccctacattacaataaacaacctgaaccctcgagagaacaaggacgtgctggcattcacgtgtgagcccaagagtgaaaattatacctatatctggtggctcaatggccagtccctaccagtgtcccccggagtgaagcgtcccattgaaaaccgaatcctgatccttccgtctgttactcgcaatgagacaggcccatatcagtgcgaaatccgggatcgatacgggggactgagatctaacccagttatcctcaatgttttatatgggccagacctgcctaggatctaccctagcttcacgtattaccgtagcggcgagaatctggacctatcatgttttactgaaagcaatccacctgccgagtatttctggacaattaatggcaagtttcaacagtccggtcagaagctttttattcctcaaattacacggaaccattctggactgtacgcatgtagcgttcataactctgctaccggcaaagaaatttcaaaatcaatgacggtcaaggtttctgggccttgtcacggtgaccttacggagtcccaaagttag

SEQ ID NO: 113901 - DNA, 1002 bp, Artificial Sequence
  derived and/or modified sequence
atgggcccactcccagcaccatcctgcacccagaggatcacatggaaaggcctcctcctcacggcctcactgctaaatttctggaacccacccaccaccgctgaggttactattgaagctcagcctcccaaagtgtcagaggggaaagacgtgctgctactggtccataatctcccacagaaccttccagggtacttctggtacaaaggcgaaatgacggatctttatcactatatcatcagctacatcgtcgatgggaaaataatcatctatggccctgcgtacagcggtagagaaacagtttactctaacgcttcacttctgatccagaatgttactaggaaagatgccggcacttatacattgcatattatcaaacgaggcgacgagacccgggaagaaatccgccattttacattcactctgtactcaaagcttcccatcccctacataacaatcaacaacctaaaccccagggaaaacaaagacgtactggcctttacatgtgagcctaagagcgaaaactacacatatatctggtggctcaacggccagtccctgccggtgtccccaggcgtgaaaaggcctattgaaaatagaattcttatcctcccctccgtgacccgcaatgagacagggccctatcaatgcgaaattagggacaggtatggcggcctgagatccaaccctgtcatactcaacgtgctatatgggcctgacctgccgagaatatatccttcgtttacatattacagatcgggcgaaaatctggacctgagctgcttcacagagagcaaccctccggctgaatatttctggactatcaatgggaaattccagcagtctgggcagaaattattcattccacaaattacaagaaatcatagtggactctacgcttgttcggtgcataacagtgccaccggtaaagaaatctctaagagcatgaccgtgaaggtgtcaggaccctgtcacggagaccttacagaatctcagagctag

SEQ ID NO: 113902 - DNA, 1002 bp, Artificial Sequence
  derived and/or modified sequence
atgggcccactgcctgctcctagttgtactcagcgcatcacatggaaagggcttctcttaactgcatcactcctgaacttctggaatcccccaaccacagcagaggtgaccatcgaagcacagccccctaaagtttcagaaggcaaagatgttttattgctggtgcataacctaccccagaacttaccggggtatttttggtataaaggagaaatgactgatctttaccactacattatttcctatattgtcgacggcaaaattattatttatggacctgcctattccgggagggaaacggtgtacagtaatgctagccttctgatccagaatgtgacccgaaaagatgctgggacctacaccttgcatattattaaaagaggagatgaaacccgagaagagatccgtcactttaccttcactttgtatagcaaactccctatcccttatatcacaatcaacaacctaaatcctcgcgaaaataaggatgtgttagccttcacctgtgaacccaagtccgagaactacacttatatctggtggctgaacggccagtccctacctgttagcccaggagtgaagagacccattgagaatcggattctcatattaccctccgttacaaggaacgaaactggcccctaccaatgcgagattcgagatcggtatggcggactgcgcagcaacccagtcatcctgaatgtcctgtacgggcctgacttaccgcgcatctacccgtcatttacctactatagatccggcgaaaatctagatctgagttgtttcaccgagtccaacccacctgctgaatatttctggacaatcaacgggaaatttcaacaatccggtcagaagctttttataccacagattactcgaaatcatagtggcctttacgcctgtagtgtccacaattcagcaacagggaaggagatcagtaagagcatgacagtaaaagtgagtggcccgtgtcatggagacttgaccgagagtcagagttag

SEQ ID NO: 113903 - DNA, 1002 bp, Artificial Sequence
  derived and/or modified sequence
atgggccccctgcccgcccccagctgcacccagagaatcacctggaagggcctgctgctgaccgccagcctgctgaacttctggaacccccccaccaccgccgaggtgaccatcgaggcccagccccccaaggtgagcgagggcaaggacgtgctgctgctggtgcacaacctgccccagaacctgcccggctacttctggtacaagggcgagatgaccgacctgtaccactacatcatcagctacatcgtggacggcaagatcatcatctacggccccgcctacagcggcagagagaccgtgtacagcaacgccagcctgctgatccagaacgtgaccagaaaggacgccggcacctacaccctgcacatcatcaagagaggcgacgagaccagagaggagatcagacacttcaccttcaccctgtacagcaagctgcccatcccctacatcaccatcaacaacctgaaccccagagagaacaaggacgtgctggccttcacctgcgagcccaagagcgagaactacacctacatctggtggctgaacggccagagcctgcccgtgagccccggcgtgaagagacccatcgagaacagaatcctgatcctgcccagcgtgaccagaaacgagaccggcccctaccagtgcgagatcagagacagatacggcggcctgagaagcaaccccgtgatcctgaacgtgctgtacggccccgacctgcccagaatctaccccagcttcacctactacagaagcggcgagaacctggacctgagctgcttcaccgagagcaacccccccgccgagtacttctggaccatcaacggcaagttccagcagagcggccagaagctgttcatcccccagatcaccagaaaccacagcggcctgtacgcctgcagcgtgcacaacagcgccaccggcaaggagatcagcaagagcatgaccgtgaaggtgagcggcccctgccacggcgacctgaccgagagccagagctag

SEQ ID NO: 113904 - protein, 240 aa, Artificial Sequence
  derived and/or modified sequence
MGPLPAPSCTQRITWKGLLLTASLLNFWNPPTTAEVTIEAQPPKVSEGKDVLLLVHNLPQNLPGYFWYKGEMTDLYHYIISYIVDGKIIIYGPAYSGRETVYSNASLLIQNVTRKDAGTYTLHIIKRGDETREEIRHFTFTLYYGPDLPRIYPSFTYYRSGENLDLSCFTESNPPAEYFWTINGKFQQSGQKLFIPQITRNHSGLYACSVHNSATGKEISKSMTVKVSGPCHGDLTESQS

SEQ ID NO: 113905 - DNA, 723 bp, Artificial Sequence
  derived and/or modified sequence
atggggcccctgcctgctccatcttgtacacagcgaattacttggaaaggtctgctcctgactgctagtctcttgaatttctggaacccccctactacagcagaagtcactatagaggcacagccacccaaagtttcagaaggaaaagacgtattgctgctcgtgcacaatttgccgcaaaatttgcccggctacttctggtacaagggagagatgacagatctctaccattacattatttcttatatcgttgatggaaaaatcatcatatatggaccagcctatagtggaagggaaacagtgtactcaaacgccagcctgctgatacagaacgttacccgtaaagacgccggaacgtataccctgcacatcatcaaaaggggggacgagaccagagaagagatcagacacttcaccttcaccctatattacgggcccgatctccctcggatttacccttccttcacgtactataggagcggggaaaatttggatctatcctgtttcaccgagtctaacccccccgccgagtacttctggacgattaatggcaagtttcagcagtctggccagaaactctttattccacagatcacccggaaccactccggactgtacgcatgtagcgttcacaactctgccaccgggaaagagatttccaagtctatgacggtcaaagtctctggtccatgccacggggacctgacagagtcacagagctag

SEQ ID NO: 113906 - DNA, 723 bp, Artificial Sequence
  derived and/or modified sequence
atgggccccctgcctgcccccagctgcacccagaggatcacctggaagggcctgctgctgacagccagcctgctgaacttctggaacccccccaccacagctgaggtgaccatcgaggcccagccccccaaggtgtctgagggcaaggatgtgctgctgctggtgcacaacctgccccagaacctgcccggctacttctggtacaagggggagatgacagacctgtaccactacatcatctcctacatcgtggatggcaagatcatcatctacggccctgcctacagcggccgggagaccgtgtacagcaatgccagcctgctgatccagaatgtgaccaggaaggatgctggcacctacaccctgcacatcatcaagagaggagatgagacccgggaggagatccgccacttcaccttcaccctgtactacggccctgacctgccccgcatctaccccagcttcacctactaccgcagcggggagaacctggacctgagctgcttcacagagagcaaccccccagctgagtacttctggaccatcaatggcaagttccagcagagcggccagaagctgttcatcccccagatcaccaggaaccacagcggcctgtatgcctgcagcgtgcacaacagcgccaccgggaaggagatcagcaagtccatgacagtgaaggtgtctggcccctgccacggggacctgacagagagccagagctag

SEQ ID NO: 113907 - DNA, 723 bp, Artificial Sequence
  derived and/or modified sequence
atgggccccctgcccgcccccagctgcacccagcggatcacctggaagggcctattactgaccgctagccttctgaacttctggaatccaccaacaacagctgaggtgaccattgaagctcaaccacccaaagtgagcgagggaaaagacgtcctcctcctggtacacaatctgccacagaatctgcctggttatttttggtataaaggtgagatgaccgacctttatcattatatcataagttacatcgttgatggcaaaattattatctacggccccgcctattccggaagggagactgtgtactcgaacgcatcactacttatccagaatgttacgagaaaagacgctggcacgtacacactacatatcatcaagaggggggatgagacgcgagaagaaatccggcatttcacattcactctgtattatgggccagacctgcccaggatttatccctccttcacctactaccgttcaggggagaatttggacctcagctgttttacagaatcaaatcccccagctgagtatttttggacgatcaacggcaaattccagcagtctgggcagaagttattcatacctcagatcacaaggaaccactccggcctgtacgcttgcagcgtacacaattccgccaccgggaaagagatatcaaagagcatgacggtcaaagtctcaggtccatgccacggggatctaactgagtcacagtcgtag

SEQ ID NO: 113908 - DNA, 1148 bp, Artificial Sequence
  derived and/or modified sequence
acagaaggaggaaggacagcacagctgacagccgtgctcagacagcttctggatcccaggctcatctccacagaggagaacacacaggcagcagagaccatggggcccctcccagccccttcctgcacacagcgcatcacctggaaggggctcctgctcacagcatcacttttaaacttctggaacccgcccaccactgccgaagtcacgattgaagcccagccacccaaagtttctgaggggaaggatgttcttctacttgtccacaatttgccccagaatcttcctggctacttctggtacaaaggggaaatgacggacctctaccattacattatatcgtatatagttgatggtaaaataattatatatgggcctgcatacagtggaagagaaacagtatattccaacgcatccctgctgatccagaatgtcacccggaaggatgcaggaacctacaccttacacatcataaagcgaggtgatgagactagagaagaaattcgacatttcaccttcaccttatactatggtccagacctccccagaatttacccttcattcacctattaccgttcaggagaaaacctcgacttgtcctgcttcacggaatctaacccaccggcagagtatttttggacaattaatgggaagtttcagcaatcaggacaaaagctctttatcccccaaattactagaaatcatagcgggctctatgcttgctctgttcataactcagccactggcaaggaaatctccaaatccatgacagtcaaagtctctggtccctgccatggagacctgacagagtctcagtcatgactgcaacaactgagacactgagaaaaagaacaggctgataccttcatgaaattcaagacaaagaagaaaaaaactcaatgttattggactaaataatcaaaaggataatgttttcataattttttattggaaaatgtgctgattctttgaatgttttattctccagatttatgaactttttttcttcagcaattggtaaagtatacttttgtaaacaaaaattgaaatatttgcttttgctgtctatctgaatgccccagaattgtgaaactattcatgagtattcataggtttatggtaataaagttatttgcacatgttccgta

SEQ ID NO: 113909 - DNA, 723 bp, Artificial Sequence
  derived and/or modified sequence
atgggccctctcccggcaccgagttgtactcaacgcatcacctggaaaggcctgctgctgacagcctctttgcttaacttctggaatcctccaaccacagccgaggtgacaatagaggctcagccacctaaagtgtcggagggcaaagatgtcctgttgctggtccataatctgccccagaacctccccggttatttctggtataaaggggagatgaccgatttgtaccactatattatttcatacattgtcgatggtaagattatcatttatggcccagcatatagcggcagggagacggtctactctaatgcgtcactgcttatccagaatgtcactcggaaagacgccggtacctatactcttcatatcataaagagaggagacgaaacgcgcgaggagatccggcatttcactttcactctttactacggaccagatctccctcgcatctacccaagctttacatactacagatcgggcgaaaacctggatttgtcctgtttcactgaaagtaatcctcctgcggaatacttttggaccatcaacggcaagtttcagcagtcagggcagaagctctttatacctcaaattaccagaaaccattccgggctgtacgcttgcagcgttcacaattctgccacagggaaggagatttccaaatccatgaccgtaaaggtgagcggcccttgccacggggacctaacggagagtcagagttag

SEQ ID NO: 113910 - DNA, 723 bp, Artificial Sequence
  derived and/or modified sequence
atgggacccctgccagccccctcctgcacacaaagaataacctggaaaggcctgctcctgactgcaagcttacttaacttttggaatccccccacaactgccgaggtcaccatcgaagcccagcctcccaaggtgtccgaggggaaagacgtactgttgctagtccacaacctccctcagaatctgcctggctacttctggtacaagggcgaaatgaccgatctgtaccactacattatttcctatatcgttgacggcaagatcataatttatggcccagcctactccgggagggagacagtttacagcaacgcctccctcttaatccaaaacgtgaccagaaaggacgcaggcacatatacccttcacattataaaacgtggcgatgagacacgcgaggagatcaggcacttcacttttaccctgtattacggcccagatctgccgagaatctatccaagttttacatactatcggagcggagagaaccttgacctgtcctgtttcacagaatcaaaccctcccgcagagtacttttggacgattaatggcaagtttcagcagtctggacagaaactttttatcccacagataacaagaaaccattctggtctgtacgcctgctccgtacataattctgccactggaaaggaaataagcaaatcaatgactgttaaagtgtccggtccctgccacggagacctaacggagtcacaatcatag

SEQ ID NO: 113911 - DNA, 723 bp, Artificial Sequence
  derived and/or modified sequence
atgggacctctgcctgccccctcttgtacccagcgaatcacatggaaaggcctgctgttaaccgccagcctgctcaacttctggaatccccccacaacagcggaggttactatcgaagcacaaccgccaaaggtgtcggaagggaaggacgttcttttgctagtacacaatctgccccagaatctcccaggatatttttggtataaaggcgaaatgaccgatctctaccattatattatatcttatatcgtagatggaaagattattatatacgggcctgcctattcagggcgcgaaactgtgtattccaatgccagtctcctgattcagaacgtgactagaaaagacgccggtacctacacattacatatcattaagagaggggatgagacaagagaagagataagacattttactttcacgctgtactacggtcccgacctcccgagaatttaccctagcttcacttactatcggagtggcgaaaacctagacctgagctgcttcaccgagagcaatcctcctgccgaatacttctggaccatcaatgggaagttccaacagtctggacaaaaattatttattccccagatcactagaaaccattctggactatatgcctgcagcgtccacaattcagcaaccggcaaagaaatatccaagagcatgacagttaaggtgtctggaccatgccacggagatttaacagaatctcagtcttag

SEQ ID NO: 113912 - DNA, 723 bp, Artificial Sequence
  derived and/or modified sequence
atgggccccctgcccgcccccagctgcacccagagaatcacctggaagggcctgctgctgaccgccagcctgctgaacttctggaacccccccaccaccgccgaggtgaccatcgaggcccagccccccaaggtgagcgagggcaaggacgtgctgctgctggtgcacaacctgccccagaacctgcccggctacttctggtacaagggcgagatgaccgacctgtaccactacatcatcagctacatcgtggacggcaagatcatcatctacggccccgcctacagcggcagagagaccgtgtacagcaacgccagcctgctgatccagaacgtgaccagaaaggacgccggcacctacaccctgcacatcatcaagagaggcgacgagaccagagaggagatcagacacttcaccttcaccctgtactacggccccgacctgcccagaatctaccccagcttcacctactacagaagcggcgagaacctggacctgagctgcttcaccgagagcaacccccccgccgagtacttctggaccatcaacggcaagttccagcagagcggccagaagctgttcatcccccagatcaccagaaaccacagcggcctgtacgcctgcagcgtgcacaacagcgccaccggcaaggagatcagcaagagcatgaccgtgaaggtgagcggcccctgccacggcgacctgaccgagagccagagctag

SEQ ID NO: 113913 - protein, 1055 aa, Artificial Sequence
  derived and/or modified sequence
MKSRFSTIDLRAVLAELNASLLGMRVNNVYDVDNKTYLIRLQKPDFKATLLLESGIRIHTTEFEWPKNMMPSSFAMKCRKHLKSRRLVSAKQLGVDRIVDFQFGSDEAAYHLIIELYDRGNIVLTDYEYVILNILRFRTDEADDVKFAVRERYPLDHARAAEPLLTLERLTEIVASAPKGELLKRVLNPLLPYGPALIEHCLLENGFSGNVKVDEKLETKDIEKVLVSLQKAEDYMKTTSNFSGKGYIIQKREIKPSLEADKPVEDILTYEEFHPFLFSQHSQCPYIEFESFDKAVDEFYSKIEGQKIDLKALQQEKQALKKLDNVRKDHENRLEALQQAQEIDKLKGELIEMNLQIVDRAIQVVRSALANQIDWTEIGLIVKEAQAQGDPVASAIKELKLQTNHVTMLLRNPYLLSEEEDDDVDGDVNVEKNETEPPKGKKKKQKNKQLQKPQKNKPLLVDVDLSLSAYANAKKYYDHKRYAAKKTQKTVEAAEKAFKSAEKKTKQTLKEVQTVTSIQKARKVYWFEKFLWFISSENYLIIGGRDQQQNEIIVKRYLTPGEPIPPRTLTEAGTMALCYSAAWDARVITSAWWVYHHQVSKTAPTGEYLTTGSFMIRGKKNFLPPSYLMMGFSFLFKVDESCVWRHQGERKVRVQDEDMETLASCTSELISEEMEQLDGGDTSSDEDKEEHETPVEVELMTQVDQEDITLQSGRDELNEELIQEESSEDEGEYEEVRKDQDSVGEMKDEGEETLNYPDTTIDLSHLQPQRSIQKLASKEESSNSSDSKSQSRRHLSAKERREMKKKKLPSDSGDLEALEGKDKEKESTVHIETHQNTSKNVAAVQPMKRGQKSKMKKMKEKYKDQDEEDRELIMKLLGSAGSNKEEKGKKGKKGKTKDEPVKKQPQKPRGGQRVSDNIKKETPFLEVITHELQDFAVDDPHDDKEEQDLDQQGNEENLFDSLTGQPHPEDVLLFAIPICAPYTTMTNYKYKVKLTPGVQKKGKAAKTALNSFMHSKEATAREKDLFRSVKDTDLSRNIPGKVKVSAPNLLNVKRK

SEQ ID NO: 113914 - DNA, 3168 bp, Artificial Sequence
  derived and/or modified sequence
atgaagagcagattcagcaccatcgacctgagagccgtgctggccgagctgaacgccagcctgctgggcatgagagtgaacaacgtgtacgacgtggacaacaagacctacctgatcagactgcagaagcccgacttcaaggccaccctgctgctggagagcggcatcagaatccacaccaccgagttcgagtggcccaagaacatgatgcccagcagcttcgccatgaagtgcagaaagcacctgaagagcagaagactggtgagcgccaagcagctgggcgtggacagaatcgtggacttccagttcggcagcgacgaggccgcctaccacctgatcatcgagctgtacgacagaggcaacatcgtgctgaccgactacgagtacgtgatcctgaacatcctgagattcagaaccgacgaggccgacgacgtgaagttcgccgtgagagagagataccccctggaccacgccagagccgccgagcccctgctgaccctggagagactgaccgagatcgtggccagcgcccccaagggcgagctgctgaagagagtgctgaaccccctgctgccctacggccccgccctgatcgagcactgcctgctggagaacggcttcagcggcaacgtgaaggtggacgagaagctggagaccaaggacatcgagaaggtgctggtgagcctgcagaaggccgaggactacatgaagaccaccagcaacttcagcggcaagggctacatcatccagaagagagagatcaagcccagcctggaggccgacaagcccgtggaggacatcctgacctacgaggagttccaccccttcctgttcagccagcacagccagtgcccctacatcgagttcgagagcttcgacaaggccgtggacgagttctacagcaagatcgagggccagaagatcgacctgaaggccctgcagcaggagaagcaggccctgaagaagctggacaacgtgagaaaggaccacgagaacagactggaggccctgcagcaggcccaggagatcgacaagctgaagggcgagctgatcgagatgaacctgcagatcgtggacagagccatccaggtggtgagaagcgccctggccaaccagatcgactggaccgagatcggcctgatcgtgaaggaggcccaggcccagggcgaccccgtggccagcgccatcaaggagctgaagctgcagaccaaccacgtgaccatgctgctgagaaacccctacctgctgagcgaggaggaggacgacgacgtggacggcgacgtgaacgtggagaagaacgagaccgagccccccaagggcaagaagaagaagcagaagaacaagcagctgcagaagccccagaagaacaagcccctgctggtggacgtggacctgagcctgagcgcctacgccaacgccaagaagtactacgaccacaagagatacgccgccaagaagacccagaagaccgtggaggccgccgagaaggccttcaagagcgccgagaagaagaccaagcagaccctgaaggaggtgcagaccgtgaccagcatccagaaggccagaaaggtgtactggttcgagaagttcctgtggttcatcagcagcgagaactacctgatcatcggcggcagagaccagcagcagaacgagatcatcgtgaagagatacctgacccccggcgagcccatcccccccagaaccctgaccgaggccggcaccatggccctgtgctacagcgccgcctgggacgccagagtgatcaccagcgcctggtgggtgtaccaccaccaggtgagcaagaccgcccccaccggcgagtacctgaccaccggcagcttcatgatcagaggcaagaagaacttcctgccccccagctacctgatgatgggcttcagcttcctgttcaaggtggacgagagctgcgtgtggagacaccagggcgagagaaaggtgagagtgcaggacgaggacatggagaccctggccagctgcaccagcgagctgatcagcgaggagatggagcagctggacggcggcgacaccagcagcgacgaggacaaggaggagcacgagacccccgtggaggtggagctgatgacccaggtggaccaggaggacatcaccctgcagagcggcagagacgagctgaacgaggagctgatccaggaggagagcagcgaggacgagggcgagtacgaggaggtgagaaaggaccaggacagcgtgggcgagatgaaggacgagggcgaggagaccctgaactaccccgacaccaccatcgacctgagccacctgcagccccagagaagcatccagaagctggccagcaaggaggagagcagcaacagcagcgacagcaagagccagagcagaagacacctgagcgccaaggagagaagagagatgaagaagaagaagctgcccagcgacagcggcgacctggaggccctggagggcaaggacaaggagaaggagagcaccgtgcacatcgagacccaccagaacaccagcaagaacgtggccgccgtgcagcccatgaagagaggccagaagagcaagatgaagaagatgaaggagaagtacaaggaccaggacgaggaggacagagagctgatcatgaagctgctgggcagcgccggcagcaacaaggaggagaagggcaagaagggcaagaagggcaagaccaaggacgagcccgtgaagaagcagccccagaagcccagaggcggccagagagtgagcgacaacatcaagaaggagacccccttcctggaggtgatcacccacgagctgcaggacttcgccgtggacgacccccacgacgacaaggaggagcaggacctggaccagcagggcaacgaggagaacctgttcgacagcctgaccggccagccccaccccgaggacgtgctgctgttcgccatccccatctgcgccccctacaccaccatgaccaactacaagtacaaggtgaagctgacccccggcgtgcagaagaagggcaaggccgccaagaccgccctgaacagcttcatgcacagcaaggaggccaccgccagagagaaggacctgttcagaagcgtgaaggacaccgacctgagcagaaacatccccggcaaggtgaaggtgagcgcccccaacctgctgaacgtgaagagaaagtag

SEQ ID NO: 113915 - DNA, 3168 bp, Artificial Sequence
  derived and/or modified sequence
atgaaaagtaggtttagtactatcgacctccgggccgtgctggcagagctgaatgcctccctgcttggcatgagggttaataacgtgtatgacgtcgataacaaaacatacctcatccgactgcagaagccggactttaaagctaccttgctgctggagtctggaattcgcattcacactactgaattcgagtggcctaagaacatgatgccgtcatccttcgcaatgaagtgccgcaaacatcttaagtcccggaggttagtcagcgctaagcaactaggcgtcgacaggatcgtggattttcagttcggctcggatgaggctgcttaccacctgattattgaactgtacgaccgaggcaacatcgtcctcacagattacgaatatgtgatattaaacattctgcgattcaggaccgacgaggcagatgatgtcaagttcgccgtccgggagcgctacccccttgaccatgctcgagccgccgagccactgttgaccttagaacggctgactgagattgtggcttcagctcctaagggcgagctgcttaagagagttctcaacccgctactgccttacgggcctgcccttatcgagcactgccttttggaaaacggattctccgggaacgtgaaagtagatgagaagcttgagacgaaagatatagaaaaggttctcgttagccttcagaaagcagaggactacatgaagactacatctaatttctccggaaagggctatatcatccaaaagcgtgaaataaagccaagcctggaagccgacaaaccggtcgaagacattctgacatacgaagagtttcacccctttttgttcagccaacacagccagtgcccgtacatcgaattcgagagctttgataaggccgtggacgaattttacagtaaaatcgaagggcagaaaattgacttaaaggccttacagcaggaaaaacaggccttgaaaaagctggacaatgtgcgcaaagatcatgaaaacaggttggaagccctgcagcaggctcaagaaattgataaactcaaaggtgaacttatcgaaatgaatctgcagattgtggacagagcaatacaggtggttcggtctgctcttgccaaccagatcgactggacagaaatcggattaatcgtgaaggaggcccaggcccagggggatcccgtggctagcgcgatcaaagaactcaagctccaaaccaatcacgtcacaatgttgctgcgcaacccctacctattatctgaagaagaggacgacgacgttgacggggatgtgaacgtggagaaaaatgaaacggaacctcctaaaggaaaaaaaaaaaagcagaaaaataaacagcttcagaagccccagaagaataaacccctgctcgtggacgtggatctgagcctgagtgcatacgccaacgctaagaagtactacgatcataagcgctatgctgccaagaaaacacaaaaaacagtggaagctgctgaaaaagcattcaagagcgcagagaagaaaactaagcagacactgaaggaggtgcagacagtgacgtcaatccagaaggctaggaaggtttactggttcgaaaaattcttgtggtttatcagctctgaaaactatctgattatcggcggcagagaccagcaacaaaatgaaatcattgtcaagcgctacctcacccccggcgagcccatccccccccggacactcactgaagccgggaccatggcattgtgttacagtgccgcgtgggatgctcgggtgatcacaagtgcctggtgggtgtaccatcaccaagttagtaagacagcacccaccggcgagtatcttacaaccgggtcttttatgatcagaggtaagaagaatttcttgcctccttcctacctgatgatgggattttccttcctgtttaaagtggacgagagctgtgtgtggcggcatcagggcgaacgcaaggtgagagtgcaagatgaggatatggaaacgctagctagttgcacgtccgaactaatctcagaggagatggaacaattggatggcggggatacaagtagcgatgaagataaggaagaacacgaaacccccgtcgaggtcgagctgatgacgcaagttgaccaggaagatattactttgcagtccggacgagacgagctgaacgaagagctgatacaggaggaatcttctgaggatgagggggagtacgaggaagttagaaaagatcaagattccgttggggaaatgaaagacgagggcgaagagacgttaaattatccagatactacgatagacctttcccaccttcagccacagcggtccatacaaaaactggcttccaaggaagagtcttccaatagttcagattccaagagccaaagccggagacacctctcagcaaaggagaggagggaaatgaaaaaaaaaaagctaccctcagactctggagacctggaggcactggagggcaaggacaaagagaaagagagcacggtgcacatagagacccaccaaaacacaagtaaaaatgtggctgccgttcaaccaatgaagagaggtcagaaatctaaaatgaaaaaaatgaaggaaaagtataaggaccaagatgaggaagaccgcgaacttatcatgaagctcctgggcagtgccggatcaaacaaagaagaaaaagggaaaaaagggaaaaagggaaagaccaaggacgagccagttaagaagcagccacagaagccccggggtggccaacgggtgtcagataatattaaaaaggagactccgttcttggaagtaattacacacgagttgcaggattttgcagtggacgacccacacgatgacaaggaggagcaggacctggaccagcaaggcaatgaggaaaatttatttgatagcttgacaggccagccccaccctgaagacgtgctgcttttcgcgattcccatatgtgcgccctacaccacaatgaccaattacaaatacaaggtcaagctgactccaggcgtgcaaaagaagggaaaggccgcaaagacggccctcaattctttcatgcatagcaaagaagctactgcccgggagaaagatctgtttagatcggttaaagacactgatctgtcacgaaacatcccgggtaaagtgaaggtgtcagccccaaaccttttgaatgtgaagagaaaatag

SEQ ID NO: 113916 - DNA, 3168 bp, Artificial Sequence
  derived and/or modified sequence
atgaagagccgcttcagcaccatcgacctgcgggctgtgctggccgagctgaatgccagcctgctgggcatgagggtgaacaacgtgtatgatgtggacaacaagacctacctgatccggctgcagaagccagacttcaaggccaccctgctgctggagagcggcatccgcatccacaccacagaatttgagtggcccaagaacatgatgcccagcagctttgccatgaagtgcaggaagcacctgaagagccggcggctggtgtctgccaagcagctgggcgtggaccgcatcgtggacttccagtttggaagtgatgaggccgcctaccacctgatcatcgagctgtatgaccggggcaacatcgtgctgacagattatgaatatgtgatcctgaacatcctgcgcttcagaacagatgaagcagatgatgtgaagtttgctgtgcgggagcgctaccccctggaccacgcccgggctgctgagcccctgctgaccctggagcggctgacagaaattgtggccagcgcccccaagggggagctgctgaagagggtgctgaaccccctgctgccctacggccctgccctgattgagcactgcctgctggagaatggcttctctggaaatgtgaaggtggatgagaagctggagaccaaggacatcgagaaggtgctggtgtccctgcagaaggccgaggactacatgaagaccaccagcaacttcagcggcaagggctacatcatccagaagcgggagatcaagcccagcctggaggccgacaagcctgtggaggacatcctgacctatgaggagttccaccccttcctgttcagccagcacagccagtgcccctacattgaatttgagagctttgacaaggctgtggatgagttctacagcaagattgagggccagaagattgacctgaaggccctgcagcaggagaagcaggccctgaagaagctggacaacgtgaggaaggaccatgaaaatcggctggaggccctgcagcaggcccaggagattgacaagctgaagggggagctgattgagatgaacctgcagatcgtggaccgggccatccaggtggtgcgcagcgccctggccaaccagattgactggacagagatcggcctgattgtgaaggaggcccaggcccagggcgaccctgtggccagcgccatcaaggagctgaagctgcagaccaaccacgtgaccatgctgctgaggaacccctacctgctgtctgaggaggaggatgatgatgtggatggagatgtgaatgtggagaagaatgaaacagagccccccaagggcaagaagaagaagcagaagaacaagcagctgcagaagccccagaagaacaagcccctgctggtggatgtggacctgagcctgagcgcctatgccaatgccaagaagtactatgaccacaagagatatgctgccaagaagacccagaagacagtggaggccgctgagaaggccttcaagtctgctgagaagaagaccaagcagaccctgaaggaggtgcagacagtgaccagcatccagaaggccaggaaggtgtactggtttgagaagttcctgtggttcatcagcagcgagaactacctgatcatcggcggccgggaccagcagcagaatgagatcatcgtgaagcgctacctgaccccaggagagcccatcccccccaggaccctgacagaggccggcaccatggccctgtgctacagcgctgcctgggatgcccgggtcatcaccagcgcctggtgggtgtaccaccaccaggtgtccaagacagcccccactggagagtacctgaccaccggcagcttcatgatccggggcaagaagaacttcctgccccccagctacctgatgatgggcttctccttcctgttcaaggtggatgagagctgtgtgtggaggcaccagggcgagaggaaggtgcgggtgcaggatgaggacatggagaccctggccagctgcaccagcgagctgatcagcgaggagatggagcagctggatggaggagacaccagcagtgatgaggacaaggaggagcacgagacccctgtggaggtggagctgatgacccaggtggaccaggaggacatcaccctgcagagcggcagagatgagctgaatgaggagctgatccaggaggagagcagtgaagatgaaggagaatatgaggaggtgaggaaggaccaggacagcgtgggggagatgaaggatgaaggagaggagaccctgaactacccagacaccaccatcgacctgagccacctgcagccccagaggagcatccagaagctggccagcaaggaggagagcagcaacagcagtgacagcaagagccagagccgccgccacctgagcgccaaggagcggcgggagatgaagaagaagaagctgcccagcgacagcggggacctggaggccctggagggcaaggacaaggagaaggagagcacagtgcacatcgagacccaccagaacaccagcaagaatgtggccgctgtgcagcccatgaagaggggccagaagagcaagatgaagaagatgaaggagaagtacaaggaccaggatgaggaggaccgggagctgatcatgaagctgctgggcagcgctggcagcaacaaggaggagaagggcaagaagggcaagaagggcaagaccaaggatgagcctgtgaagaagcagccccagaagccccggggcggccagagggtgtctgacaacatcaagaaggagacccccttcctggaggtgatcacccatgagctgcaggactttgctgtggatgacccccatgatgacaaggaggagcaggacctggaccagcagggcaatgaggagaacctgtttgacagcctgaccggccagccccacccagaagatgtgctgctgtttgccatccccatctgtgccccctacaccaccatgaccaactacaagtacaaggtgaagctgaccccaggagtgcagaagaagggcaaggccgccaagacagccctgaacagcttcatgcacagcaaggaggccacagcccgggagaaggacctcttccgctctgtgaaggacacagacctgagcaggaacatccctgggaaggtgaaggtgtctgcccccaacctgctgaatgtgaagaggaagtag

SEQ ID NO: 113917 - DNA, 3168 bp, Artificial Sequence
  derived and/or modified sequence
atgaagagccggttcagcaccatcgacctgcgggccgtgctggccgagttaaatgcttcactcttagggatgcgcgtgaataatgtgtacgacgtggacaataagacctacttaatcagacttcaaaagccagatttcaaggccacactgctcctagaatccgggatccgcatccataccaccgagtttgagtggccaaaaaatatgatgccaagcagcttcgcgatgaagtgcagaaaacacctaaagtcccggagactggtgagcgccaaacaactgggagtcgatcgcatcgttgattttcagttcggttctgacgaggctgcatatcatctgatcatcgagctgtatgatagggggaacattgtgctgacagattacgagtacgttattttgaacattctccgctttcggacggacgaagcagatgatgtcaaattcgccgtcagggagcgctaccctctggatcatgcgagggcagccgagccactgctgactcttgaaaggctcacagaaatcgtggccagcgctccaaaaggcgagcttctgaagcgagtgttgaaccctcttctgccctacggtcctgcgcttattgagcattgcctactcgaaaacgggtttagtggaaatgtgaaggttgatgagaagttagaaacgaaggatatcgagaaggtgctggtgagtctgcaaaaagctgaggactacatgaagaccacctctaatttctccggcaaggggtatatcattcaaaaacgagagatcaagccttctttagaggccgacaaacccgtggaggacatcttgacctacgaagaatttcacccctttttgtttagtcagcattcacaatgcccatatattgagtttgaatcctttgacaaagccgttgacgagttttactccaagatcgaagggcagaagatcgacctcaaggccctccagcaggaaaaacaggcccttaaaaaactggataacgtgaggaaggatcatgagaaccggttagaggctctacagcaggcccaggagatcgacaaactcaagggggaactcattgagatgaacttgcagattgtagaccgggccatccaagtggtcagatcagcattagcaaatcagattgactggacagaaataggactgatcgtcaaagaagcccaggcacagggtgaccctgtagcaagtgccattaaagaactgaagcttcagacgaatcacgttaccatgttgttacgaaatccttatctactgagcgaggaggaggatgatgatgtagatggagacgtgaacgttgagaaaaacgaaaccgagcccccaaaaggtaagaaaaagaagcaaaaaaacaagcagcttcagaagccccaaaagaataagcctttgctggtggacgtggatttatcactgtcggcatatgctaatgctaaaaaatactatgatcataagcgatacgcagcaaaaaaaacccagaaaaccgtagaggcggccgagaaggccttcaaatcggcagagaagaaaacgaaacagaccttgaaagaagtacagactgtgacaagcatccagaaagcacggaaagtctactggtttgagaagttcctctggttcatatccagcgagaactaccttatcatcgggggaagagaccaacagcaaaatgagattatagtcaagcgctatctgactcccggcgagccaatacctccacggacactgactgaggcgggcaccatggctttgtgttactccgctgcttgggacgcccgggtcattaccagcgcctggtgggtatatcaccatcaggtcagtaagaccgcacccacaggcgagtatttgactaccggctcattcatgatccgcggcaagaagaacttccttcctccatcctacctaatgatgggattctcattcctgtttaaagtggacgagtcctgcgtctggcgccatcagggagaacgtaaggttcgcgtccaagatgaggatatggagacgctggcatcttgtacgtctgagctgatctccgaggagatggagcagttggatggaggcgatacctcatctgacgaggacaaagaagagcacgagaccccagtcgaggtggagttgatgacccaggttgatcaagaggacattactctgcagtccgggcgagatgaactcaatgaggagctgatacaggaggagtcctcggaggacgaaggagaatatgaggaagtgagaaaggaccaagattctgtaggtgaaatgaaagatgaaggggaagagaccctcaactacccagacaccacaatagacttgagtcatctccagccgcagagatcaatacagaagctggcatccaaggaggaaagctccaactcaagcgattcgaagtcccagtcaagacgtcatctgagcgccaaggagcggcgggagatgaagaagaagaaactgccttcggattcgggggacctggaggccttagaaggcaaggataaagagaaagaaagcacagtccacatcgaaacacaccagaacacgtccaaaaacgtggcagctgtgcagccaatgaagaggggccagaagagtaagatgaagaaaatgaaagaaaaatataaagaccaagacgaggaagaccgagagcttatcatgaagctgcttgggtctgctggtagtaacaaggaggagaaaggtaagaagggaaaaaaaggaaaaaccaaggacgaacccgtcaaaaaacaacctcagaagccgcgtggtggccaacgggttagcgacaatatcaagaaagaaacgccgtttctggaagtgatcactcatgagctacaggattttgcggtggatgacccccacgacgataaggaagaacaggacttggaccaacaggggaacgaagagaacttattcgactcgcttaccggacagcctcacccagaggatgtgctgctatttgctattcctatctgcgcaccctatactaccatgactaattataaatacaaggtgaagctgactccaggggtccagaagaaaggcaaagccgcgaagacggcactcaactcgtttatgcattcgaaagaagccacggctcgggagaaagatctgtttcgtagtgtcaaggacactgatctgtcccgaaatatccccggtaaggtcaaggtgtctgccccgaatctgcttaacgtgaagcgcaagtag

SEQ ID NO: 113918 - DNA, 3729 bp, Artificial Sequence
  derived and/or modified sequence
ttgcggtagtgaccctcgggcctcgccatgaagagccgctttagcaccattgacctccgcgccgtactcgcggagctgaatgctagcttgctaggaatgagagtaaacaatgtttatgatgtggataataagacataccttattcgtcttcaaaaaccggactttaaagctacacttttacttgaatctggcatacgaattcatacaacagaatttgagtggcctaagaatatgatgccgtctagttttgccatgaagtgccgaaaacatttgaagagtcggagattagtcagtgcaaaacagcttggtgtggatagaattgtagattttcaatttggaagtgatgaagctgcttaccatttaatcattgagctctatgatagggggaacattgttcttacagattatgagtacgtaattttaaatattctaaggtttcgaactgatgaggcagatgatgttaaatttgctgttcgtgaacgctatccacttgatcatgctagagctgctgaacctttgcttactttggaaaggttgactgaaatagtagccagcgcacctaagggtgaactactgaagagggtgcttaacccattacttccctatggaccagctctcattgaacactgtcttttagaaaatggattctcgggtaatgtcaaagtggatgaaaaacttgaaactaaagatattgaaaaagtacttgtttctctgcagaaagcagaagactatatgaaaacaacatccaacttcagtgggaagggatatatcattcagaaaagagaaataaaaccaagcttggaagcagataaaccagttgaagacatactgacgtatgaggaatttcatcctttcttgttttctcaacattcacaatgtccatatatagaatttgaatcatttgacaaggcggtggatgaattttattccaagatagaaggccagaaaattgacttaaaagctttacaacaggaaaagcaagcattgaagaaattagataatgttcgaaaggatcacgaaaacagattggaagctcttcagcaggctcaggaaatagacaaactgaaaggagagctcatagaaatgaacctacaaatagttgacagagccattcaggtagttcgaagtgctttagctaaccagatagattggacagaaattgggttaattgtgaaagaagcccaggctcaaggagaccctgttgcaagtgcaatcaaagaattaaaactacaaacaaaccatgttacaatgctgctaagaaatccatacttgttatcagaggaggaagatgatgatgttgatggtgacgtcaatgttgagaaaaatgaaactgaaccaccaaaaggaaaaaagaaaaaacaaaagaataaacagctgcagaagcctcagaaaaataagcccttacttgtagatgttgatctcagcttgtcagcatatgccaatgccaaaaagtattatgatcacaagagatatgctgctaagaaaacacaaaagactgttgaagctgctgagaaggcattcaagtcagcagaaaagaaaacaaagcaaacattaaaagaagttcagactgttacctctattcaaaaagcaagaaaagtatattggtttgagaaatttctgtggttcattagctcagagaactatctaattataggtggacgagatcagcaacagaatgaaataattgtgaaaagatacttgacaccaggagaacccatccccccacggaccttgactgaagctggcacaatggcactttgctacagtgctgcttgggatgcacgagttatcactagtgcttggtgggtgtaccatcatcaggtatctaaaacagcaccaactggagaatatttgacaacaggaagcttcatgataagaggaaaaaagaattttcttcctccctcatatctaatgatggggtttagcttcctttttaaggtagatgagtcttgtgtttggagacatcagggtgaacgaaaagtcagagtacaggatgaagacatggagacactggcaagttgtacaagtgaactcatatcagaagaaatggaacaattagatggaggtgacacgagcagtgatgaggataaagaagaacatgaaactcctgtggaagtagaactcatgactcaggttgaccaagaggatatcactcttcagagtggcagagatgaactaaatgaggagctcattcaggaagaaagctctgaagacgaaggagaatatgaagaggttagaaaagatcaggattctgttggtgaaatgaaggatgaaggggaagagacattaaattatcctgatactaccattgacttgtctcaccttcaaccccaaaggtccatccagaaattggcttcaaaagaggaatcttctaattctagtgacagtaaatcacagagccggagacatttgtcagccaaggaaagaagggaaatgaaaaagaaaaaacttccaagtgactcaggagatttagaagcgttagagggaaaggataaagaaaaagaaagtactgtacacattgaaactcatcagaacacaagcaaaaatgttgcggctgtgcagccaatgaaacgaggacaaaagagtaaaatgaaaaaaatgaaagaaaaatacaaagaccaggatgaagaagaccgtgaacttatcatgaagttgctggggtctgcaggttcaaacaaagaagaaaaagggaagaaggggaagaaaggaaaaacaaaggacgaacctgtgaagaaacagccccagaaacctagaggtggacagagggtctctgacaacattaagaaagaaactccgttccttgaggttataactcatgagttacaagactttgctgtagatgatccacatgatgacaaggaagagcaagatctggatcaacagggaaatgaggaaaacctatttgattctttgacaggccagccacatcctgaagatgtactactgtttgccattccaatatgtgccccttacaccaccatgacaaactacaaatataaagtgaaacttactcctggagtgcagaaaaagggaaaagctgcaaaaacagccttgaatagtttcatgcattccaaagaagcaacagcaagagaaaaagacttattccgcagcgtaaaggacacagatttatcaagaaacattcctggcaaagtgaaagtgtctgcacccaatcttctgaatgtaaaaaggaaatagctgaaatgaaattctaaaatatttgagaagagccaattttatagccttttggaagttcaaagatgaaagcaccatgtatcaggatttccgcattataaaaatgaactaaacattgccttgctatattcaccaaaaggacttacttcttgttttttcccagttttatatagaggaaacactgtctatgataggatttccaaaagtatttgtggacagttaaatgctaattaatatacatctgtagttattctacattttcttgaaatttgggaggttaataccaagtattcatttcatgatgtaaagaaactgaacagtgaagtggcttgattgcttaaactattgacttggtaagtctactgtatataacatctaatatatatattacaggccaaatgaactaaacattgccttgctatattcaccaaaaggacttaattcttgtttttttcccagttttatatagaggaaacactatgataggatttcctaaagtatttgtggacagttaaatgctaattatatacatctgta

SEQ ID NO: 113919 - DNA, 3168 bp, Artificial Sequence
  derived and/or modified sequence
atgaaaagcagattctctacgattgacctccgcgcagtgctggcagagctgaatgcctcccttcttgggatgagagtgaacaacgtctacgacgttgataacaagacttatctaatccgactccagaagccagactttaaggccaccctgttactggaatcgggaatccgcatccacactactgagttcgaatggcctaaaaatatgatgccgagtagtttcgctatgaagtgccgaaagcatctgaaatctagacggttagtgtccgctaaacagctcggagtcgacaggattgttgatttccagttcggctcagacgaggccgcttaccacctaataatcgagttgtacgaccgtggcaacatcgtcttgaccgactacgagtacgtcatactgaacatcctgcgcttccgcaccgatgaagccgacgacgtgaaatttgcggtcagggagcggtaccctctcgatcatgcgagagccgcagagccgttgttgacccttgagagacttacagagatcgtggcaagcgctccaaaaggagaacttctgaaaagagtcctgaacccactgctcccttatggacctgccttaatagaacattgcctgctcgagaacggcttcagtggtaacgtcaaggtagacgagaaactggaaaccaaggacattgagaaagtgctggtctccctgcaaaaggccgaggactatatgaagactacttctaatttttctgggaaggggtatattatacaaaaaagagagattaaacccagcctcgaggccgacaagcccgtggaagacatactgacttatgaggagtttcaccctttcctgttttctcaacacagtcagtgtccatatattgagttcgagtcattcgacaaggcagtggatgaattttattccaagattgaaggccagaagatcgatctgaaggctctgcagcaggaaaagcaggctctcaagaagctggacaatgtgcggaaggatcacgagaacagactggaggccttgcagcaggctcaggaaatcgacaagctgaagggtgaactaatcgagatgaatctacagatcgtagatagggcaatacaggtggtccggtccgccctggctaaccagatcgattggacggagatcggactgattgtaaaggaggctcaagcccagggcgacccagtcgcgtcggcaattaaggagctgaagctgcagactaaccacgttacaatgctcctgcgtaacccgtacctcctgtctgaagaagaagacgacgacgtcgatggcgatgtgaacgtcgaaaagaatgaaacagaacctccaaagggcaagaaaaagaaacagaagaacaagcaactgcagaaacctcagaaaaacaaacctctgctggtggacgtcgacttgagtctgtccgcctacgctaacgcgaagaaatactatgaccataagagatatgccgctaaaaaaacccagaagaccgtcgaggccgcagagaaagccttcaaaagcgccgagaagaaaaccaagcagacgctgaaagaagtccaaactgtgacaagcattcagaaggcccgaaaggtgtattggttcgagaagtttctctggtttatcagtagcgagaactacctgattattggcggaagggaccagcagcagaatgagattatcgtaaagagatacctgacacccggtgagcccattcctcctcggaccctgactgaggctggaactatggctctctgttactctgctgcctgggatgcacgcgtcataacctctgcatggtgggtctaccatcaccaggtaagtaaaaccgcacctaccggcgagtacctcacgaccggatccttcatgatccgcggtaaaaaaaattttctgccaccttcatatttaatgatgggattctctttcctctttaaggtcgatgaatcgtgcgtctggagacatcagggggaacggaaggtcagagtccaggacgaggacatggagaccctagctagctgtacttcggaattaatatccgaagagatggagcagctcgatggaggggatactagctcggatgaagataaagaggagcacgagaccccagtggaagtagagttgatgacgcaagtcgatcaggaggacataaccctacaatcaggaagagacgaactaaatgaggaactgatccaggaagaatccagtgaagatgaaggagagtacgaggaggttagaaaagatcaggattcagtgggcgagatgaaggacgaaggggaggagaccttgaattaccccgatacaaccattgatctatcacacctgcagcctcagcgctcgattcagaagcttgcttctaaagaagaaagctctaactcctcggacagcaagagccagtcccgcagacacctgagcgcaaaggagaggcgcgagatgaagaaaaagaaactcccctcagactccggggatctggaggccttggagggaaaggacaaggaaaaagaatccacagtgcatattgagacccatcaaaatacaagcaaaaacgtggcagccgtgcagcccatgaagagaggacaaaaaagcaaaatgaaaaagatgaaggagaagtacaaggaccaggatgaagaagacagagagctcatcatgaagttacttggttctgctgggtctaataaggaggaaaaaggcaaaaagggcaaaaagggaaagacaaaggatgagccagtgaaaaagcagccccagaagcctcggggtgggcagcgtgtgagcgacaacataaagaaagagacaccctttctggaggtgatcacacatgaactgcaggactttgcagttgacgatccacacgatgacaaggaagagcaggatctcgatcagcagggcaacgaggagaacttgtttgacagcctgacgggtcaaccccaccctgaggatgtgcttctgttcgccatacctatttgcgctccctacacaactatgaccaattataaatataaagttaagctgacccccggagtgcaaaagaagggaaaggcagctaagaccgctctgaactcttttatgcactccaaagaggcgacagcacgagagaaggacctgttcaggtcagtcaaggacaccgatctgtcccggaacatcccgggtaaggtcaaagtcagcgcacccaatctcctgaacgtaaagcggaaatag

SEQ ID NO: 113920 - protein, 29 aa, Artificial Sequence
  derived and/or modified sequence
METVVIVAIGVLATIFLASFAALVLVCRQ

SEQ ID NO: 113921 - protein, 226 aa, Artificial Sequence
  derived and/or modified sequence
METVVIVAIGVLATIFLASFAALVLVCRQRYCRPRDLLQRYDSKPIVDLIGAMETQSEPSELELDDVVITNPHIEAILENEDWIEDASGLMSHCIAILKICHTLTEKLVAMTMGSGAKMKTSASVSDIIVVAKRISPRVDDVVKSMYPPLDPKLLDARTTALLLSVSHLVLVTRNACHLTGGLDWIDQSLSAAEEHLEVLREAALASEPDKGLPGPEGFLQEQSAI

SEQ ID NO: 113922 - protein, 137 aa, Artificial Sequence
  derived and/or modified sequence
METVVIVAIGVLATIFLASFAALVLVCRQRYCRPRDLLQRYDSKPIVDLIGAMETQSEPSELELDDVVITNPHIEAILENEDWIEDASGLMSHCIAILKICHTLTEKLVAMTMGSGAKMKTSASVSDIIVVAKRISP

SEQ ID NO: 113923 - protein, 222 aa, Artificial Sequence
  derived and/or modified sequence
METVVIVAIGVLATIFLASFAALVLVCRQRYCRPRDLLQRYDSKPIVDLIGAMETQSEPSELELDDVVITNPHIEAILENEDWIEDASGLMSHCIAILKICHTLTEKLVAMTMGSGAKMKTSASVSDIIVVAKRISPRVDDVVKSMYPPLDPKLLDARTTALLLSVSHLVLVTRNACHLTGGLDWIDQSLSAAEEHLEVLREAALASEPDKGLPGPEGFLQE

SEQ ID NO: 113924 - DNA, 681 bp, Artificial Sequence
  derived and/or modified sequence
atggagaccgtggtgatcgtggccatcggcgtgctggccaccatcttcctggccagcttcgccgccctggtgctggtgtgcagacagagatactgcagacccagagacctgctgcagagatacgacagcaagcccatcgtggacctgatcggcgccatggagacccagagcgagcccagcgagctggagctggacgacgtggtgatcaccaacccccacatcgaggccatcctggagaacgaggactggatcgaggacgccagcggcctgatgagccactgcatcgccatcctgaagatctgccacaccctgaccgagaagctggtggccatgaccatgggcagcggcgccaagatgaagaccagcgccagcgtgagcgacatcatcgtggtggccaagagaatcagccccagagtggacgacgtggtgaagagcatgtacccccccctggaccccaagctgctggacgccagaaccaccgccctgctgctgagcgtgagccacctggtgctggtgaccagaaacgcctgccacctgaccggcggcctggactggatcgaccagagcctgagcgccgccgaggagcacctggaggtgctgagagaggccgccctggccagcgagcccgacaagggcctgcccggccccgagggcttcctgcaggagcagagcgccatctag

SEQ ID NO: 113925 - DNA, 414 bp, Artificial Sequence
  derived and/or modified sequence
atggagaccgtggtgatcgtggccatcggcgtgctggccaccatcttcctggccagcttcgccgccctggtgctggtgtgcagacagagatactgcagacccagagacctgctgcagagatacgacagcaagcccatcgtggacctgatcggcgccatggagacccagagcgagcccagcgagctggagctggacgacgtggtgatcaccaacccccacatcgaggccatcctggagaacgaggactggatcgaggacgccagcggcctgatgagccactgcatcgccatcctgaagatctgccacaccctgaccgagaagctggtggccatgaccatgggcagcggcgccaagatgaagaccagcgccagcgtgagcgacatcatcgtggtggccaagagaatcagcccctag

SEQ ID NO: 113926 - DNA, 669 bp, Artificial Sequence
  derived and/or modified sequence
atggagaccgtggtgatcgtggccatcggcgtgctggccaccatcttcctggccagcttcgccgccctggtgctggtgtgcagacagagatactgcagacccagagacctgctgcagagatacgacagcaagcccatcgtggacctgatcggcgccatggagacccagagcgagcccagcgagctggagctggacgacgtggtgatcaccaacccccacatcgaggccatcctggagaacgaggactggatcgaggacgccagcggcctgatgagccactgcatcgccatcctgaagatctgccacaccctgaccgagaagctggtggccatgaccatgggcagcggcgccaagatgaagaccagcgccagcgtgagcgacatcatcgtggtggccaagagaatcagccccagagtggacgacgtggtgaagagcatgtacccccccctggaccccaagctgctggacgccagaaccaccgccctgctgctgagcgtgagccacctggtgctggtgaccagaaacgcctgccacctgaccggcggcctggactggatcgaccagagcctgagcgccgccgaggagcacctggaggtgctgagagaggccgccctggccagcgagcccgacaagggcctgcccggccccgagggcttcctgcaggagtag

SEQ ID NO: 113927 - DNA, 681 bp, Artificial Sequence
  derived and/or modified sequence
atggaaacggttgtgatcgtggcaattggtgttctggccaccatttttttggcttcttttgcagcccttgtgctggtttgtcgccagagatactgtagaccccgagatctactccagcgctacgattcaaaaccaatcgttgatctcattggagctatggagacacagtcagagccctcagaattagaactggacgacgtcgtcatcacaaatccccacattgaggctatattagagaatgaagactggattgaggacgctagcggcctgatgagtcactgcatcgctatcctgaagatttgccacaccctaaccgaaaaactcgtcgccatgacgatggggagtggggccaaaatgaaaacatctgcttcagtgtccgatattatcgtcgtcgcaaagaggatcagcccacgtgttgatgacgttgttaagtcaatgtaccccccactggatcccaagctgctggacgcgagaacgacagctttgcttctgagcgtaagtcacctggttctcgtcacacgcaatgcctgccacctcacaggcggactggactggatagatcagtctttatccgcagctgaagaacatctggaggtgctgcgggaagcagctctcgcgagcgagcctgataagggactgcccggccctgagggcttcttgcaggagcagtccgccatttag

SEQ ID NO: 113928 - DNA, 681 bp, Artificial Sequence
  derived and/or modified sequence
atggaaacagtagtcattgtcgcaataggtgtgctggcaacgatttttctcgctagtttcgcagctctggtgctggtttgtcgacaaaggtactgtcgtccaagggacctactgcagagatatgacagtaagcccatcgtggatctgatcggggcaatggaaacacagagtgaaccatccgaactggagctggacgacgtggtcatcacgaaccctcacatagaggccattctcgagaacgaggactggatcgaggatgcctcaggcctgatgtcccactgcattgccattctcaagatttgccatactctgacggagaagttggtggccatgacgatgggatccggagccaagatgaagacctccgcatccgtgagtgatataattgtggtcgccaaacgcatcagtcctagggttgacgatgttgtgaaatccatgtatccgcccttggaccccaagctgttggacgcacggaccactgctttgcttttatccgtgtcacacctcgttctggtaaccagaaatgcatgccatcttaccggaggattagactggatagatcagtccctctctgccgccgaggagcacttggaggtacttagggaggcggcgcttgcgtctgaacccgataaaggcctgccagggcccgaagggtttctgcaagaacagtccgcaatttag

SEQ ID NO: 113929 - DNA, 414 bp, Artificial Sequence
  derived and/or modified sequence
atggaaacagtcgtaatcgtcgccatcggcgttctggctacaatttttctggcatcttttgccgccttggttctcgtatgtaggcaaaggtattgtaggccgcgggatttactgcagcgttacgattctaaacctatcgttgatctcattggggcaatggaaacccaaagcgaaccatctgagctggagttggacgacgtcgtgatcactaacccccacatcgaagctatactcgagaacgaggactggattgaggatgccagcgggctgatgagccattgcatcgcaatcctgaaaatctgtcatactctgacagagaaactcgtggctatgaccatgggtagcggggcaaagatgaagacctccgcctccgtgtctgatatcatcgtagttgcgaagcgaatcagtccatag

SEQ ID NO: 113930 - DNA, 669 bp, Artificial Sequence
  derived and/or modified sequence
atggagactgtcgtcatcgtggctataggggtgctggcgactatcttcttggcctcgtttgccgcccttgtgcttgtgtgccggcaacgctactgccgccccagagacctgctgcagcgctacgattcaaaaccaattgtggatcttatcggagccatggagacacagtcagagccctcagaacttgagctagatgacgtagtgatcaccaatccccacattgaggctattctggagaacgaagattggattgaggatgcctcagggctcatgtcgcactgtatagctatactgaaaatctgccacaccctgacagaaaagcttgtggcaatgactatggggtcaggcgctaaaatgaaaacgtcagcatcagtcagcgacattatcgttgtagctaagcgcatctctcctcgcgtggacgacgttgtgaaatcaatgtacccacctcttgaccccaagctgctcgatgcacgaacaactgccctactgctgagtgtgtcacacctggttttggtcacgcgcaacgcatgtcacctgacagggggtctggattggattgatcagtccctgagcgcggccgaggaacacttagaagtgctgagggaagccgctctcgctagtgagcccgacaagggattgcctggacccgagggcttccttcaggaatag

SEQ ID NO: 113931 - DNA, 681 bp, Artificial Sequence
  derived and/or modified sequence
atggagactgttgtgatcgttgccattggcgttctggccactatcttcctggcatctttcgccgcgctcgtgttagtgtgccgacaaagatactgtaggccacgggaccttctccaacgatatgactccaaacctatcgtggatctaatcggtgcaatggaaacacagtccgaaccgagcgagctagaactggatgatgtggtcatcacaaatccccacatcgaggcaattctggagaacgaggattggatcgaggacgcatccggtctgatgtctcattgcatagccatcctaaagatctgtcatactctcaccgaaaaactggtggccatgaccatgggctcaggggcaaaaatgaagacttctgcttcagtaagcgacatcattgtggttgccaaacggatttctcctagggttgacgatgtggtgaaatcaatgtatccccccctggacccaaagctgctcgacgctcgcaccactgcactgcttctgagcgttagtcatctagtcctggtcactcgcaacgcctgtcacctgaccggcgggctggactggatcgatcaatctttgagtgcagctgaggagcatttagaggtgttgcgcgaggctgctttggcatccgaacccgacaagggcctacccggccccgaaggctttcttcaggagcagtctgctatctag

SEQ ID NO: 113932 - DNA, 681 bp, Artificial Sequence
  derived and/or modified sequence
atggagaccgtggtgattgtggccatcggcgtgctggccaccatcttcctggccagctttgctgccctggtgctggtgtgccggcagcgctactgccggccccgggacctgctgcagagatatgacagcaagcccatcgtggacctgattggagccatggagacccagagcgagcccagcgagctggagctggatgatgtggtgatcaccaacccccacatcgaggccatcctggagaatgaagactggattgaagatgccagcggcctgatgagccactgcatcgccatcctgaagatctgccacaccctgacagagaagctggtggccatgaccatgggcagcggggccaagatgaagaccagcgcctctgtgtctgacatcatcgtggtggccaagaggatcagcccccgggtggatgatgtggtgaagtccatgtacccacccctggaccccaagctgctggatgcccggaccacagccctgctgctgtctgtgagccacctggtgctggtgaccagaaatgcctgccacctgaccggcggcctggactggattgaccagagcctgtctgctgctgaggagcacctggaggtgctgcgggaggccgccctggccagcgagccagacaagggcctgcccggccctgagggcttcctgcaggagcagagcgccatctag

SEQ ID NO: 113933 - DNA, 414 bp, Artificial Sequence
  derived and/or modified sequence
atggagaccgtggtgattgtggccatcggcgtgctggccaccatcttcctggccagctttgctgccctggtgctggtgtgccggcagcgctactgccggccccgggacctgctgcagagatatgacagcaagcccatcgtggacctgattggagccatggagacccagagcgagcccagcgagctggagctggatgatgtggtgatcaccaacccccacatcgaggccatcctggagaatgaagactggattgaagatgccagcggcctgatgagccactgcatcgccatcctgaagatctgccacaccctgacagagaagctggtggccatgaccatgggcagcggggccaagatgaagaccagcgcctctgtgtctgacatcatcgtggtggccaagaggatcagcccctag

SEQ ID NO: 113934 - DNA, 669 bp, Artificial Sequence
  derived and/or modified sequence
atggagaccgtggtgattgtggccatcggcgtgctggccaccatcttcctggccagctttgctgccctggtgctggtgtgccggcagcgctactgccggccccgggacctgctgcagagatatgacagcaagcccatcgtggacctgattggagccatggagacccagagcgagcccagcgagctggagctggatgatgtggtgatcaccaacccccacatcgaggccatcctggagaatgaagactggattgaagatgccagcggcctgatgagccactgcatcgccatcctgaagatctgccacaccctgacagagaagctggtggccatgaccatgggcagcggggccaagatgaagaccagcgcctctgtgtctgacatcatcgtggtggccaagaggatcagcccccgggtggatgatgtggtgaagtccatgtacccacccctggaccccaagctgctggatgcccggaccacagccctgctgctgtctgtgagccacctggtgctggtgaccagaaatgcctgccacctgaccggcggcctggactggattgaccagagcctgtctgctgctgaggagcacctggaggtgctgcgggaggccgccctggccagcgagccagacaagggcctgcccggccctgagggcttcctgcaggagtag

SEQ ID NO: 113935 - DNA, 681 bp, Artificial Sequence
  derived and/or modified sequence
atggagaccgtggtgatcgtggccatcggcgtgctggccaccatctttctggcctccttcgcagcattggtgctcgtgtgcagacagcgttattgccgaccccgtgacttattacagcgctacgactcaaagccaatagtggatctcattggggccatggaaactcagagcgagccctctgagctggagctcgacgatgttgttattacaaacccccacatcgaagccattttggaaaatgaagattggattgaagacgcatccggcctcatgtctcactgcattgctatactgaagatctgtcacactctcactgaaaagctagttgccatgaccatgggctcgggagctaagatgaagacctccgcttcagtctcggatattatcgtagtcgccaaacggatctccccaagagtagacgacgttgtgaaatctatgtaccctcccctagaccccaagctgctggacgcacgcactaccgcattgctgttatctgtttcacacttggtcctggtgacaaggaacgcctgccacttgaccgggggtctggattggatcgatcagtcgctcagcgcagcagaagagcacctcgaagtgctgagggaggctgcccttgctagcgagcccgataagggcctgcccggacctgaggggtttctgcaggagcagtccgccatctag

SEQ ID NO: 113936 - DNA, 681 bp, Artificial Sequence
  derived and/or modified sequence
atggagaccgtggtgatcgtggccatcggcgtgctggccaccatctttcttgcaagttttgccgcactagtcctcgtgtgcagacaaaggtattgccgaccacgtgatctccttcagagatacgatagtaaacctattgtcgacctgatcggggctatggaaactcagagcgagcccagtgagctcgaattggatgatgtggtcattaccaacccacacatcgaagctattctcgaaaatgaagattggatcgaggacgcttctggccttatgagccactgcatagcaattctgaagatctgccacaccctgacagagaagctcgtggcaatgacaatggggtcaggagccaagatgaaaacatccgcatcggtatccgacataattgttgtggccaagagaattagccctcgtgttgacgatgtcgtgaaatctatgtatccgcccctggatcccaagctcctggatgctagaactaccgcgctcctgctgtctgtgtcccacctagttctggttactcgtaatgcctgccacctaacaggggggctcgattggattgaccagagtctgtctgctgctgaggagcatctggaagtgttaagagaagccgccctggcatcagagccggacaaaggattacccggtcctgaaggtttcttgcaggagcaatcggctatttag

SEQ ID NO: 113937 - DNA, 414 bp, Artificial Sequence
  derived and/or modified sequence
atggagaccgtggtgatcgtggccatcggcgtgctggccaccatcttcctagcgtctttcgccgctctggtgctagtttgccgtcagcgctattgtcgccctagggacctactccaaagatacgacagtaaacccattgtggacctcattggcgcaatggagactcagagcgaaccctcagagttggaattggatgatgtcgtaattaccaatcctcatatcgaggctattctagagaacgaagactggatagaggacgcttccggcctgatgtcccattgcatcgctatactcaaaatctgtcacaccttaacggaaaagcttgttgcgatgacaatgggatccggcgctaagatgaaaacgtccgcttcagtgtccgacataatagtggtggccaaacggatctcaccttag

SEQ ID NO: 113938 - DNA, 669 bp, Artificial Sequence
  derived and/or modified sequence
atggagaccgtggtgatcgtggccatcggcgtgctggccaccatcttccttgcgagctttgccgctcttgtgcttgtttgtaggcagaggtattgcagacctcgggatttgttgcagcgatatgattccaagcccatcgttgatctgatcggagccatggagacacagtccgaacctagtgaactcgaattggacgacgtggtcattacgaatccacacattgaggccatactggaaaacgaggactggatcgaggacgcgtccggcctgatgagtcactgtattgctatactgaagatttgtcatacactcaccgaaaaactggtggcaatgacaatggggagcggggccaagatgaaaacctctgcgtccgtatcagatatcatcgtcgttgctaagcggatttcgccaagagtggacgatgttgtcaagagcatgtaccctcccctggatcccaagctacttgatgcgagaactactgccctgctcttgtcggtgtctcacctcgtgcttgtgacgcgcaacgcatgccatctcacaggaggattagattggattgaccagagtttgtccgctgctgaagagcacctcgaggtgctgagagaggccgcgctggctagcgagcccgataagggcttaccgggacccgagggctttctccaagagtag

SEQ ID NO: 113939 - DNA, 681 bp, Artificial Sequence
  derived and/or modified sequence
atggagaccgtggtgatcgtggccatcggcgtgctggccaccatctttttggcttccttcgctgcactggtcctcgtctgccggcagagatactgccgccccagagacctgctgcagaggtacgacagcaaacctatcgtcgatctcatcggggccatggaaacccagtcagaaccttccgagctcgaactggacgacgtagtgatcactaaccctcatatcgaggctattttggagaacgaagactggattgaagacgctagtggcctcatgagccattgtatagcgatactcaaaatctgccacacactgaccgagaagctggtcgctatgaccatgggtagtggagccaagatgaagacgtcagcctctgtcagtgatattattgtggtggccaagagaataagtccaagagtggatgacgtggttaagagtatgtacccccccttagatcctaagctgctggatgctaggacaacagccctcttattgtcagtttcgcacttggttctcgtcacccggaacgcctgccacttaactggcggcctcgactggatcgatcagtccctcagtgctgctgaggaacacctcgaagtactgcgcgaggcggcactcgccagtgagcctgataagggccttccaggccccgagggatttttgcaagaacagagcgccatatag

SEQ ID NO: 113940 - DNA, 681 bp, Artificial Sequence
  derived and/or modified sequence
atggagaccgtggtgatcgtcgccattggagttcttgctaccatcttcctcgccagctttgcagctctagtgctggtgtgcaggcagagatattgccggcctagggacctcttgcagcggtatgattccaaacccattgtggacctaattggggcaatggagactcagagcgagccctctgaactcgaactggacgatgttgtgatcacgaacccacatatagaggctattcttgaaaacgaagactggatcgaggacgcaagcggcctgatgagccattgtattgcaattctaaagatttgtcataccctgaccgaaaagctcgtcgcgatgactatgggcagcggcgctaagatgaagacatcagcctcagtgtcggatattatcgtggtagcaaaacgaatatcaccacgtgtcgacgacgtggtgaagtccatgtacccgccattagaccctaagttgctcgacgcacggactacagccttactactgtcagtttctcatttggtgcttgtgacacggaacgcctgccatttgacaggcggtctggattggatcgaccaaagcttaagtgccgcagaggagcacttggaggtgctgcgggaggccgctcttgcctctgagcctgataagggtttacctggcccagaaggttttcttcaggagcagtcagccatttag

SEQ ID NO: 113941 - DNA, 681 bp, Artificial Sequence
  derived and/or modified sequence
atggaaacggtggttatagtcgcaatcggagtgcttgccaccattttccttgccagctttgcagcgctggtcctcgtttgccgtcaacgctactgccgcccacgggatttactgcagaggtacgactctaagcctattgtcgatttaattggtgctatggagactcagagcgagccttcagaattagaactggatgacgtcgtaatcaccaatccccacatcgaggccatcctggaaaacgaagattggatcgaggacgcgtcaggcctaatgtctcactgcattgccattctgaagatttgccatacactgacggaaaaacttgtcgctatgacaatgggaagcggggcaaaaatgaagactagcgcaagcgtctccgacattatagtggtcgcaaaacgaataagtccacgggtggatgacgttgtgaagagcatgtatcctccccttgaccctaagttgttggacgccaggacaactgccctcctactgagcgttagccacttggtgctggttacccgcaatgcatgtcaccttactggaggactagactggattgatcagagcttgagcgccgctgaagaacacctggaagtgctgcgggaggccgctttagccagcgagccggacaagggtctgccgggaccggaagggtttctccaagagcaatctgcgatttag

SEQ ID NO: 113942 - DNA, 414 bp, Artificial Sequence
  derived and/or modified sequence
atggagaccgtcgtgatcgtggcaattggagtcctggccaccattttcctggcctcgttcgcggctctggtcctcgtttgtagacagcgttactgccgcccaagagatctcctgcagcgttacgacagtaaacccatcgttgacctgattggagctatggagacgcagtctgaaccctctgagttggaattagacgacgtcgtgatcactaaccctcatatcgaggctatcctggagaatgaggattggatcgaagacgctagtgggcttatgtcacactgtatcgcaattttgaagatctgtcacaccctcacagaaaaacttgtggctatgaccatgggcagcggtgcaaagatgaaaaccagcgccagcgtgtcagacattatagtcgtggccaaaaggatttctccctag

SEQ ID NO: 113943 - DNA, 669 bp, Artificial Sequence
  derived and/or modified sequence
atggagactgtcgtcattgtggcaataggcgtgctggcaactatctttcttgctagcttcgcggctctggtcttagtctgtcggcagcggtattgtcgtccacgagacctgctgcagcgttatgattccaaaccgattgtggacctcatcggggctatggagacccagtctgaaccatccgagctagagcttgacgacgttgtgataactaacccacatatagaagccattttggagaacgaagattggatcgaggatgcttcaggcctcatgtcacactgtatagctatcctcaagatctgccatacactgacagaaaagttagtggctatgaccatgggatccggcgcaaagatgaaaacgagcgcgtctgtaagcgatataatcgtagttgcaaaacgaatctctcccagggtggatgatgtcgttaagagcatgtacccccctctagatcctaagctcctggatgcgcgtaccactgcgctgctgctgtcagtgtcacacctggtcctagtgacccggaacgcctgtcacttaaccggcggattagactggatagaccaatccctctcagccgctgaagaacatctcgaagttttacgcgaagcagcattggcctctgagccggacaaaggtctgcccggaccggagggttttctccaggagtag

SEQ ID NO: 113944 - DNA, 681 bp, Artificial Sequence
  derived and/or modified sequence
atggagacggttgtcattgttgctattggcgtgctcgccactatcttcttagcaagcttcgctgccctggtactagtttgccgccaacgttactgccgccctcgggacctcctgcaaagatatgactctaagccaattgtggacttaataggggcaatggaaacccagtcagagccgtccgagctcgaacttgatgatgtggttatcaccaacccccacatagaggccatactggagaacgaagattggattgaagatgcctctggcctgatgtctcactgtatagcgattttgaagatttgccacaccctgacagagaagctggtagcgatgacaatgggatctggcgctaagatgaagactagcgccagcgtgtctgacatcattgtggtcgccaaaagaatttctccaagggtggacgacgtcgtgaaaagcatgtatcctcctttagatcctaagctgctggatgctagaaccacagcccttttgctaagtgtgagccatctggtcttggtcactcgtaatgcttgtcacttaacagggggacttgactggatagatcagtctttatccgcagctgaggagcatctcgaagtactccgcgaagcagcccttgcatcggagcccgacaagggtctgcctggacctgaagggtttcttcaggaacagagtgccatttag

SEQ ID NO: 113945 - DNA, 87 bp, Artificial Sequence
  derived and/or modified sequence
atggagactgtggtgattgttgccataggtgtgctggccaccatgtttctggcttcgtttgcagccttggtgctggtttgcaggcag

SEQ ID NO: 113946 - DNA, 1768 bp, Artificial Sequence
  derived and/or modified sequence
tccgctcccctctccgtctgccgcccggacgggccaccgcgggggcgcgaggaaggggtgttgggtcgccagggcccgcctcccagctgccccggccgccggggggcctggcggtgacggcggcgcctggcggcggggatttggcgcgggccgggggccgggggccggggcgcgggggcgcgaggctggattcctagggccgcggcgcttcccggcatgctccgctgcaggcccgcgcccgcgcccggactttgccatcggcggggcagtcgcgggatgcgcccgggagccacagcctgaggccctcaggtctctgcaggtgtcgtggaggaacctagcacctgccatcctcttccccaatttgccacttccagcagctttagcccatgaggaggatgtgaccgggactgagtcaggagccctctggaagcatggagactgtggtgattgttgccataggtgtgctggccaccatctttctggcttcgtttgcagccttggtgctggtttgcaggcagcgctactgccggccgcgagacctgctgcagcgctatgattctaagcccattgtggacctcattggtgccatggagacccagtctgagccctctgagttagaactggacgatgtcgttatcaccaacccccacattgaggccattctggagaatgaagactggatcgaagatgcctcgggtctcatgtcccactgcattgccatcttgaagatttgtcacactctgacagagaagcttgttgccatgacaatgggctctggggccaagatgaagacttcagccagtgtcagcgacatcattgtggtggccaagcggatcagccccagggtggatgatgttgtgaagtcgatgtaccctccgttggaccccaaactcctggacgcacggacgactgccctgctcctgtctgtcagtcacctggtgctggtgacaaggaatgcctgccatctgacgggaggcctggactggattgaccagtctctgtcggctgctgaggagcatttggaagtccttcgagaagcagccctagcttctgagccagataaaggcctcccaggccctgaaggcttcctgcaggagcagtctgcaatttagtgcctacaggccagcagctagccatgaaggcccctgccgccatccctggatggctcagcttagccttctactttttcctatagagttagttgttctccacggctggagagttcagctgtgtgtgcatagtaaagcaggagatccccgtcagtttatgcctcttttgcagttgcaaactgtggctggtgagtggcagtctaatactacagttaggggagatgccattcactctctgcaagaggagtattgaaaactggtggactgtcagctttatttagctcacctagtgttttcaagaaaattgagccaccgtctaagaaatcaagaggtttcacattaaaattagaatttctggcctctctcgatcggtcagaatgtgtggcaattctgatctgcattttcagaagaggacaatcaattgaaactaagtaggggtttcttcttttggcaagacttgtactctctcacctggcctgtttcatttatttgtattatctgcctggtccctgaggcgtctgggtctctcctctcccttgcaggtttgggtttgaagctgaggaactacaaagttgatgatttcttttttatctttatgcctgcaattttacctagctaccactaggtggatagtaaatttatacttatgtttccctcaa

SEQ ID NO: 113947 - DNA, 1698 bp, Artificial Sequence
  derived and/or modified sequence
cccggggcggggcgcaggcagggaccctccgctcccctctccgtctgccgcccggacgggccaccgcgggggcgcgaggaaggggtgttgggtcgccagggcccgcctcccagctgccccggccgccggggggcctggcggtgacggcggcgcctggcggcggggatttggcgcgggccgggggccgggggccggggcgcgggggcgcgaggctggattcctagggccgcggcgcttcccggcatgctccgctgcaggcccgcgcccgcgcccggactttgccatcggcggggcagtcgcgggatgcgcccgggagccacagcctgagctttagcccatgaggaggatgtgaccgggactgagtcaggagccctctggaagcatggagactgtggtgattgttgccataggtgtgctggccaccatctttctggcttcgtttgcagccttggtgctggtttgcaggcagcgctactgccggccgcgagacctgctgcagcgctatgattctaagcccattgtggacctcattggtgccatggagacccagtctgagccctctgagttagaactggacgatgtcgttatcaccaacccccacattgaggccattctggagaatgaagactggatcgaagatgcctcgggtctcatgtcccactgcattgccatcttgaagatttgtcacactctgacagagaagcttgttgccatgacaatgggctctggggccaagatgaagacttcagccagtgtcagcgacatcattgtggtggccaagcggatcagccccagggtggatgatgttgtgaagtcgatgtaccctccgttggaccccaaactcctggacgcacggacgactgccctgctcctgtctgtcagtcacctggtgctggtgacaaggaatgcctgccatctgacgggaggcctggactggattgaccagtctctgtcggctgctgaggagcatttggaagtccttcgagaagcagccctagcttctgagccagataaaggcctcccaggccctgaaggcttcctgcaggagcagtctgcaatttagtgcctacaggccagcagctagccatgaaggcccctgccgccatccctggatggctcagcttagccttctactttttcctatagagttagttgttctccacggctggagagttcagctgtgtgtgcatagtaaagcaggagatccccgtcagtttatgcctcttttgcagttgcaaactgtggctggtgagtggcagtctaatactacagttaggggagatgccattcactctctgcaagaggagtattgaaaactggtggactgtcagctttatttagctcacctagtgttttcaagaaaattgagccaccgtctaagaaatcaagaggtttcacattaaaattagaatttctggcctctctcgatcggtcagaatgtgtggcaattctgatctgcattttcagaagaggacaatcaattgaaactaagtaggggtttcttcttttggcaagacttgtactctctcacctggcctgtttcatttatttgtattatctgcctggtccctgaggcgtctgggtctctcctctcccttgcaggtttgggtttgaagctgaggaactacaaagttgatgatttcttttttatctttatgcctgcaattttacctagctaccactaggtggatagtaaat

SEQ ID NO: 113948 - DNA, 808 bp, Artificial Sequence
  derived and/or modified sequence
tggcggtgacggcggcgcctggcggcggggatttggcgcgggccgggggccgggggccggggcgcgggggcgcgaggctggattcctagggccgcggcgcttcccggcatgctccgctgcaggcccgcgcccgcgcccggactttgccatcggcggggcagtcgcgggatgcgcccgggagccacagcctgaggccctcaggtctctgcaggtgtcgtggaggaacctagcacctgccatcctcttccccaatttgccacttccagcaggtaagacccacctgtcccactctctttcgtggcttcttgaccagatctgctctgacttcatgttctctcaagctttagcccatgaggaggatgtgaccgggactgagtcaggagccctctggaagcatggagactgtggtgattgttgccataggtgtgctggccaccatctttctggcttcgtttgcagccttggtgctggtttgcaggcagcgctactgccggccgcgagacctgctgcagcgctatgattctaagcccattgtggacctcattggtgccatggagacccagtctgagccctctgagttagaactggacgatgtcgttatcaccaacccccacattgaggccattctggagaatgaagactggatcgaagatgcctcgggtctcatgtcccactgcattgccatcttgaagatttgtcacactctgacagagaagcttgttgccatgacaatgggctctggggccaagatgaagacttcagccagtgtcagcgacatcattgtggtggccaagcggatcagccccag

SEQ ID NO: 113949 - DNA, 896 bp, Artificial Sequence
  derived and/or modified sequence
gggatgcgcccgggagccacagcctgagggtttaaaaagctattttaaggccgggctcggtgtctcacgcgtgtaatcccagcactttgggaggcccgaggccctcaggtctctgcaggtgtcgtggaggaacctagcacctgccatcctcttccccaatttgccacttccagcagctttagcccatgaggaggatgtgaccgggactgagtcaggagccctctggaagcatggagactgtggtgattgttgccataggtgtgctggccaccatctttctggcttcgtttgcagccttggtgctggtttgcaggcagcgctactgccggccgcgagacctgctgcagcgctatgattctaagcccattgtggacctcattggtgccatggagacccagtctgagccctctgagttagaactggacgatgtcgttatcaccaacccccacattgaggccattctggagaatgaagactggatcgaagatgcctcgggtctcatgtcccactgcattgccatcttgaagatttgtcacactctgacagagaagcttgttgccatgacaatgggctctggggccaagatgaagacttcagccagtgtcagcgacatcattgtggtggccaagcggatcagccccagggtggatgatgttgtgaagtcgatgtaccctccgttggaccccaaactcctggacgcacggacgactgccctgctcctgtctgtcagtcacctggtgctggtgacaaggaatgcctgccatctgacgggaggcctggactggattgaccagtctctgtcggctgctgaggagcatttggaagtccttcgagaagcagccctagcttctgagccagataaaggcctcccaggccctgaaggcttcctgcaggag

SEQ ID NO: 113950 - DNA, 4434 bp, Artificial Sequence
  derived and/or modified sequence
tccgctcccctctccgtctgccgcccggacgggccaccgcgggggcgcgaggaaggggtgttgggtcgccagggcccgcctcccagctgccccggccgccggggggcctggcggtgacggcggcgcctggcggcggggatttggcgcgggccgggggccgggggccggggcgcgggggcgcgaggctggattcctagggccgcggcgcttcccggcatgctccgctgcaggcccgcgcccgcgcccggactttgccatcggcggggcagtcgcgggatgcgcccgggagccacagcctgaggccctcaggtctctgcaggtgtcgtggaggaacctagcacctgccatcctcttccccaatttgccacttccagcagctttagcccatgaggaggatgtgaccgggactgagtcaggagccctctggaagcatggagactgtggtgattgttgccataggtgtgctggccaccatctttctggcttcgtttgcagccttggtgctggtttgcaggcagcgctactgccggccgcgagacctgctgcagcgctatgattctaagcccattgtggacctcattggtgccatggagacccagtctgagccctctgagttagaactggacgatgtcgttatcaccaacccccacattgaggccattctggagaatgaagactggatcgaagatgcctcgggtctcatgtcccactgcattgccatcttgaagatttgtcacactctgacagagaagcttgttgccatgacaatgggctctggggccaagatgaagacttcagccagtgtcagcgacatcattgtggtggccaagcggatcagccccagggtggatgatgttgtgaagtcgatgtaccctccgttggaccccaaactcctggacgcacggacgactgccctgctcctgtctgtcagtcacctggtgctggtgacaaggaatgcctgccatctgacgggaggcctggactggattgaccagtctctgtcggctgctgaggagcatttggaagtccttcgagaagcagccctagcttctgagccagataaaggcctcccaggccctgaaggcttcctgcaggagcagtctgcaatttagtgcctacaggccagcagctagccatgaaggcccctgccgccatccctggatggctcagcttagccttctactttttcctatagagttagttgttctccacggctggagagttcagctgtgtgtgcatagtaaagcaggagatccccgtcagtttatgcctcttttgcagttgcaaactgtggctggtgagtggcagtctaatactacagttaggggagatgccattcactctctgcaagaggagtattgaaaactggtggactgtcagctttatttagctcacctagtgttttcaagaaaattgagccaccgtctaagaaatcaagaggtttcacattaaaattagaatttctggcctctctcgatcggtcagaatgtgtggcaattctgatctgcattttcagaagaggacaatcaattgaaactaagtaggggtttcttcttttggcaagacttgtactctctcacctggcctgtttcatttatttgtattatctgcctggtccctgaggcgtctgggtctctcctctcccttgcaggtttgggtttgaagctgaggaactacaaagttgatgatttcttttttatctttatgcctgcaattttacctagctaccactaggtggatagtaaatttatacttatgtttccctcaagtgtgtagttattgagtcaaattcatatgcatggtgtattgtgggacatacttagatggaaggagagagcctaagaatcctgaggatgatttctgtgtatgcctcaaaatgagatatttaggctgggcgcggtggctcacacctgtaatcctcgcactttgggaggctaaggtgggtggattgcttgagcccaggagtttgagaccagcctgggcaacatggtgaaacctcatctctacacaaactacaaaaattagctgggcatggtgacacgtgcggctgcttggtaggctgaggtgggaggatcgcttgagcccaggaggtgaaggttgcagtgagccctgattgtgccactgcattccagcctgggcgacagagtgagaccatgtctccaaaacatacatatatataaaatatatttaaagacctcttggagttcaggcagaagtgaagatagcactatgaagtagtttccacattaacaatagcaatgacttgaacgatgtgttccccctttcttctgatattaatatctgttcattttgcaaacattgaaagattatgaaagctatgacccagaatcacaattatataatttggatacatacccaaatggcataatttctgtcataagcctgtaggaaaagcttgaattcttcacttctcagattctcagagccagcttgctcttgggagaggggcctggtataggggctgcccaggttcgtagcctatgctgtcaagcatgtttggagttgcacatctgttcccatgtcattttctctgtctaactgaagtcagaaaattcctcagctggattctggggaaccaggaacccatattcccaaatccaagattgggacctggtttgtctttccatttgggcacatttcattctttccaggaaaacaggccacttccaacctgcacaatgtacaccaaaccacagaaccacagctgggatatggagtcaggagagggaagctggagctcaactctcatggactaaaggatggattctggatgggctccaggggacaccttattggattggtggcttccatcaactcttaaaaacgttaagtggtgaactttcccgtcctgtcaagctgtgaatggggaatgtatacaaagtcactttgacttttctatttgaggcctccacagtaaacatccagagtcatcctatttttgtctttttacctccctttcagaacctgttttcgtaattagactggaaagcaattcatgctaagtttgcaatggctgccacagttgtaagtgtcccctgcattttaacctgcactagagccctaagccacagagaagcagttctgaattggtatctcaaataccatccacctggtgtgggtctgcagggtggagagctttcccagcacccctgaagcaatgcccaatgtcgattaccttctctgagtcctggcaagtcctggcacattggctttctggatcccttagatgctgccctttctgttgtgaggagaggttgccgaagatattggaggtgtctgctggactgtaggatttctgatcccactgctgtgtagtttttttttctagtgctggacaagtaagaagcctctggataaatttggtgttggtggctgatggttgaagtggaagcagtctttggggtaggaggcaatgccactcctctaggcccttcgggagttggctgaagttacttcctcccttggaaggggctggttagtgagtgccagggatctcaggactgtctctgtgccaggtgtggtttcccaggcaacagacacattcctaagtgcctagttctctagcgtctgtatacatggtagtagagccttccttccatgtctctcttccctctggcctggaataggagcattagactcaaattctgatgaaaaagaaattacttggagatagagattcaatgtgaagagaacaagatatttgaagtcagaattaggtttgaatttgggctcagtgacttacagtgtgagcttggtcaagttcttaacattctggtccttagcattctcatctgtatggtcaaggctattgtcattgggttggtatgtcaacaagcaaaacggtatgtgtgagctgcccaattgtgggcctggttctgattagccaatgttaacacccttctctccacagcttcccattctctgatgccgctgacccagatggcgtcacctcagttaccatggcttggtccaagcagtgacttctgttcatgggctctggaattgagtggccaaaaatctggaatccctacagtagggagagtagccttgtccctgccccactacaagtctgttcatatgaagacatacaaagccgtcgcctctaatcagtgttcaaagggtcgattgtgcaactcacattcctccagagaaattcccccagcttgtgagatctccaagagggaacacgtattcctggcatccaacttcccctggtgctccccctgacctgcctcattccaggagttccctctccagagaccctgtgtgcccacacgagcagacttttagaaaatggcctacagttcaaaggccctgcattgctttatggccttggaaatgtggggaaagtgtcagatgaagaatttctatcctcctcacctcctccctgtctccaataaatgcataccaaga

SEQ ID NO: 113951 - protein, 648 aa, Artificial Sequence
  derived and/or modified sequence
MATAVEPEDQDLWEEEGILMVKLEDDFTCRPESVLQRDDPVLETSHQNFRRFRYQEAASPREALIRLRELCHQWLRPERRTKEQILELLVLEQFLTVLPGELQSWVRGQRPESGEEAVTLVEGLQKQPRRPRRWVTVHVHGQEVLSEETVHLGVEPESPNELQDPVQSSTPEQSPEETTQSPDLGAPAEQRPHQEEELQTLQESEVPVPEDPDLPAERSSGDSEMVALLTALSQGLVTFKDVAVCFSQDQWSDLDPTQKEFYGEYVLEEDCGIVVSLSFPIPRPDEISQVREEEPWVPDIQEPQETQEPEILSFTYTGDRSKDEEECLEQEDLSLEDIHRPVLGEPEIHQTPDWEIVFEDNPGRLNERRFGTNISQVNSFVNLRETTPVHPLLGRHHDCSVCGKSFTCNSHLVRHLRTHTGEKPYKCMECGKSYTRSSHLARHQKVHKMNAPYKYPLNRKNLEETSPVTQAERTPSVEKPYRCDDCGKHFRWTSDLVRHQRTHTGEKPFFCTICGKSFSQKSVLTTHQRIHLGGKPYLCGECGEDFSEHRRYLAHRKTHAAEELYLCSECGRCFTHSAAFAKHLRGHASVRPCRCNECGKSFSRRDHLVRHQRTHTGEKPFTCPTCGKSFSRGYHLIRHQRTHSEKTS

SEQ ID NO: 113952 - DNA, 4055 bp, Artificial Sequence
  derived and/or modified sequence
ccgacccgctaggccccgcgcggctcggatccggcggcgctgtttcggtcgggagtgggtgggagagaagccggggcaggggaggagccgccggagctgtcggagccgtgacacccagggcagctacactcagaagccacaaggaatgctagtggagcccctcatccctcccagcttctcttccaagctgccccgtggggcttgatccaggaagctacttcagaaagtagacaatcattccaagggtacaacaaggtttaccacaatgtgagggactcagccattgcaaattgtacagatgagggcccttggaagaaaatcctcgctgtgtccaggctgaggcggggggctaatgacagtgtgagctctagatggtgtgagaccaccccaaagccaagaaatggctacagccgtggaaccagaggaccaggatctttgggaagaagagggaattctgatggtgaaactggaagatgatttcacctgtcggccagagtctgtcttacagagggatgacccggtgctggaaacctcccaccagaacttccgacgcttccgctaccaggaggcagcaagccctagagaagctctcatcagactccgagaactttgtcaccagtggctgagaccagagaggcggacaaaggagcagatcctagagctgcttgtgctggaacaatttcttaccgtcctacctggagaactacagagctgggtgcggggccaacggccagaaagtggcgaggaggcagtgacgctggtggagggtttgcagaaacaacccaggagaccaaggcggtgggtgactgtccatgttcacggccaggaagtcctgtcagaggagacggtgcatttaggagtggagcctgagtcacctaatgagctgcaggatcctgtgcaaagctcgacccccgagcagtctcctgaggaaaccacacagagcccagatctgggggcaccggcagagcagcgtccacaccaggaagaggagctccagaccctgcaggagagcgaggtcccagtgcccgaggacccagaccttcctgcagagaggagctctggagactcagagatggttgctcttcttactgctctgtcacagggactggtaacgttcaaggatgtggccgtatgcttttcccaggaccagtggagtgatctggacccaacacagaaagagttctatggagaatatgtcttggaagaagactgtggaattgttgtctctctgtcatttccaatccccagacctgatgagatctcccaggttagagaggaagagccttgggtcccagatatccaagagcctcaggagactcaagagccagaaatcctgagttttacctacacaggagataggagtaaagatgaggaagagtgtctggagcaggaagatctgagtttggaggatatacacaggcctgttttgggagaaccagaaattcaccagactccagattgggaaatagtctttgaggacaatccaggtagacttaatgaaagaagatttggtactaatatttctcaagtgaatagttttgtgaaccttcgggaaactacacccgtccaccccctgttagggaggcatcatgactgttctgtgtgtggaaagagcttcacttgtaactcccaccttgttagacacctgaggactcacacaggagagaaaccctataaatgtatggaatgtggaaaaagttacacacgaagctcacatcttgccaggcaccaaaaggttcacaagatgaacgcgccttacaaatatcccctaaaccggaagaatttggaagagacctcccctgtgacacaggctgagagaactccatcagtggagaaaccctatagatgtgatgattgcggaaagcacttccgctggacttcagaccttgtcagacatcagaggacacatactggagaaaaacccttcttttgtactatttgtggcaaaagcttcagccagaaatctgtgttaacaacacaccaaagaatccacctgggaggcaaaccctacttgtgtggagagtgtggtgaggacttcagtgaacacaggcggtacctggcgcaccggaagacgcacgctgctgaggaactctacctctgcagcgagtgcgggcgctgcttcacccacagcgcagcgttcgccaagcacttgagaggacacgcctcagtgaggccctgccgatgcaacgaatgtgggaagagcttcagtcgcagggaccacctcgtcaggcatcagagaacacacactggggagaaaccattcacgtgccctacctgtggaaaaagcttcagcagaggatatcacttaattaggcatcagaggacccactcagaaaagacctcctagctaggtccccatgtgaggagatctgctttcagccctcacctaagggaggtgaggaagaggaaaagccctcttgtcagcctgggaagaccttttcgagggagtctccctgacctgctcagatctgacattacctcttcctgcaactaaacacgagcctgggcagaacctctcagccttcctctacgccttgaggggatgtttcatccaaagtacaacctgaattgaggcttctccttcactggagtgcacctgcctctacctcatgggtataaagtaggagaactaagagacttaagaggtcgtggttcctatatcgtccaaaaaataggctgttacatatcctaaagactgctcaacagcttcaagttgaaagtggccaaggacagccccttaggtttgggaagggacgagcctgaaggattctgtctttactggggtcaaatcttaaagcacacagctctggactcaagacaggaggtttgcgtcctgatggctttgccacacattcacaggataactgcatagatccctcgctgtctgattcacttcttaccatgcactttcctttgatgctgaggagaaatggaagtgggcgaaaaatctcaaggctgcttcatgtggaccttgtcaagctgctccctcccccagcgtcaaattgttatcaggtgccaaacactgctagaaaggagggcctagtcagaagcctctttccatacgagttttggttttgtttttaatatttttttctattaaaatactcatgcatttaaccttcccgttattcaaccagtctcttggttgcatccctagcacttctactacaagtgagatggtagtgtttgagtgcttattgagtaaagcataattcggtcataatgaaatcgttcacattccctcatatgcacaagcccaccaaccccttcacaccccccttcacaggggtcgtatgagtaaggggatttggaaactgtcaacttacaaaggcactataacaattacagaatcatgattgccatgggccactttatttacatgaagacaactggagaacgactaagaccaaattatggaaaataagaaaaagctgttgctggcaagaccatcaagactgttctgacaccctgtccccatcatccctgactgagtactctgacatcacggaaagtgttgaacctgggaccctgaggaattcaccaggagtaaatggctttcatgtatttgtgttgtttgctttttcttacgtgattttatgttcatagagctagaaagtagcatctcatgatggcccaacaatctctgttgccagttaaaggttccttggagatgaggctgaataattatgaacctcaccttctctgattgtgggagtggcaagaactggggagacgtcctccataagtggagcacagggtatggggttaaagcatgacagggagagtcttctgtgcctggtttcttctcctctatctcataatgcattatgggcccgaggaataggggagggttaataagactccaaccctaatggcccaacagggaaattctcattttggtcgatgatattctgatggactggtttggtcttaataccagtcaaccgttgtccttctggaaatatacatatatgaaataaataaaggtaacacttgcagccaagttccctggtttctgggacttcccatcttacccattccttttccagggcttc

SEQ ID NO: 113953 - DNA, 1947 bp, Artificial Sequence
  derived and/or modified sequence
atggccaccgccgtggagcccgaggaccaggacctgtgggaggaggagggcatcctgatggtgaagctggaggacgacttcacctgcagacccgagagcgtgctgcagagagacgaccccgtgctggagaccagccaccagaacttcagaagattcagataccaggaggccgccagccccagagaggccctgatcagactgagagagctgtgccaccagtggctgagacccgagagaagaaccaaggagcagatcctggagctgctggtgctggagcagttcctgaccgtgctgcccggcgagctgcagagctgggtgagaggccagagacccgagagcggcgaggaggccgtgaccctggtggagggcctgcagaagcagcccagaagacccagaagatgggtgaccgtgcacgtgcacggccaggaggtgctgagcgaggagaccgtgcacctgggcgtggagcccgagagccccaacgagctgcaggaccccgtgcagagcagcacccccgagcagagccccgaggagaccacccagagccccgacctgggcgcccccgccgagcagagaccccaccaggaggaggagctgcagaccctgcaggagagcgaggtgcccgtgcccgaggaccccgacctgcccgccgagagaagcagcggcgacagcgagatggtggccctgctgaccgccctgagccagggcctggtgaccttcaaggacgtggccgtgtgcttcagccaggaccagtggagcgacctggaccccacccagaaggagttctacggcgagtacgtgctggaggaggactgcggcatcgtggtgagcctgagcttccccatccccagacccgacgagatcagccaggtgagagaggaggagccctgggtgcccgacatccaggagccccaggagacccaggagcccgagatcctgagcttcacctacaccggcgacagaagcaaggacgaggaggagtgcctggagcaggaggacctgagcctggaggacatccacagacccgtgctgggcgagcccgagatccaccagacccccgactgggagatcgtgttcgaggacaaccccggcagactgaacgagagaagattcggcaccaacatcagccaggtgaacagcttcgtgaacctgagagagaccacccccgtgcaccccctgctgggcagacaccacgactgcagcgtgtgcggcaagagcttcacctgcaacagccacctggtgagacacctgagaacccacaccggcgagaagccctacaagtgcatggagtgcggcaagagctacaccagaagcagccacctggccagacaccagaaggtgcacaagatgaacgccccctacaagtaccccctgaacagaaagaacctggaggagaccagccccgtgacccaggccgagagaacccccagcgtggagaagccctacagatgcgacgactgcggcaagcacttcagatggaccagcgacctggtgagacaccagagaacccacaccggcgagaagcccttcttctgcaccatctgcggcaagagcttcagccagaagagcgtgctgaccacccaccagagaatccacctgggcggcaagccctacctgtgcggcgagtgcggcgaggacttcagcgagcacagaagatacctggcccacagaaagacccacgccgccgaggagctgtacctgtgcagcgagtgcggcagatgcttcacccacagcgccgccttcgccaagcacctgagaggccacgccagcgtgagaccctgcagatgcaacgagtgcggcaagagcttcagcagaagagaccacctggtgagacaccagagaacccacaccggcgagaagcccttcacctgccccacctgcggcaagagcttcagcagaggctaccacctgatcagacaccagagaacccacagcgagaagaccagctag

SEQ ID NO: 113954 - DNA, 1947 bp, Artificial Sequence
  derived and/or modified sequence
atggcaacagccgtcgagcctgaggatcaggatctgtgggaagaagagggaattctgatggtgaagctggaagatgacttcacttgcaggcccgaatcagtcctccagcgggacgatcctgtactggagacctcacatcagaattttcgcagatttaggtatcaagaggcggcttccccacgggaggccctgattcggctcagggagctctgccatcagtggctgaggcctgagaggagaacaaaagagcaaatcctcgagctgctagttcttgaacagttcctgactgtactccccggagagctccagagctgggtgagaggccagcggcccgaatccggagaggaggctgtcaccctcgtagagggactgcaaaaacagccccgcagacctcgccggtgggtgacggttcacgtacacggtcaggaggtgcttagcgaggaaaccgtgcacctgggtgtggagcccgaatcacccaatgagttgcaggaccccgttcaaagttcaacacccgaacagtcaccagaagaaacaacgcagtctcccgaccttggcgcgccagccgagcagcggcctcaccaggaagaagagctgcagactttgcaagaatctgaggtgccagtccctgaggatcccgacctgcccgctgagagatctagcggcgatagcgagatggtggcactgctgactgctctgagtcaggggttagtgaccttcaaggacgttgccgtgtgtttcagccaagaccaatggagcgacctggaccctactcagaaggaattctacggtgagtatgttctcgaggaagactgcgggattgtcgtgagccttagttttcctatccctcgacccgacgagatcagccaggtacgggaagaggaaccttgggtacccgacatccaggagccacaagaaacccaggagccagaaatcctaagtttcacttatacaggagacaggagtaaggatgaggaggagtgcctggaacaggaggatttgagcctggaagatatccacagacccgtcctcggagagcccgagatccaccagacgcccgactgggagattgtgttcgaagacaaccctggtcgtctgaatgaacggaggtttgggacaaatatctcgcaggtcaattcattcgtgaacctgagagagactacgcccgtgcatccactgttgggccggcatcatgattgcagcgtgtgcggaaaaagctttacctgcaactctcatctcgtgagacacttacggactcatacgggggagaaaccttacaagtgcatggagtgtgggaagtcctatacgaggagtagccacctggctagacatcagaaggtacacaaaatgaacgccccgtacaaataccctctgaaccggaagaatttagaggagacaagtccagtgacccaggcagagagaacgccatctgttgaaaagccctataggtgtgacgactgcggcaagcacttcagatggaccagtgacctggtccggcaccagcgcacccatacgggtgaaaagccatttttttgtaccatctgtggcaagagcttctcacagaaatccgttctcactacacatcagagaatccaccttggcggtaaaccttacctgtgtggagagtgcggtgaggatttcagcgagcacagacgatacctggctcatagaaaaacacatgccgccgaggagctgtacttatgcagcgagtgcggtagatgtttcacccactccgccgcctttgccaagcaccttagaggccatgcttctgtgcgcccttgcagatgtaacgaatgtgggaagagcttttcccggcgggaccatctcgtgcgtcaccagagaacccataccggagaaaagccctttacgtgccccacgtgtggcaagagcttctccagaggctaccacctaatccggcatcaacggactcatagcgagaagacctcttag

SEQ ID NO: 113955 - DNA, 1947 bp, Artificial Sequence
  derived and/or modified sequence
atggccactgccgtggagcctgaagaccaggacctgtgggaagaggaggggatcctcatggttaagttagaggacgacttcacatgccgtcccgagagcgtgctgcaacgagatgaccctgtgctggagactagtcaccagaattttcgcagattccggtatcaagaggcggccagcccccgtgaagcattaattcggcttcgcgagctgtgccatcagtggttgcgccccgagagaaggacgaaagagcagatcctagaattactcgtactcgaacaattcctcaccgtgctgcctggagagctacagagctgggtccgtgggcagagacccgaaagcggcgaggaggcagtgaccttggtcgaggggcttcagaaacagcccaggcggccgcgaagatgggtaactgtgcacgtgcacggccaagaggtgctgtccgaggagaccgtccacctcggcgtagagccggagtcacctaacgaactgcaagatcccgttcagagctctacccccgagcagtccccagaagagacaacgcagagcccggaccttggtgctccggccgaacagaggcctcaccaggaggaggaactgcagactttacaggaaagtgaagtgcccgtgcccgaggatcccgacctgcctgctgaacgcagctcaggagactcagagatggtggccctgctcactgccctgtcccagggactggtcacattcaaagatgttgcagtgtgtttctctcaggaccagtggtcagacctcgaccctacacaaaaagaattctacggggaatatgtgctcgaggaggattgtggaatcgtggtgagtctttctttccctattcctaggccagatgaaatatcgcaggtgagagaggaggaaccctgggtgcctgatattcaggagccacaggaaacccaggagcccgaaattctctccttcacatatacaggagaccggtcaaaggacgaggaggaatgcctggagcaggaagatctgagtcttgaagatattcaccgaccggtactaggggaacctgaaattcatcagactcccgactgggaaatcgtgttcgaggataatcctggtcgactgaatgagagacgttttggcaccaatatatctcaggtgaacagttttgttaatctccgggaaactacacctgttcatcctcttttgggccgtcatcacgattgctctgtctgcggaaaatccttcacatgtaactctcatctggtgagacatctccggacacatacaggcgagaaaccgtacaagtgtatggaatgcggaaaaagttacactcgctcttcacacctggcccgccatcagaaggtgcataagatgaacgcgccatataaataccctcttaatcgcaagaacctggaggaaacttcgccagtcacccaggcagaacgtacgccttccgtggaaaagccgtacagatgcgatgattgcggcaaacacttccgctggactagcgacctggtacggcatcagcgcacgcacaccggtgagaaacccttcttttgcaccatctgcggaaaatctttttcccagaagtccgtactaacaacccatcaaaggattcacttaggcgggaagccatacctgtgtggcgaatgcggggaggacttctctgagcatcggcgctatctggctcatcggaaaacacatgctgcggaagaattgtacctctgcagtgaatgcggcagatgcttcactcatagcgcagcatttgccaaacacttgagggggcacgcatccgtgaggccctgtcggtgtaacgagtgtggcaagtccttttccagacgagaccatctggtccgacaccagcgcacacatactggtgagaagccgttcacatgccccacctgtggcaagtcattttctaggggttatcatctcataaggcaccagaggactcactcagaaaagacctcttag

SEQ ID NO: 113956 - DNA, 1947 bp, Artificial Sequence
  derived and/or modified sequence
atggccactgctgttgaacccgaggaccaggacctgtgggaagaagagggaatactcatggttaaattggaagacgattttacatgcaggcccgagagtgtgctccagcgcgatgatcccgtgctggaaactagtcaccagaatttccgtcgttttagataccaagaagcagcttccccccgcgaagcactgatacgcctgagagagctgtgtcatcagtggttacgccctgagaggcgaaccaaggagcagatccttgaactcctcgtgttagaacagttccttacagtactgcccggcgagctgcagagttgggtgcgcgggcagagaccagaatccggagaggaggccgtcacacttgttgaggggctccaaaaacagccaaggcgcccccgcaggtgggtcaccgtgcatgtccacggtcaggaggtgctgtctgaagagacagttcacctgggggttgagcctgagtctcctaacgaacttcaggatccagtccaaagctccactcccgagcagtctcctgaggagaccacccagagcccggatctgggagcgcctgcagaacagcgcccacatcaagaggaggagctgcagaccctgcaggaaagtgaagtacccgtgcctgaggaccctgacttgcccgccgaacgttcgtccggtgactcagaaatggttgctcttctcaccgctttgtcgcagggcttagtgacctttaaggacgtcgctgtttgcttttcacaggaccagtggagcgatctagaccccacccaaaaggagttttatggagagtatgtgttggaagaggattgcggcattgtcgtgtccctgagtttccctatccctagacccgacgaaatatctcaagttcgcgaggaggaaccttgggttcctgacatccaggagccgcaggagacccaggaacctgagattttgtcatttacatataccggagatagatctaaagacgaagaggagtgtctcgagcaggaagatctgtcactggaggacatccatcgtccagttctgggagagcctgagattcaccaaacacccgattgggaaattgtctttgaagacaatcccgggagactgaacgagcgacggttcggaaccaatatcagccaggtgaactcctttgtgaatctgagagaaacaactcccgtgcacccattgctcggtcggcaccacgactgctccgtatgcggcaaatcgttcacgtgcaatagtcacctggtaagacatttgaggacccacacaggtgagaagccctacaagtgcatggagtgcggcaaatcctatacccgatcttcgcatctggcaaggcaccaaaaagtccacaagatgaatgctccttacaagtacccacttaataggaagaacctagaggaaacctccccggtgactcaggctgaacggaccccaagtgttgaaaagccttacagatgcgatgattgtggaaagcactttcggtggaccagtgacctcgtaagacatcaaagaacccatacaggcgagaagccatttttttgtacaatttgtggaaagagcttctcacagaaaagcgtgctgaccactcaccagcggatccatctgggcgggaagccctacctgtgcggggaatgtggagaggatttctccgagcaccggcggtatttggcgcacagaaagactcacgccgccgaggagctgtatctgtgttctgagtgtggcagatgctttacccatagtgccgcgttcgcaaagcatctgcgcggacacgccagcgtcaggccctgccgctgtaacgagtgtgggaaaagtttcagcagacgggatcacctggtcaggcatcaacgtactcacaccggcgaaaagccttttacctgtcctacgtgcggaaagtccttcagtagaggttatcacttgatcagacatcagagaacccattccgagaaaacttcttag

SEQ ID NO: 113957 - DNA, 1947 bp, Artificial Sequence
  derived and/or modified sequence
atggccacagctgtggagcctgaggaccaggacctgtgggaggaggagggcatcctgatggtgaagctggaggatgacttcacctgcaggcctgagagcgtgctgcagagagatgatcctgtgctggagaccagccaccagaacttccgccgcttccgctaccaggaggccgccagcccccgggaggccctgatccggctgcgggagctgtgccaccagtggctgcggcctgagaggaggaccaaggagcagatcctggagctgctggtgctggagcagttcctgactgtgctgcctggagagctgcagagctgggtgcggggccagaggcctgagagcggggaggaggccgtgaccctggtggagggcctgcagaagcagccccggcggccccggcgctgggtgacagtgcacgtgcacggccaggaggtgctgtctgaggagaccgtgcacctgggcgtggagcctgagagccccaatgagctgcaggaccctgtgcagagcagcaccccagagcagagccctgaggagaccacccagagcccagacctgggcgccccagctgagcagaggccccaccaggaggaggagctgcagaccctgcaggagagcgaggtgcctgtgcctgaggaccctgacctgcctgctgagaggagcagcggggacagcgagatggtggccctgctgacagccctgagccagggcctggtgaccttcaaggatgtggccgtgtgcttcagccaggaccagtggagcgacctggaccccacccagaaggagttctacggggagtatgtgctggaggaggactgtggcatcgtggtgtccctgtccttccccatccccaggccagatgagatcagccaggtgcgggaggaggagccctgggtgcctgacatccaggagccccaggagacccaggagcctgagatcctgtccttcacctacacaggagacaggagcaaggatgaggaggagtgcctggagcaggaggacctgagcctggaggacatccacaggcctgtgctgggggagcctgagatccaccagaccccagactgggagatcgtgtttgaggacaaccctggccgcctgaatgaaagacgcttcggcaccaacatcagccaggtgaacagctttgtgaacctgcgggagaccacccctgtgcaccccctgctgggccgccaccacgactgcagcgtgtgtgggaagagcttcacctgcaacagccacctggtgcgccacctgcggacccacactggagagaagccctacaagtgcatggagtgtgggaagagctacaccaggagcagccacctggcccggcaccagaaggtgcacaagatgaatgccccctacaagtaccccctgaacaggaagaacctggaggagaccagccctgtgacccaggccgagaggacccccagcgtggagaagccctaccgctgtgatgactgtgggaagcacttccgctggaccagtgacctggtgcgccaccagaggacccacactggagagaagcccttcttctgcaccatctgtgggaagagcttcagccagaagtctgtgctgaccacccaccagaggatccacctgggcggcaagccctacctgtgtggagaatgtggggaggacttcagcgagcaccggcgctacctggcccacaggaagacccacgccgctgaggagctgtacctgtgcagtgaatgtggccgctgcttcacccacagcgctgcctttgccaagcacctgcggggccacgcctctgtgcggccctgccgctgcaatgaatgtgggaagagcttcagccggcgggaccacctggtgcgccaccagaggacccacactggagagaagcccttcacctgccccacctgtgggaagagcttcagccggggctaccacctgatccgccaccagaggacccacagcgagaagaccagctag

SEQ ID NO: 113958 - DNA, 1947 bp, Artificial Sequence
  derived and/or modified sequence
atggccaccgccgtggagcccgaggaccaggacctgtgggaggaggaggggattctaatggtaaagctcgaagacgacttcacctgtcggcctgaatctgtgctgcagagagacgatcctgtgctggaaactagtcaccagaatttcaggcgcttccggtaccaagaagccgccagcccgagagaggccctcattcgtttaagggaactgtgtcaccagtggctgcggcctgaaagacgtacaaaagagcagatattggaattactggtgctggaacagttcctcactgtcctaccgggggaactgcagtcctgggtccggggccagcgtccagagagtggggaggaggctgtcacattggtcgaaggactgcagaaacagccacgcagaccgcgcaggtgggttacagtgcacgtgcatggccaggaagtgctgtcagaggaaaccgtgcacctgggggtagaacccgaatcccccaatgaactccaggaccccgtccagagctctaccccagaacaaagtccagaggagaccacacagtcccctgacctgggcgctcctgcagagcaacgtcctcaccaagaagaagagctgcagaccctgcaggaaagtgaggtcccggtcccagaagacccggatttgccagctgagcgatcaagtggggacagtgaaatggtggctttgctgacggcactttctcaaggtctggtaaccttcaaagacgttgcagtatgttttagtcaagaccaatggagtgatctggacccaacacaaaaagagttttacggcgaatatgtcctggaggaagactgtggtattgtcgtgagtttatctttcccaattcctcggcctgacgagatttcccaggttagagaggaggagccttgggttcctgatattcaggaaccccaggagacacaggagccggagatcttatcttttacctacacaggggacagaagtaaggacgaagaagaatgcctggagcaggaagatctgagcctggaagacatacacagacctgtcctgggcgaacccgaaatccaccagacacccgactgggaaatcgtcttcgaagacaaccctggcaggctgaacgaacggcgatttggcaccaacataagccaggtcaacagttttgtaaacctgcgggagacaactcccgtccaccctttgttaggaagacaccacgactgtagtgtatgcggtaaaagctttacatgtaactcgcatttggtgcggcatctccggacccacaccggagagaagccgtataaatgcatggagtgtgggaaaagttacactcggtcgtcacatcttgcccgacaccaaaaggtacataaaatgaatgctccttataaatacccactgaatcggaagaacttggaggagacctcacctgttactcaggccgagaggacaccttctgtagaaaagccttatcgatgcgatgattgtgggaagcacttccgctggacttcggacttggttcggcaccagagaacccacacaggggagaagccgtttttctgtaccatttgtggcaaaagcttcagtcaaaagtcagtgttaaccacgcatcagcgtattcatctaggagggaagccctacttatgcggcgaatgtggcgaggatttttctgagcacaggcggtacctggcccatcggaaaacccatgcagccgaggaactatatttatgctctgagtgtggccgatgtttcactcattccgccgcattcgccaaacacctccgaggtcatgccagcgttcgcccctgtcgttgtaatgagtgcggcaaaagcttctcccgtcgggaccacctggttaggcaccaacgaacgcacactggcgagaagcctttcacctgccccacttgcggcaaatctttcagccgcgggtaccacctgatcagacaccagcggacccatagtgaaaaaaccagttag

SEQ ID NO: 113959 - DNA, 1947 bp, Artificial Sequence
  derived and/or modified sequence
atggccaccgccgtggagcccgaggaccaggacctgtgggaggaggagggtatcctgatggttaaattggaggatgacttcacctgcagaccagaatcagtcctgcagcgtgatgatcccgtactggaaacttcccatcagaactttcgaaggttccggtatcaagaagccgcctccccaagagaggcactcatccggcttcgggagttatgccaccagtggctaaggcccgaaagacgaacgaaggaacagatccttgagctgttggtcctggagcagttcctgactgtgttgcctggggagctgcagagctgggtgcgcggacaaaggccagagtctggggaagaggccgtgaccctggtggagggattgcaaaaacagccacggaggccccgaagatgggtgacagtacatgtgcacggccaggaggtgctctccgaagagactgttcacctcggagttgaaccagagagcccgaatgagctacaggatcccgttcagtctagcacgcccgaacagagtccagaggaaactacccagagccctgatctgggcgcacctgctgagcagaggccacatcaggaggaagaactgcagaccttgcaggagtcggaagtgccagttccggaggaccccgatctgccggcagagcgaagctctggagattcggaaatggtggccctgctcaccgccctgtctcaagggctggtgactttcaaagatgtcgccgtctgcttctctcaggaccagtggtcagacctggatccaacacagaaggagttttacggggagtacgtactagaggaggattgtggaattgtggtgtctttgagctttccaatccctcggcccgacgaaataagccaggtgagggaagaagagccttgggtgcccgacattcaggagccacaagagacccaggaaccagagattttgtctttcacctacactggggacagatccaaggatgaagaagaatgcctagagcaagaggaccttagcctggaagatattcataggcctgtgttaggcgagcctgagattcatcaaactcccgattgggagattgttttcgaagataatccaggacgactcaacgagagacgcttcgggacaaatatttcccaggttaatagcttcgtcaatcttagggaaaccaccccagttcaccctctgctaggaaggcatcacgactgctctgtgtgcggaaaaagctttacctgtaactcccacctggtccgccatcttagaacacataccggagagaaaccttacaagtgtatggagtgtggtaaatcgtacaccaggtcctcacatctcgcccgccaccagaaggtccacaagatgaatgcaccttacaaataccccctgaataggaagaacctggaggagacctccccagtcacgcaagcagaaagaacaccttccgtggagaagccatacaggtgcgacgattgtggaaagcactttcgatggactagcgatctagtgcgtcaccagcgaacgcacactggggaaaagccttttttttgcaccatctgcggcaagagctttagccagaagtccgtgcttacaacccaccaaaggattcatcttggcggtaaaccctatctctgtggcgaatgcggggaggatttctccgaacatcgccgatatctagcacaccgaaaaactcacgctgctgaggaactctacctgtgctccgaatgcggccggtgcttcacgcacagtgcagcattcgccaaacatctgcggggccacgcttcagtacgcccttgccggtgtaatgaatgcggtaaaagcttttcccgaagagaccacctcgtccgacatcagcgcacccatacaggcgagaagccgttcacgtgcccaacgtgcggaaagtctttcagccgcggctaccatctcatccgccaccagagaacacactcagagaaaacaagctag

SEQ ID NO: 113960 - DNA, 1947 bp, Artificial Sequence
  derived and/or modified sequence
atggccaccgccgtggagcccgaggaccaggacctgtgggaggaggagggaatccttatggtgaaattggaagatgacttcacatgtcgccctgagagcgttttgcagcgcgacgaccccgtactggagaccagccaccagaatttccgccggtttaggtatcaggaggctgccagcccccgagaagcactgataagacttcgagagctctgccaccagtggttacggccagagcgtcggactaaggagcagattctggaactactcgtgctcgagcagtttttgaccgtgctgcctggagagttgcagtcttgggtgagggggcagaggcctgagagcggcgaagaggccgtgacactcgtcgagggcctccaaaagcagccgcgccgtccgagacggtgggtgaccgtgcatgtccacggccaagaggtacttagtgaggagaccgtgcacctcggggtcgagccagaatcgcccaacgagctgcaggacccagtacagagctcaacgcctgagcaatcccccgaggagaccactcagtcacccgacctaggggcccctgccgaacaacgaccccaccaggaagaagagctccagacattgcaggaaagtgaggtgcctgttccagaggaccccgatctccctgcagaaagatctagcggcgatagcgagatggtggcccttctgacagctctcagccagggattggttacgttcaaggacgtggctgtgtgcttcagtcaagatcagtggtcggacttagatcccacccagaaggaattctacggcgaatatgttcttgaggaggactgcgggatcgtagtctctcttagcttccccattccacgccccgatgagatctcccaggtgcgagaggaggagccctgggtgccagacatccaggagccccaggagacacaggaaccggagatactgtcttttacctataccggagaccggtccaaggacgaggaagaatgcttggagcaggaagacctgtcattggaggacatacataggcctgtactgggtgagcctgagattcaccagacgccggattgggagatcgtgtttgaagataacccaggccgactgaacgaacggcggttcggaactaatatctcccaggtgaattccttcgtgaatctgagagaaacgactcccgtgcacccattgctgggtcgccaccacgactgttctgtttgtgggaaatccttcacctgcaacagccacctagtccggcatctcaggactcataccggtgagaaaccgtataagtgcatggaatgtggaaaatcatacactcgatcctcacaccttgctagacaccagaaagttcacaagatgaacgcaccctacaaataccctctcaacaggaagaacctggaagagacatcacccgtcacgcaagctgagaggactccctcggtggagaaaccataccgctgtgacgactgtggaaagcattttagatggacaagcgacttagtcaggcaccagaggactcataccggagaaaagccatttttctgtactatctgtgggaagtcatttagtcagaaatctgtgctcaccacccaccaacggattcacttagggggcaagccttacttgtgcggcgaatgtggagaagacttctcggagcaccggagatatctcgcccacagaaaaacacacgcagcagaggagctctacctctgctcggaatgcggacgctgtttcacccactcagccgccttcgcgaagcacttgcgcggacacgccagcgtccggccatgcaggtgtaacgagtgtggcaaatccttctcccgccgcgatcatctggtcaggcatcagagaactcatactggagagaagcccttcacctgccccacatgtgggaagtcctttagcaggggctaccacttaattagacatcagcgcactcactctgagaaaacaagctag

SEQ ID NO: 113961 - DNA, 1947 bp, Artificial Sequence
  derived and/or modified sequence
atggcaacagccgtggaaccagaggaccaggacctatgggaggaagagggaatcctaatggttaaactggaagatgatttcacgtgccgcccagaaagcgtgctgcaacgggacgaccccgtgttagaaacatctcaccagaattttcggaggttccgctaccaagaagctgctagccctcgcgaagccctcattcggcttcgggagttgtgccaccagtggctgagacctgagcgacgaaccaaggagcagatcctggaactgctggtactggagcaatttcttaccgtgttgcccggagagctgcaatcgtgggttcgcggacagaggcccgagtctggggaggaggcggtgacactggttgaagggctacagaaacagcctcgccgtccccgtaggtgggtgacggtccatgtgcatggacaggaagtactgtcggaagaaacagtgcatcttggggttgagccagagagtccaaatgaattacaggacccggtgcagtcaagcacacctgagcaatcaccagaggagacaacacaatctcccgacctgggagctccagcagaacagcgaccacatcaggaggaggaactgcaaactctgcaggagagcgaggtcccagtacccgaggaccccgatctgcctgccgaaagaagtagcggcgactccgagatggtggccctcctcacagctttatctcagggcctggtaacttttaaggatgtggctgtatgcttctctcaagaccagtggagcgatctggaccctacacagaaagaattctacggcgaatacgtgcttgaggaagactgtggtatcgtggtctcccttagttttcccataccaagacccgatgaaatttctcaggttcgagaggaggagccctgggtacccgatattcaagagccccaggaaacccaagagccagaaatcttaagtttcacttatacaggcgataggagtaaggatgaagaggaatgcctggagcaagaagacctttcactggaagatattcatagacctgttctcggcgagccggagattcaccaaacgcccgactgggaaatagtctttgaagataatcctggaagactgaatgagagacggttcggcacgaatatcagccaggttaattccttcgttaacctccgcgagaccacccccgtgcacccacttctggggagacatcacgactgctctgtgtgtgggaagagcttcacctgcaatagccacctggtgcggcatctgcgaacccacacgggggagaagccttacaagtgtatggagtgcggcaagtcgtatacacgaagcagccacctggccaggcaccagaaagtacacaaaatgaacgccccatacaaatatcctctgaaccgcaagaatctcgaggagacttcaccagttactcaggccgaacgcacgcccagtgtggaaaagccctacagatgtgacgactgcggaaaacactttagatggacttccgacctcgtcaggcaccagagaacacacacgggagagaagccatttttttgtacaatctgcggcaaaagcttttcacagaaatccgttctgaccactcaccagcgtatccatctgggaggtaaaccatacctttgcggggagtgtggagaggatttctctgaacataggcgctatcttgcccaccggaaaacgcacgccgcagaggagctctatctttgctccgagtgtggcaggtgctttactcattccgcagcctttgccaaacacctgaggggacacgcctcagtgcgcccttgccgatgtaatgaatgtgggaagtcattctctcgcagagaccacctcgtgcggcatcagaggacacatactggggaaaaacccttcacgtgccctacttgcgggaaatctttctcccggggttaccatctgatccggcaccagaggacccacagtgaaaagacctcttag

SEQ ID NO: 113962 - DNA, 1947 bp, Artificial Sequence
  derived and/or modified sequence
atggctaccgctgtcgaaccggaagatcaagatctctgggaggaagaggggattctcatggtgaagttggaggacgacttcacttgcaggcccgaatcagttctgcagcgcgacgatcccgtgttggagactagtcaccagaactttcggaggtttaggtatcaggaggccgcatcccccagagaagccttgatccgtctgagagagctctgtcaccagtggctcagaccagagaggcgcaccaaggagcaaatccttgaactgctggttttagagcagtttttaactgtgcttccgggtgagctgcagtcttgggtgcgtggacagcgacctgaatctggtgaagaggccgtgacccttgtggaaggcctgcagaagcagcctcggaggcctcggagatgggtgacagtacatgtacacgggcaggaggtgctgtcagaggaaacggtgcatctcggtgtggaacccgagtctccgaacgagttgcaggaccccgtgcaatcgagcacgccagagcagagccctgaagagacaacacagtctcccgatctgggtgccccagctgagcaaagaccccatcaggaagaagagctgcagacattacaggaatcagaggtcccagtccccgaggaccccgacttgcccgctgaacggtcctctggtgacagcgagatggtagcactccttacggctctgtctcaagggctggtgacatttaaggatgttgctgtttgcttcagtcaggaccagtggtcagacttagatcccacacagaaagagttctacggggagtatgtccttgaagaggactgtgggattgtggtgtccctgtcattccccattcctcggcctgatgagatatcccaagtaagggaggaggagccgtgggtgcctgatatccaggaacctcaggaaacccaggaacctgaaattctgagtttcacctatacaggtgatagatccaaggacgaagaggaatgtcttgaacaggaggatttaagcttggaggatatccatcgaccggtgctgggcgagcccgaaatccatcaaacacctgattgggagatcgttttcgaagataatccgggacggctcaacgagcgacgatttgggaccaatatctcacaggtcaactcattcgtgaacctaagagagaccacccctgtgcatcccttattaggcaggcatcacgattgcagcgtctgtgggaagtcctttacatgtaatagccacctcgtgcggcacctacggacccacaccggagagaagccgtataaatgtatggagtgcggcaagtcatacactcgtagttcgcatttagctagacatcaaaaagtacacaaaatgaatgcaccgtacaaataccccctcaacaggaaaaacctcgaagagacatcccccgtgactcaggccgaacgcactccgtccgtagagaaaccgtacagatgtgacgattgcggcaagcattttcggtggacaagcgatctcgtgagacatcagaggacccacacaggagaaaagccctttttttgtacaatctgtggcaagagtttcagtcaaaagtcagtattaaccacacatcaaaggattcacctgggcggaaagccctacttgtgtggcgagtgcggcgaagatttttccgaacatcggaggtaccttgcgcacaggaaaactcacgcagctgaagaactgtacctgtgcagtgagtgtggtagatgctttacacactcagcagcctttgctaagcatcttcgcggacacgctagtgtacgcccttgcaggtgcaatgagtgtggtaagtccttctcaaggagggatcatcttgtgcgccaccagaggacacacaccggcgagaagcccttcacatgtcccacatgcgggaaatcattctcaaggggatatcatctcatccgccaccagaggacccactccgagaagacatcttag

SEQ ID NO: 113963 - DNA, 1947 bp, Artificial Sequence
  derived and/or modified sequence
atggcaacagctgtagaacctgaagaccaagatctgtgggaggaagaggggatacttatggtgaagttggaagatgacttcacgtgcaggcctgagagcgtcttgcaaagagacgatcccgttctagaaacatcccaccagaattttcgcagattccgataccaggaagcggcatcccccagagaggcacttattagactgagggaactttgtcaccagtggttacgccctgaacgaaggacgaaagagcagatcctggaactgttggtgctggagcagttcttgaccgtgctgcccggagagctgcagtcatgggtgagaggccagcgaccagagagtggtgaggaagccgtgaccctggtcgagggactgcagaaacagccgagacgtccacggcgatgggtcacggtgcacgtccacggccaagaggtgctgagcgaggaaaccgtgcacctgggcgtcgagcctgaatctcccaacgagctgcaagatccagttcaaagctctacccctgagcagagccccgaggagacgactcagagcccggaccttggggctcccgctgagcagaggcctcaccaagaggaggaattacaaaccctgcaggaaagtgaggttccggtaccagaggaccctgacctacctgctgaaagaagcagcggcgactcagagatggtggccctgctgaccgccctcagccagggtttagtaactttcaaggatgtggccgtatgcttcagtcaagatcaatggagcgatctcgatccaacacaaaaggaattctatggcgagtatgtgctcgaagaagactgtgggatagtcgtaagcctcagtttcccaatccccagacccgatgaaatcagccaggttagagaggaagaaccctgggtgcctgacatacaggagccacaggaaacccaggagccggagatcctatcattcacatatacgggagaccgatccaaagacgaggaggaatgtctggagcaggaggacctttcactggaggacatccatcgccctgtccttggggaacccgaaatccaccagacaccggattgggagatcgttttcgaggacaacccagggaggcttaacgaaaggcgcttcgggactaacatttctcaggtaaactctttcgtaaacctccgcgagaccaccccagtccaccctctcctgggtcggcaccatgattgtagcgtgtgcggcaagagctttacctgtaatagccacctggtgcgacaccttagaacacacacgggggagaagccctataagtgcatggaatgtgggaaaagctatacacgttcttcacacctcgcacggcatcagaaagtgcataaaatgaacgccccttataagtaccctctgaacagaaagaacctcgaagaaacatcccccgtcacgcaggctgagcgcaccccatcagtagaaaagccttatcggtgcgacgattgcggtaaacatttccgttggaccagcgacctggtcagacaccagcggacacatactggagagaagccatttttttgtaccatatgtgggaagtccttctcccagaaaagcgtgctcaccactcatcagcgcatccatttaggcggtaaaccatatctctgtggtgaatgcggcgaggatttttctgaacacagacgatacctggcccatcgcaaaacacacgcggcagaagaactgtacttgtgcagcgaatgcggtcgttgcttcacacacagtgcggcatttgcgaagcacctgagagggcacgcatcagtccggccatgtaggtgtaatgagtgcgggaagtccttcagccgcagagatcatctggtgcgacaccagcgaacgcataccggtgaaaagccattcacatgccctacgtgcggaaaatcattcagccggggttatcacttaattcgtcaccagcggacccatagtgaaaaaaccagctag

SEQ ID NO: 113964 - DNA, 4130 bp, Artificial Sequence
  derived and/or modified sequence
aaggccccacgtgttccgacccgctaggccccgcgcggctcggatccggcggcgctgtttcggtcgggagtgggtgggagagaagccggggcaggggaggagccgccggagctgtcggagccgtgacacccagggcagctacactcagaagccacaaggaatgctagtggagcccctcatccctcccagcttctcttccaagctgccccgtggggcttgatccaggaagctacttcagaaaggttgtgggatagccttgggaggagggcccttggaagaaaatcctcgctgtgtccaggctgaggcggggggctaatgacagtgtgagctctagatggtgtgagaccaccccaaagccaagaaatggctacagccgtggaaccagaggaccaggatctttgggaagaagagggaattctgatggtgaaactggaagatgatttcacctgtcggccagagtctgtcttacagagggatgacccggtgctggaaacctcccaccagaacttccgacgcttccgctaccaggaggcagcaagccctagagaagctctcatcagactccgagaactttgtcaccagtggctgagaccagagaggcggacaaaggagcagatcctagagctgcttgtgctggaacaatttcttaccgtcctacctggagaactacagagctgggtgcggggccaacggccagaaagtggcgaggaggcagtgacgctggtggagggtttgcagaaacaacccaggagaccaaggcggtgggtgactgtccatgttcacggccaggaagtcctgtcagaggagacggtgcatttaggagtggagcctgagtcacctaatgagctgcaggatcctgtgcaaagctcgacccccgagcagtctcctgaggaaaccacacagagcccagatctgggggcaccggcagagcagcgtccacaccaggaagaggagctccagaccctgcaggagagcgaggtcccagtgcccgaggacccagaccttcctgcagagaggagctctggagactcagagatggttgctcttcttactgctctgtcacagggactggtaacgttcaaggatgtggccgtatgcttttcccaggaccagtggagtgatctggacccaacacagaaagagttctatggagaatatgtcttggaagaagactgtggaattgttgtctctctgtcatttccaatccccagacctgatgagatctcccaggttagagaggaagagccttgggtcccagatatccaagagcctcaggagactcaagagccagaaatcctgagttttacctacacaggagataggagtaaagatgaggaagagtgtctggagcaggaagatctgagtttggaggatatacacaggcctgttttgggagaaccagaaattcaccagactccagattgggaaatagtctttgaggacaatccaggtagacttaatgaaagaagatttggtactaatatttctcaagtgaatagttttgtgaaccttcgggaaactacacccgtccaccccctgttagggaggcatcatgactgttctgtgtgtggaaagagcttcacttgtaactcccaccttgttagacacctgaggactcacacaggagagaaaccctataaatgtatggaatgtggaaaaagttacacacgaagctcacatcttgccaggcaccaaaaggttcacaagatgaacgcgccttacaaatatcccctaaaccggaagaatttggaagagacctcccctgtgacacaggctgagagaactccatcagtggagaaaccctatagatgtgatgattgcggaaagcacttccgctggacttcagaccttgtcagacatcagaggacacatactggagaaaaacccttcttttgtactatttgtggcaaaagcttcagccagaaatctgtgttaacaacacaccaaagaatccacctgggaggcaaaccctacttgtgtggagagtgtggtgaggacttcagtgaacacaggcggtacctggcgcaccggaagacgcacgctgctgaggaactctacctctgcagcgagtgcgggcgctgcttcacccacagcgcagcgttcgccaagcacttgagaggacacgcctcagtgaggccctgccgatgcaacgaatgtgggaagagcttcagtcgcagggaccacctcgtcaggcatcagagaacacacactggggagaaaccattcacgtgccctacctgtggaaaaagcttcagcagaggatatcacttaattaggcatcagaggacccactcagaaaagacctcctagctaggtccccatgtgaggagatctgctttcagccctcacctaagggaggtgaggaagaggaaaagccctcttgtcagcctgggaagaccttttcgagggagtctccctgacctgctcagatctgacattacctcttcctgcaactaaacacgagcctgggcagaacctctcagccttcctctacgccttgaggggatgtttcatccaaagtacaacctgaattgaggcttctccttcactggagtgcacctgcctctacctcatgggtataaagtaggagaactaagagacttaagaggtcgtggttcctatatcgtccaaaaaataggctgttacatatcctaaagactgctcaacagcttcaagttgaaagtggccaaggacagccccttaggtttgggaagggacgagcctgaaggattctgtctttactggggtcaaatcttaaagcacacagctctggactcaagacaggaggtttgcgtcctgatggctttgccacacattcacaggataactgcatagatccctcgctgtctgattcacttcttaccatgcactttcctttgatgctgaggagaaatggaagtgggcgaaaaatctcaaggctgcttcatgtggaccttgtcaagctgctccctcccccagcgtcaaattgttatcaggtgccaaacactgctagaaaggagggcctagtcagaagcctctttccatacgagttttggttttgtttttaatatttttttctattaaaatactcatgcatttaaccttcccgttattcaaccagtctcttggttgcatccctagcacttctactacaagtgagatggtagtgtttgagtgcttattgagtaaagcataattcggtcataatgaaatcgttcacattccctcatatgcacaagcccaccaaccccttcacaccccccttcacaggggtcgtatgagtaaggggatttggaaactgtcaacttacaaaggcactataacaattacagaatcatgattgccatgggccactttatttacatgaagacaactggagaacgactaagaccaaattatggaaaataagaaaaagctgttgctggcaagaccatcaagactgttctgacaccctgtccccatcatccctgactgagtactctgacatcacggaaagtgttgaacctgggaccctgaggaattcaccaggagtaaatggctttcatgtatttgtgttgtttgctttttcttacgtgattttatgttcatagagctagaaagtagcatctcatgatggcccaacaatctctgttgccagttaaaggttccttggagatgaggctgaataattatgaacctcaccttctctgattgtgggagtggcaagaactggggagacgtcctccataagtggagcacagggtatggggttaaagcatgacagggagagtcttctgtgcctggtttcttctcctctatctcataatgcattatgggcccgaggaataggggagggttaataagactccaaccctaatggcccaacagggaaattctcattttggtcgatgatattctgatggactggtttggtcttaataccagtcaaccgttgtccttctggaaatatacatatatgaaataaataaaggtaacacttgcagccaagttccctggtttctgggacttcccatcttacccattccttttccagggcttcagtgtcctgatacttctgagggtggttcatactcaaatagatctgggagtacagagtatttttccttgaggaaaggaagggttgggatgattagcagagtccggtgaaacat

SEQ ID NO: 113965 - DNA, 3384 bp, Artificial Sequence
  derived and/or modified sequence
aaaggccccacgtgttccgacccgctaggccccgcgcggctcggatccggcggcgctgtttcggtcgggagtgggtgggagagaagccggggcaggggaggagccgccggagctgtcggagccggcccttggaagaaaatcctcgctgtgtccaggctgaggcggggggctaatgacagtgtgagctctagatggtgtgagaccaccccaaagccaagaaatggctacagccgtggaaccagaggaccaggatctttgggaagaagagggaattctgatggtgaaactggaagatgatttcacctgtcggccagagtctgtcttacagagggatgacccggtgctggaaacctcccaccagaacttccgacgcttccgctaccaggaggcagcaagccctagagaagctctcatcagactccgagaactttgtcaccagtggctgagaccagagaggcggacaaaggagcagatcctagagctgcttgtgctggaacaatttcttaccgtcctacctggagaactacagagctgggtgcggggccaacggccagaaagtggcgaggaggcagtgacgctggtggagggtttgcagaaacaacccaggagaccaaggcggtgggtgactgtccatgttcacggccaggaagtcctgtcagaggagacggtgcatttaggagtggagcctgagtcacctaatgagctgcaggatcctgtgcaaagctcgacccccgagcagtctcctgaggaaaccacacagagcccagatctgggggcaccggcagagcagcgtccacaccaggaagaggagctccagaccctgcaggagagcgaggtcccagtgcccgaggacccagaccttcctgcagagaggagctctggagactcagagatggttgctcttcttactgctctgtcacagggactggtaacgttcaaggatgtggccgtatgcttttcccaggaccagtggagtgatctggacccaacacagaaagagttctatggagaatatgtcttggaagaagactgtggaattgttgtctctctgtcatttccaatccccagacctgatgagatctcccaggttagagaggaagagccttgggtcccagatatccaagagcctcaggagactcaagagccagaaatcctgagttttacctacacaggagataggagtaaagatgaggaagagtgtctggagcaggaagatctgagtttggaggatatacacaggcctgttttgggagaaccagaaattcaccagactccagattgggaaatagtctttgaggacaatccaggtagacttaatgaaagaagatttggtactaatatttctcaagtgaatagttttgtgaaccttcgggaaactacacccgtccaccccctgttagggaggcatcatgactgttctgtgtgtggaaagagcttcacttgtaactcccaccttgttagacacctgaggactcacacaggagagaaaccctataaatgtatggaatgtggaaaaagttacacacgaagctcacatcttgccaggcaccaaaaggttcacaagatgaacgcgccttacaaatatcccctaaaccggaagaatttggaagagacctcccctgtgacacaggctgagagaactccatcagtggagaaaccctatagatgtgatgattgcggaaagcacttccgctggacttcagaccttgtcagacatcagaggacacatactggagaaaaacccttcttttgtactatttgtggcaaaagcttcagccagaaatctgtgttaacaacacaccaaagaatccacctgggaggcaaaccctacttgtgtggagagtgtggtgaggacttcagtgaacacaggcggtacctggcgcaccggaagacgcacgctgctgaggaactctacctctgcagcgagtgcgggcgctgcttcacccacagcgcagcgttcgccaagcacttgagaggacacgcctcagtgaggccctgccgatgcaacgaatgtgggaagagcttcagtcgcagggaccacctcgtcaggcatcagagaacacacactggggagaaaccattcacgtgccctacctgtggaaaaagcttcagcagaggatatcacttaattaggcatcagaggacccactcagaaaagacctcctagctaggtccccatgtgaggagatctgctttcagccctcacctaagggaggtgaggaagaggaaaagccctcttgtcagcctgggaagaccttttcgagggagtctccctgacctgctcagatctgacattacctcttcctgcaactaaacacgagcctgggcagaacctctcagccttcctctacgccttgaggggatgtttcatccaaagtacaacctgaattgaggcttctccttcactggagtgcacctgcctctacctcatgggtataaagtaggagaactaagagacttaagaggtcgtggttcctatatcgtccaaaaaataggctgttacatatcctaaagactgctcaacagcttcaagttgaaagtggccaaggacagccccttaggtttgggaagggacgagcctgaaggattctgtctttactggggtcaaatcttaaagcacacagctctggactcaagacaggaggtttgcgtcctgatggctttgccacacattcacaggataactgcatagatccctcgctgtctgattcacttcttaccatgcactttcctttgatgctgaggagaaatggaagtgggcgaaaaatctcaaggctgcttcatgtggaccttgtcaagctgctccctcccccagcgtcaaattgttatcaggtgccaaacactgctagaaaggagggcctagtcagaagcctctttccatacgagttttggttttgtttttaatatttttttctattaaaatactcatgcatttaaccttcccgttattcaaccagtctcttggttgcatccctagcacttctactacaagtgagatggtagtgtttgagtgcttattgagtaaagcataattcggtcataatgaaatcgttcacattccctcatatgcacaagcccaccaaccccttcacaccccccttcacaggggtcgtatgagtaaggggatttggaaactgtcaacttacaaaggcactataacaattacagaatcatgattgccatgggccactttatttacatgaagacaactggagaacgactaagaccaaattatggaaaataagaaaaagctgttgctggcaagaccatcaagactgttctgacaccctgtccccatcatccctgactgagtactctgacatcacggaaagtgttgaacctgggaccctgaggaattcaccaggagtaaatggctttcatgta

SEQ ID NO: 113966 - DNA, 3564 bp, Artificial Sequence
  derived and/or modified sequence
ccgacccgctaggccccgcgcggctcggatccggcggcgctgtttcggtcgggagtgggtgggagagaagccggggcaggggaggagccgccggagctgtcggagccgtgacacccagggcagctacactcagaagccacaaggaatgctagtggagcccctcatccctcccagcttctcttccaagctgccccgtggggcttgatccaggaagctacttcagaaagtagacaatcattccaagggtacaacaaggtttaccacaatgtgagggactcagccattgcaaattgtacagatgagggcccttggaagaaaatcctcgctgtgtccaggctgaggcggggggctaatgacagtgtgagctctagatggtgtgagaccaccccaaagccaagaaatggctacagccgtggaaccagaggaccaggatctttgggaagaagagggaattctgatggtgaaactggaagatgatttcacctgtcggccagagtctgtcttacagagggatgacccggtgctggaaacctcccaccagaacttccgacgcttccgctaccaggaggcagcaagccctagagaagctctcatcagactccgagaactttgtcaccagtggctgagaccagagaggcggacaaaggagcagatcctagagctgcttgtgctggaacaatttcttaccgtcctacctggagaactacagagctgggtgcggggccaacggccagaaagtggcgaggaggcagtgacgctggtggagggtttgcagaaacaacccaggagaccaaggcggtgggtgactgtccatgttcacggccaggaagtcctgtcagaggagacggtgcatttaggagtggagcctgagtcacctaatgagctgcaggatcctgtgcaaagctcgacccccgagcagtctcctgaggaaaccacacagagcccagatctgggggcaccggcagagcagcgtccacaccaggaagaggagctccagaccctgcaggagagcgaggtcccagtgcccgaggacccagaccttcctgcagagaggagctctggagactcagagatggttgctcttcttactgctctgtcacagggactggtaacgttcaaggatgtggccgtatgcttttcccaggaccagtggagtgatctggacccaacacagaaagagttctatggagaatatgtcttggaagaagactgtggaattgttgtctctctgtcatttccaatccccagacctgatgagatctcccaggttagagaggaagagccttgggtcccagatatccaagagcctcaggagactcaagagccagaaatcctgagttttacctacacaggagataggagtaaagatgaggaagagtgtctggagcaggaagatctgagtttggaggatatacacaggcctgttttgggagaaccagaaattcaccagactccagattgggaaatagtctttgaggacaatccaggtagacttaatgaaagaagatttggtactaatatttctcaagtgaatagttttgtgaaccttcgggaaactacacccgtccaccccctgttagggaggcatcatgactgttctgtgtgtggaaagagcttcacttgtaactcccaccttgttagacacctgaggactcacacaggagagaaaccctataaatgtatggaatgtggaaaaagttacacacgaagctcacatcttgccaggcaccaaaaggttcacaagatgaacgcgccttacaaatatcccctaaaccggaagaatttggaagagacctcccctgtgacacaggctgagagaactccatcagtggagaaaccctatagatgtgatgattgcggaaagcacttccgctggacttcagaccttgtcagacatcagaggacacatactggagaaaaacccttcttttgtactatttgtggcaaaagcttcagccagaaatctgtgttaacaacacaccaaagaatccacctgggaggcaaaccctacttgtgtggagagtgtggtgaggacttcagtgaacacaggcggtacctggcgcaccggaagacgcacgctgctgaggaactctacctctgcagcgagtgcgggcgctgcttcacccacagcgcagcgttcgccaagcacttgagaggacacgcctcagtgaggccctgccgatgcaacgaatgtgggaagagcttcagtcgcagggaccacctcgtcaggcatcagagaacacacactggggagaaaccattcacgtgccctacctgtggaaaaagcttcagcagaggatatcacttaattaggcatcagaggacccactcagaaaagacctcctagctaggtccccatgtgaggagatctgctttcagccctcacctaagggaggtgaggaagaggaaaagccctcttgtcagcctgggaagaccttttcgagggagtctccctgacctgctcagatctgacattacctcttcctgcaactaaacacgagcctgggcagaacctctcagccttcctctacgccttgaggggatgtttcatccaaagtacaacctgaattgaggcttctccttcactggagtgcacctgcctctacctcatgggtataaagtaggagaactaagagacttaagaggtcgtggttcctatatcgtccaaaaaataggctgttacatatcctaaagactgctcaacagcttcaagttgaaagtggccaaggacagccccttaggtttgggaagggacgagcctgaaggattctgtctttactggggtcaaatcttaaagcacacagctctggactcaagacaggaggtttgcgtcctgatggctttgccacacattcacaggataactgcatagatccctcgctgtctgattcacttcttaccatgcactttcctttgatgctgaggagaaatggaagtgggcgaaaaatctcaaggctgcttcatgtggaccttgtcaagctgctccctcccccagcgtcaaattgttatcaggtgccaaacactgctagaaaggagggcctagtcagaagcctctttccatacgagttttggttttgtttttaatatttttttctattaaaatactcatgcatttaaccttcccgttattcaaccagtctcttggttgcatccctagcacttctactacaagtgagatggtagtgtttgagtgcttattgagtaaagcataattcggtcataatgaaatcgttcacattccctcatatgcacaagcccaccaaccccttcacaccccccttcacaggggtcgtatgagtaaggggatttggaaactgtcaacttacaaaggcactataacaattacagaatcatgattgccatgggccactttatttacatgaagacaactggagaacgactaagaccaaattatggaaaataagaaaaagctgttgctggcaagaccatcaagactgttctgacaccctgtccccatcatccctgactgagtactctgacatcacggaaagtgttgaacctgggaccctgaggaattcaccaggagtaaatggctttcatgta

SEQ ID NO: 113967 - protein, 967 aa, Artificial Sequence
  derived and/or modified sequence
MHRPHVPGCAAIKFRSLGSAARSGAESEARAKMAAAKPTLTDSLSFCLAQLAAAAGEALGGEKDPATNETPLSRALLALRTRHIKAAGGIERFRARGGLRPLLALLRRAAAAGSAPSQAGPGSAPSSAASGASSPAPASGPAPSAVSSSSPTPPVRLRKTLDLALSILADCCTEGACRTEVRRLGGILPLVTILQCMKTDSIQNRTARALGNLAMEPESCGDIHCAGAVPLLVESLTACQDSQCLQSVVRALRNLADSPQHRLALAQQGAVRPLAELLATAPDAALTLALVRALLELSRGCSRACAEQLSLGGGLGPLVSLASHPKRAVREGTILILANLCAQGLIRPALGNAGGVEVLVDELRQRRDPNGASPTSQQPLVRAVCLLCREAINRARLRDAGGLDLLMGLLRDPRASAWHPRIVAALVGFLYDTGALGRLQALGLVPLLAGQLCGEAGEEEEEGREAASWDFPEERTPERAQGGSFRSLRSWLISEGYATGPDDISPDWSPEQCPPEPMEPASPAPTPTSLRAPRTQRTPGRSPAAAIEEPWGREGPALLLLSRFSQAPDPSGALVTGPALYGLLTYVTGAPGPPSPRALRILSRLTCNPACLEAFVRSYGAALLRAWLVLGVAPDDWPAPRARPTLHSRHRELGERLLQNLTVQAESPFGVGALTHLLLSGSPEDRVACALTLPFICRKPSLWRRLLLEQGGLRLLLAALTRPAPHPLFLFFAADSLSCLQDLVSPTVSPAVPQAVPMDLDSPSPCLYEPLLGPAPVPAPDLHFLLDSGLQLPAQRAASATASPFFRALLSGSFAEAQMDLVPLRGLSPGAAWPVLHHLHGCRGCGAALGPVPPPGQPLLGSEAEEALEAAGRFLLPGLEEELEEAVGRIHLGPQGGPESVGEVFRLGRPRLAAHCARWTLGSEQCPRKRGLALVGLVEAAGEEAGPLTEALLAVVMGIELGARVPA

SEQ ID NO: 113968 - protein, 480 aa, Artificial Sequence
  derived and/or modified sequence
MAGYLSESDFVMVEEGFSTRDLLKELTLGASQATTDEVAAFFVADLGAIVRKHFCFLKCLPRVRPFYAVKCNSSPGVLKVLAQLGLGFSCANKAEMELVQHIGIPASKIICANPCKQIAQIKYAAKHGIQLLSFDNEMELAKVVKSHPSAKMVLCIATDDSHSLSCLSLKFGVSLKSCRHLLENAKKHHVEVVGVSFHIGSGCPDPQAYAQSIADARLVFEMGTELGHKMHVLDLGGGFPGTEGAKVRFEEIASVINSALDLYFPEGCGVDIFAELGRYYVTSAFTVAVSIIAKKEVLLDQPGREAPLPPPHIATCAASEPSPPAEENGSTSKTIVYHLDEGVYGIFNSVLFDNICPTPILQKKPSTEQPLYSSSLWGPAVDGCDCVAEGLWLPQLHVGDWLVFDNMGAYTVGMGSPFWGTQACHITYAMSRVAWEALRRQLMAAEQEDDVEGVCKPLSCGWEITDTLCVGPVFTPASIM

SEQ ID NO: 113969 - DNA, 1443 bp, Artificial Sequence
  derived and/or modified sequence
atggccggctacctgagcgagagcgacttcgtgatggtggaggagggcttcagcaccagagacctgctgaaggagctgaccctgggcgccagccaggccaccaccgacgaggtggccgccttcttcgtggccgacctgggcgccatcgtgagaaagcacttctgcttcctgaagtgcctgcccagagtgagacccttctacgccgtgaagtgcaacagcagccccggcgtgctgaaggtgctggcccagctgggcctgggcttcagctgcgccaacaaggccgagatggagctggtgcagcacatcggcatccccgccagcaagatcatctgcgccaacccctgcaagcagatcgcccagatcaagtacgccgccaagcacggcatccagctgctgagcttcgacaacgagatggagctggccaaggtggtgaagagccaccccagcgccaagatggtgctgtgcatcgccaccgacgacagccacagcctgagctgcctgagcctgaagttcggcgtgagcctgaagagctgcagacacctgctggagaacgccaagaagcaccacgtggaggtggtgggcgtgagcttccacatcggcagcggctgccccgacccccaggcctacgcccagagcatcgccgacgccagactggtgttcgagatgggcaccgagctgggccacaagatgcacgtgctggacctgggcggcggcttccccggcaccgagggcgccaaggtgagattcgaggagatcgccagcgtgatcaacagcgccctggacctgtacttccccgagggctgcggcgtggacatcttcgccgagctgggcagatactacgtgaccagcgccttcaccgtggccgtgagcatcatcgccaagaaggaggtgctgctggaccagcccggcagagaggcccccctgccccccccccacatcgccacctgcgccgccagcgagcccagcccccccgccgaggagaacggcagcaccagcaagaccatcgtgtaccacctggacgagggcgtgtacggcatcttcaacagcgtgctgttcgacaacatctgccccacccccatcctgcagaagaagcccagcaccgagcagcccctgtacagcagcagcctgtggggccccgccgtggacggctgcgactgcgtggccgagggcctgtggctgccccagctgcacgtgggcgactggctggtgttcgacaacatgggcgcctacaccgtgggcatgggcagccccttctggggcacccaggcctgccacatcacctacgccatgagcagagtggcctgggaggccctgagaagacagctgatggccgccgagcaggaggacgacgtggagggcgtgtgcaagcccctgagctgcggctgggagatcaccgacaccctgtgcgtgggccccgtgttcacccccgccagcatcatgtag

SEQ ID NO: 113970 - DNA, 1443 bp, Artificial Sequence
  derived and/or modified sequence
atggctggttatttgtccgagtccgatttcgtcatggtggaagaagggttctcaaccagagacctgctaaaggaactgaccctcggtgctagccaggccaccactgacgaggtggctgcgtttttcgtggccgatctaggcgccatcgttcgaaaacacttctgcttcctgaagtgcttaccacgggtgcggcctttctatgctgtgaaatgcaatagcagcccgggcgtcctcaaagtcttagcccaactgggccttggctttagttgcgccaacaaagctgagatggaactggtacagcatatcggtatccccgcgtcaaaaatcatttgcgcaaatccatgtaaacagatcgctcaaatcaaatacgccgccaaacatgggatccaactgctctcgtttgataacgaaatggagctggccaaagtggtgaaatctcacccatccgctaagatggtcctgtgtattgccaccgatgacagccactctctcagttgtctgtccctgaagtttggcgtgtctctcaaatcttgtagacacctgctggagaatgccaagaagcaccacgttgaagtggttggggtctcatttcacatcggaagtgggtgtccagatcctcaagcttacgcacaatctattgcggacgccaggctggtttttgagatgggcaccgagctgggtcacaagatgcatgtcctggatttgggaggaggctttcccggaaccgagggcgccaaggtcaggtttgaggagatcgcaagcgtcataaatagtgcactggacctgtatttcccggaaggttgtggggttgacatcttcgcagagctaggtagatactatgtgacctccgcttttaccgtcgccgtgtccataattgccaagaaagaagtcctgctggaccaaccaggaagagaggcacccttaccaccacctcatatcgccacctgcgcagcctctgaacctagcccccctgcagaagaaaacggttcaacttctaagacaatcgtttaccacttggacgagggagtctacggcatcttcaattcggttctctttgacaatatctgccctaccccaatcctgcagaaaaagcctagtaccgagcaacctctttacagcagctccctgtggggacccgcagttgatggatgtgactgcgtggccgaaggattatggctaccccaactccacgtcggggattggctagtcttcgataatatgggcgcctacacggttgggatgggctctccattctggggaacacaagcatgccacattacgtacgctatgagcagggtggcctgggaggccctgcgacggcagttaatggctgctgagcaagaagacgatgtggagggcgtatgtaaaccactttcttgtgggtgggagattaccgacactctgtgcgtgggccctgtgtttacccctgcttcgatcatgtag

SEQ ID NO: 113971 - DNA, 1443 bp, Artificial Sequence
  derived and/or modified sequence
atggctggttacctgtcagagtctgattttgtaatggtggaagaaggatttagtacccgtgatctcttaaaagagctgactctaggggcgtcgcaggctactacagacgaagtagcagccttctttgtggccgacctgggcgccatcgtgcgaaagcacttttgcttcctcaagtgtctcccaagagtccgcccgttctatgctgtgaaatgcaactcctctcctggtgtccttaaggttctggctcaattgggcctgggcttctcatgtgcgaacaaagctgagatggaattagtgcaacacattggaatccctgcaagcaagatcatatgtgcgaacccttgtaagcagatcgcccagataaaatacgccgccaaacatggtatccagttactgagctttgacaatgagatggaattggcgaaggttgtgaagtctcatccgtccgccaagatggtactgtgtatagcaacagacgactcacatagcttgtcttgcctgagcctgaaatttggtgtatctctcaaatcgtgccgccacctcctggagaacgcaaaaaagcaccacgtggaggtggtgggtgtgagtttccatatcgggtccgggtgcccggatccgcaggcctacgcccaatctattgctgacgctagactggtgtttgagatgggcacggagctgggccataagatgcatgtattagacctcggcgggggtttcccagggactgagggcgccaaggtaagattcgaggagattgcttctgtgataaactcagcgctggacctgtactttcccgagggatgtggcgtcgacatctttgctgaattagggaggtactacgttactagcgcgttcaccgtggcggtgtcaatcatagccaagaaggaggtgctcctagatcagcccgggagggaggcccccctcccccccccgcatatcgccacttgcgctgccagtgagccgtccccaccagctgaggagaacggcagtacctctaaaactatcgtttaccacctggacgagggcgtctacgggatttttaactccgtgctgttcgataatatttgtcctaccccaatccttcagaagaagccttcaacggaacagcctctgtactcctcttctttgtggggccccgcagtcgatgggtgtgattgtgtggctgaaggcctgtggcttcctcagctgcatgtgggggactggctggtgttcgacaacatgggcgcctacaccgtaggcatgggaagtcccttctggggcactcaagcttgccatattacgtatgccatgtcacgcgtggcctgggaggcccttaggcgtcagctcatggcagcggaacaagaagacgatgtcgagggagtatgtaagccccttagctgcggatgggaaatcaccgatactctatgcgttggtcctgtgtttaccccggcgtccattatgtag

SEQ ID NO: 113972 - DNA, 1443 bp, Artificial Sequence
  derived and/or modified sequence
atggctggctacctgagtgaatcggactttgtgatggtggaggagggcttcagtacccgagacctgctgaaggaactcactctgggggcctcacaggccaccacggacgaggtagctgccttcttcgtggctgacctgggtgccatagtgaggaagcacttttgctttctgaagtgcctgccacgagtccggcccttttatgctgtcaagtgcaacagcagcccaggtgtgctgaaggttctggcccagctggggctgggctttagctgtgccaacaaggcagagatggagttggtccagcatattggaatccctgccagtaagatcatctgcgccaacccctgtaagcaaattgcacagatcaaatatgctgccaagcatgggatccagctgctgagctttgacaatgagatggagctggcaaaggtggtaaagagccaccccagtgccaagatggttctgtgcattgctaccgatgactcccactccctgagctgcctgagcctaaagtttggagtgtcactgaaatcctgcagacacctgcttgaaaatgcgaagaagcaccatgtggaggtggtgggtgtgagttttcacattggcagtggctgtcctgaccctcaggcctatgctcagtccatcgcagacgcccggctcgtgtttgaaatgggcaccgagctgggtcacaagatgcacgttctggaccttggtggtggcttccctggcacagaaggggccaaagtgagatttgaagagattgcttccgtgatcaactcagccttggacctgtacttcccagagggctgtggcgtggacatctttgctgagctggggcgctactacgtgacctcggccttcactgtggcagtcagcatcattgccaagaaggaggttctgctagaccagcctggcagggaggccccactaccaccccctcacattgctacttgtgctgcctctgaaccctcccctcctgcagaggaaaatggttccacctccaagaccatcgtgtaccaccttgatgagggcgtgtatgggatcttcaactcagtcctgtttgacaacatctgccctacccccatcctgcagaagaaaccatccacggagcagcccctgtacagcagcagcctgtggggcccggcggttgatggctgtgattgcgtggctgagggcctgtggctgccgcaactacacgtaggggactggctggtctttgacaacatgggcgcctacactgtgggcatgggttcccccttttgggggacccaggcctgccacatcacctatgccatgtcccgggtggcctgggaagcgctgcgaaggcagctgatggctgcagaacaggaggatgacgtggagggtgtgtgcaagcctctgtcctgcggctgggagatcacagacaccctgtgcgtgggccctgtcttcaccccagcgagcatcatgtga

SEQ ID NO: 113973 - DNA, 1443 bp, Artificial Sequence
  derived and/or modified sequence
atggccggctacctgtctgagagtgactttgtgatggtggaggagggcttcagcacccgggacctgctgaaggagctgaccctgggcgccagccaggccaccacagatgaggtggccgccttctttgtggccgacctgggcgccatcgtgaggaagcacttctgcttcctgaagtgcctgccccgggtgcggcccttctatgctgtgaagtgcaacagcagccctggggtgctgaaggtgctggcccagctgggcctgggcttcagctgtgccaacaaggccgagatggagctggtgcagcacatcggcatcccagccagcaagatcatctgtgccaacccctgcaagcagatcgcccagatcaagtatgctgccaagcacggcatccagctgctgagctttgacaatgagatggagctggccaaggtggtgaagagccaccccagcgccaagatggtgctgtgcatcgccacagatgacagccacagcctgagctgcctgagcctgaagtttggagtgtccctgaagagctgccgccacctgctggagaatgccaagaagcaccacgtggaggtggtgggcgtgtccttccacatcggcagcggctgcccagacccccaggcctatgcccagagcattgctgatgcccggctggtgtttgagatgggcacagagctgggccacaagatgcacgtgctggacctgggcggcggcttccctggaacagagggcgccaaggtgcgctttgaggagatcgccagcgtcatcaacagcgccctggacctgtacttccctgagggctgcggcgtggacatctttgctgagctgggccgctactacgtgaccagcgccttcaccgtggccgtgtccatcatcgccaagaaggaggtgctgctggaccagcccggccgggaggcccccctgcccccaccccacatcgccacctgtgccgccagcgagcccagccccccagcagaagaaaatggcagcaccagcaagaccatcgtgtaccacctggatgagggcgtgtatggcatcttcaacagcgtgctgtttgacaacatctgccccacccccatcctgcagaagaagcccagcacagagcagcccctgtacagcagcagcctgtggggccctgctgtggatggctgtgactgtgtggccgagggcctgtggctgccccagctgcacgtgggggactggctggtgtttgacaacatgggcgcctacacagtgggcatgggcagccccttctggggcacccaggcctgccacatcacctacgccatgagccgggtggcctgggaggccctgcggcggcagctgatggctgctgagcaggaggatgatgtggagggcgtgtgcaagcccctgagctgtggctgggagatcacagacaccctgtgtgtgggccctgtgttcaccccagccagcatcatgtag

SEQ ID NO: 113974 - DNA, 1443 bp, Artificial Sequence
  derived and/or modified sequence
atggccggctacctgagcgagagcgacttcgtgatggtggaggaggggttcagcacccgtgacctgctgaaagagctgacattaggcgcttcacaagctaccaccgacgaggtggcagctttttttgtggcggacctgggagctatagtgaggaagcacttctgtttcctgaagtgcctcccccgggtgagacctttttatgctgtgaaatgcaattcttcgcctggcgtcctgaaagtgctggcccagcttggattaggatttagctgtgcaaataaagctgaaatggaattagtacaacacatcggcataccagcaagtaagatcatatgtgccaatccctgtaaacagatcgcccaaatcaagtacgcggccaaacatggcatccagcttctcagtttcgacaatgagatggagttagcaaaggtcgttaaatctcatccctctgctaagatggttttgtgcatcgccaccgatgactcccattccttgtcgtgtctgtcattgaagtttggagtgtctctgaagtcctgcagacacctcctcgaaaatgctaagaaacaccatgtggaggtcgtaggagtctcttttcatatcggctctggctgccctgatcctcaagcgtatgcccagtctatcgccgacgcaagactggtttttgaaatgggtaccgaactgggacataagatgcatgtgctggacctggggggaggctttcctggcacggagggagccaaagtcaggttcgaggaaatcgcaagtgtcattaatagcgcattagacctctactttccagaagggtgtggagtagacatattcgctgaactcggccgatattacgttacctcagctttcacagtcgccgtgtctataatcgctaagaaagaggtgctcttggatcagcccggccgcgaagcgccccttccacctccccacatcgccacttgtgccgcctctgaaccaagtccccccgctgaggaaaacggatctacgagcaagactattgtttatcacttggatgaaggagtatatggcatttttaatagcgtgttgtttgacaacatatgtcctacccctatcttgcagaaaaaaccctcaaccgaacagcccctgtacagcagctcgctctgggggccggctgtagacggatgcgattgcgtcgccgaaggcctctggttgcctcagctgcacgtgggcgactggcttgtgtttgacaatatgggagcctacactgttggtatggggagcccattttggggtacccaggcctgccatattacctacgcaatgtcacgggtggcctgggaagcactgcgccgccaactcatggcggctgagcaggaagacgatgtggaaggcgtctgtaagccactcagttgcggctgggagatcacggacaccctatgtgttggccctgtgttcacacctgcatccatcatgtag

SEQ ID NO: 113975 - DNA, 2100 bp, Artificial Sequence
  derived and/or modified sequence
ggctgctgggctggcggggcgcaggccgcgggacccgagcccggggaagcgagagagcggaggcgccgaggatccgattcactccctggggagacctatgggccgaagccgtgtaaatgcgttttaagaggcctcggctccgcaactgccactcctcctcggggtgttgcacaagtttcgaggtcaccggcgaccccccctagcagcgcgcctggctctggcccccgcgaaggaggacggagtttgtgtgttgcatactttctaaggcggcggctgcagcagcggctccatccagcccgtcagctcctcctgcaaggcatggctggctacctgagtgaatcggactttgtgatggtggaggagggcttcagtacccgagacctgctgaaggaactcactctgggggcctcacaggccaccacggacgaggtagctgccttcttcgtggctgacctgggtgccatagtgaggaagcacttttgctttctgaagtgcctgccacgagtccggcccttttatgctgtcaagtgcaacagcagcccaggtgtgctgaaggttctggcccagctggggctgggctttagctgtgccaacaaggcagagatggagttggtccagcatattggaatccctgccagtaagatcatctgcgccaacccctgtaagcaaattgcacagatcaaatatgctgccaagcatgggatccagctgctgagctttgacaatgagatggagctggcaaaggtggtaaagagccaccccagtgccaagatggttctgtgcattgctaccgatgactcccactccctgagctgcctgagcctaaagtttggagtgtcactgaaatcctgcagacacctgcttgaaaatgcgaagaagcaccatgtggaggtggtgggtgtgagttttcacattggcagtggctgtcctgaccctcaggcctatgctcagtccatcgcagacgcccggctcgtgtttgaaatgggcaccgagctgggtcacaagatgcacgttctggaccttggtggtggcttccctggcacagaaggggccaaagtgagatttgaagagattgcttccgtgatcaactcagccttggacctgtacttcccagagggctgtggcgtggacatctttgctgagctggggcgctactacgtgacctcggccttcactgtggcagtcagcatcattgccaagaaggaggttctgctagaccagcctggcagggaggccccactaccaccccctcacattgctacttgtgctgcctctgaaccctcccctcctgcagaggaaaatggttccacctccaagaccatcgtgtaccaccttgatgagggcgtgtatgggatcttcaactcagtcctgtttgacaacatctgccctacccccatcctgcagaagaaaccatccacggagcagcccctgtacagcagcagcctgtggggcccggcggttgatggctgtgattgcgtggctgagggcctgtggctgccgcaactacacgtaggggactggctggtctttgacaacatgggcgcctacactgtgggcatgggttcccccttttgggggacccaggcctgccacatcacctatgccatgtcccgggtggcctgggaagcgctgcgaaggcagctgatggctgcagaacaggaggatgacgtggagggtgtgtgcaagcctctgtcctgcggctgggagatcacagacaccctgtgcgtgggccctgtcttcaccccagcgagcatcatgtgagtgggcctcgttccccccggagaatcccagcggggcctcagagatgcatctgggagaggtggggaagatggcaggcaagggtacccttggccaggactctggtgcccaccctgccacccccgcgctccacctgcagtgtttctgccctgtaaataggaccagtcttacactcgctgtagttcaagtatgcaacataaatcctgttccttccagctgtgtctgcctcctctgcagtgcaaggggcctggtcagccaggtgtgggggtgttcttggggtctcctttggtctccttcccacctttgtaaatataatgcaaataaataaatatttaggttttt

SEQ ID NO: 113976 - DNA, 1443 bp, Artificial Sequence
  derived and/or modified sequence
atggccggctacctgagcgagagcgacttcgtgatggtggaggagggcttttccacaagggacctactgaaagaactcacgcttggggcctcacaggctacaacggacgaagttgccgcgttctttgtggcggatctcggcgcgattgtcaggaaacacttctgttttttgaaatgcctccccagggtccgaccattttacgcggttaagtgcaactcaagtcccggagttctgaaggtactggcccagttaggcctgggtttttcatgtgccaacaaagccgagatggagctcgttcaacacatcggcatacctgcctccaagatcatttgcgcgaacccctgcaaacaaattgcgcagatcaagtacgcagccaaacacggaatccaactcctctccttcgacaatgagatggaactggcaaaggtggtgaaatctcatcctagcgcaaaaatggttctctgtatcgcgacagacgacagccatagtctttcctgtttgtcgctgaagttcggcgtatccttgaagtcgtgtcggcacctgttagagaatgccaaaaagcaccacgtagaggtcgtcggtgtctccttccacattggctcgggctgcccagatccccaggcctatgcacagtctattgccgacgcccggttagtgtttgaaatgggcaccgagctcggacacaagatgcatgtcctggacctgggcgggggcttccctggcactgagggcgcaaaagttagattcgaagagattgccagcgtcatcaatagtgctcttgacctgtactttcctgaaggatgcggagttgacatatttgctgaactgggacgctactacgtgacttcagcctttacagtggctgtctcaatcattgccaaaaaggaggtgctgctagatcagcccgggcgggaagcgcctctccctccccctcacattgcaacatgcgcagctagcgaaccttcccctcctgctgaagagaatggctctacttcaaagactatcgtgtaccatctcgatgaaggtgtttacggcatcttcaattccgtgcttttcgataacatttgtccaaccccgatccttcagaagaaaccctccaccgagcagccactctattcctcaagtctatggggccctgcagtcgacggatgcgactgtgtagcagagggactctggctgccccagttacacgttggggattggctggtttttgacaacatgggtgcatacacggtgggtatgggaagccccttctggggaacacaggcttgccatattacctacgcgatgtcccgggtggcctgggaagccctccgccgccagctcatggcagcagaacaggaggacgatgttgaaggagtttgcaagcccctgagttgtggctgggagatcacggacaccctctgtgtggggcccgttttcacccccgccagcatcatgtag

SEQ ID NO: 113977 - DNA, 1443 bp, Artificial Sequence
  derived and/or modified sequence
atggcagggtatctgagcgaatcagattttgtgatggtagaagaaggcttttcgacacgggatttgctgaaagagcttaccttaggcgcatcccaggctacaactgatgaagtggcagcctttttcgtggctgacctgggcgcaattgtccggaaacacttctgctttttgaaatgcctcccccgagtgcgccctttttatgcagtgaagtgtaacagctcgccaggggttttaaaagttctggcccaactcggtttgggcttttcctgcgccaacaaggcggagatggagcttgtgcagcacattggcatccctgcttcgaagatcatttgcgccaatccatgtaaacagatcgcacagattaagtatgctgccaagcacgggatccagttgctttcctttgacaatgagatggaactggcgaaagttgttaagtcccaccccagtgcaaagatggtgctgtgcattgcaacagatgattcacattcccttagctgtctgagcctgaaattcggcgtgagtcttaaaagttgtaggcatctccttgagaatgccaaaaagcatcacgtagaggtggtgggggtctcatttcacattggctctggctgtcctgatccacaagcatatgcccaaagcatcgccgacgccaggctggtgtttgaaatgggtactgaactcgggcacaagatgcacgtgcttgatctcggaggaggatttcccggaacggaaggcgctaaggttcgcttcgaagaaattgccagtgtgattaatagcgcgttggacctctatttccctgagggttgcggggtagacattttcgccgagctagggaggtactacgtgacatctgcattcaccgttgccgtgtccattatagctaagaaggaagttctgcttgatcaacctggcagggaggcccctctgcctcccccacacattgctacctgtgcagctagcgaaccatctccaccagccgaggaaaacggatccaccagtaaaactattgtatatcaccttgacgagggcgtctatgggatctttaacagcgtgctgtttgacaacatttgcccgacccccatcctgcagaagaagccttctaccgagcagcctctgtattcctcttcactatggggccctgcggtggacggttgtgattgtgtggcagagggcctctggttaccacagctccatgttggcgattggttagtttttgataacatgggtgcctatacagtggggatggggtcaccattttggggaacacaagcatgccacattacctacgctatgagcagggtggcttgggaggctctccgaagacagctgatggccgctgaacaggaggatgacgttgagggcgtctgcaagccgctttcttgcggttgggaaatcacggacaccctctgcgtggggcctgtcttcacgccagcttctatcatgtag

SEQ ID NO: 113978 - DNA, 1443 bp, Artificial Sequence
  derived and/or modified sequence
atggcagggtaccttagcgagagcgacttcgtaatggttgaagaaggatttagcactcgcgacttgttaaaggaactgaccctgggagcatctcaggccaccaccgacgaggttgccgctttctttgtggctgacctcggggcaattgtccgcaagcacttttgcttccttaaatgtctgcctagggtgaggccattttacgcagtgaagtgcaactcaagcccaggagtgttaaaagtattggcacagcttggcctcggcttttcatgcgcaaacaaagccgagatggaacttgtccagcatatcggcattcctgcctccaaaatcatctgcgccaacccttgcaagcagattgcacagataaagtacgctgccaagcatgggatccaacttttgtcattcgacaatgaaatggagcttgccaaggtcgtgaagtcccacccctctgctaaaatggtgctgtgcatcgccactgacgacagtcattctctctcttgtctttctcttaagttcggagtgagcctgaagagctgtcggcatctgttggagaatgccaagaaacaccacgtggaagtagtaggagtctccttccatatcggctccgggtgcccggatcctcaagcatatgcccagtccatagccgatgccagactcgttttcgagatgggcaccgagctgggccacaaaatgcatgtgctggatctggggggtgggttccccggaacagaaggagcaaaggtgcggttcgaggaaattgcctccgtgatcaactctgcgctggatctttattttccagagggatgtggcgtggatatatttgcagagctcggtagatattatgtgacctctgcattcacagtggcagtaagtattattgccaagaaagaggtgctcctggatcagcccggtcgcgaagctccgctgccccctccccacattgcaacctgcgctgcctctgagccatcaccaccagctgaggaaaacgggtctacatcaaagactattgtatatcacctagatgaaggggtgtatggcatcttcaactcagtactgttcgacaatatctgtcccactcctatcctccaaaaaaagccttctaccgaacagcccctgtactcctctagcctatggggacctgccgtcgacgggtgtgactgcgtcgccgagggactgtggctgccacagctgcacgtcggcgactggcttgtctttgataatatgggagcttataccgtcggtatggggtccccattctgggggactcaggcatgtcacatcacctatgccatgtcaagggttgcctgggaggctttgagaagacagcttatggctgccgaacaggaagacgatgtggaaggcgtgtgcaagccactctcttgcggctgggaaataacggataccctgtgcgtggggccagtgtttacacctgcgtctatcatgtag

SEQ ID NO: 113979 - protein, 1278 aa, Artificial Sequence
  derived and/or modified sequence
MLPVYQEVKPNPLQDANLCSRVFFWWLNPLFKIGHKRRLEEDDMYSVLPEDRSQHLGEELQGFWDKEVLRAENDAQKPSLTRAIIKCYWKSYLVLGIFTLIEESAKVIQPIFLGKIINYFENYDPMDSVALNTAYAYATVLTFCTLILAILHHLYFYHVQCAGMRLRVAMCHMIYRKALRLSNMAMGKTTTGQIVNLLSNDVNKFDQVTVFLHFLWAGPLQAIAVTALLWMEIGISCLAGMAVLIILLPLQSCFGKLFSSLRSKTATFTDARIRTMNEVITGIRIIKMYAWEKSFSNLITNLRKKEISKILRSSCLRGMNLASFFSASKIIVFVTFTTYVLLGSVITASRVFVAVTLYGAVRLTVTLFFPSAIERVSEAIVSIRRIQTFLLLDEISQRNRQLPSDGKKMVHVQDFTAFWDKASETPTLQGLSFTVRPGELLAVVGPVGAGKSSLLSAVLGELAPSHGLVSVHGRIAYVSQQPWVFSGTLRSNILFGKKYEKERYEKVIKACALKKDLQLLEDGDLTVIGDRGTTLSGGQKARVNLARAVYQDADIYLLDDPLSAVDAEVSRHLFELCICQILHEKITILVTHQLQYLKAASQILILKDGKMVQKGTYTEFLKSGIDFGSLLKKDNEESEQPPVPGTPTLRNRTFSESSVWSQQSSRPSLKDGALESQDVAYVLQDWWLSYWANKQSMLNVTVNGGGNVTEKLDLNWYLGIYSGLTVATVLFGIARSLLVFYVLVNSSQTLHNKMFESILKAPVLFFDRNPIGRILNRFSKDIGHLDDLLPLTFLDFIQTLLQVVGVVSVAVAVIPWIAIPLVPLGIIFIFLRRYFLETSRDVKRLESTTRSPVFSHLSSSLQGLWTIRAYKAEERCQELFDAHQDLHSEAWFLFLTTSRWFAVRLDAICAMFVIIVAFGSLILAKTLDAGQVGLALSYALTLMGMFQWCVRQSAEVENMMISVERVIEYTDLEKEAPWEYQKRPPPAWPHEGVIIFDNVNFMYSPGGPLVLKHLTALIKSQEKVGIVGRTGAGKSSLISALFRLSEPEGKIWIDKILTTEIGLHDLRKKMSIIPQEPVLFTGTMRKNLDPFNEHTDEELWNALQEVQLKETIEDLPGKMDTELAESGSNFSVGQRQLVCLARAILRKNQILIIDEATANVDPRTDELIQKKIREKFAHCTVLTIAHRLNTIIDSDKIMVLDSGRLKEYDEPYVLLQNKESLFYKMVQQLGKAEAAALTETAKQVYFKRNYPHIGHTDHMVTNTSNGQPSTLTIFETAL

SEQ ID NO: 113980 - DNA, 3837 bp, Artificial Sequence
  derived and/or modified sequence
atgctgccagtttaccaggaggttaaaccaaaccctcttcaggatgccaacttatgttcacgcgtgtttttttggtggctcaatcctctgtttaaaatcggccacaaaagacgattagaggaggatgacatgtatagcgtcttgcctgaggaccggtcgcagcacttgggtgaggagcttcaggggttctgggataaagaagtactgagagcagagaacgacgcacagaagccttcactaacccgcgcgattattaagtgctactggaagtcatatctcgtgttgggcatcttcacgctgattgaggaatctgctaaggttatccagcctatcttcctaggcaagattatcaattattttgagaattatgaccccatggattccgtagcactgaatacggcctacgcttatgctactgtccttactttctgtacactgattctggccattcttcatcatctgtatttctatcatgtgcagtgtgctggcatgcgcctcagggtcgccatgtgccatatgatctatcgtaaggccctgcgtctctcaaacatggctatgggtaagacaactactgggcagattgtcaacctgctctccaatgatgttaacaagtttgatcaggtcaccgttttcctgcatttcttgtgggccggccctctgcaggcaatcgctgtaactgccctcttgtggatggaaattggaataagttgcctagccgggatggcagtattgataatcctgttaccactacaatcttgcttcggcaagctttttagctcccttcgatctaaaaccgctacgtttactgacgctcgaattaggaccatgaacgaggtgattaccggtattcgaatcattaaaatgtacgcctgggaaaagtcctttagtaatctgatcactaacctgaggaagaaggaaatcagtaaaatcctgagatccagctgcttacgaggcatgaatctagctagcttcttttccgctagtaaaattatcgtattcgtaacctttactacttatgttctactgggttcagtaattaccgcctcacgcgtgttcgttgccgtgaccctgtatggcgcagtgcggctcacagtaacgctcttctttcctagtgcaattgagagagtctcagaagccattgtgtcgattcgacgtatccagacattcctgctgctggacgaaatatctcagaggaaccggcagctcccatcagacggcaagaaaatggtccatgtgcaggatttcacagctttttgggacaaggctagcgagaccccaaccttgcaggggctgagtttcacagtccggcctggagaacttctggcagtcgtgggacctgtgggtgctggcaaatcatcactgctgtccgctgttttgggagagttggcccccagccacgggctggtgtccgttcatggcaggatagcctacgtctcacagcaaccgtgggtatttagtggtactcttagatccaacatactctttggaaagaaatacgagaaggagcggtacgaaaaagtcataaaagcttgtgccctgaagaaagacttgcaactcctggaagatggagatctgacggtgataggcgatcgaggcacgaccctatctggaggtcagaaggccagggtgaacctggccagagccgtgtaccaagacgctgacatttacttattggacgaccccttgtctgcagtggacgctgaggtcagcaggcacctgttcgagctgtgtatttgccaaatccttcatgagaaaattaccatcctggtcacccaccagttgcagtatctgaaagccgcttcccaaatccttattctgaaagacggaaaaatggtacagaagggtacttataccgaattcctgaagagtggcatcgacttcggaagcctactgaaaaaggataatgaggaatcagagcagcctcctgtgcccggaacaccaaccctgcgaaatcgcaccttttccgagtcatccgtatggtctcagcagtcctcaagaccatcactgaaggacggggccctcgagtctcaagatgtcgcatacgttttgcaggactggtggctctcttactgggcgaataagcagtccatgctgaacgtcacggtgaatgggggaggaaatgtgaccgagaagctagatttgaactggtaccttgggatatattctgggctcaccgtggctacagttctgttcggaatcgctagatccctgctcgtgttctacgtgctagtcaattcctctcagaccctgcacaataagatgtttgaatctattctgaaggcaccagtgttattctttgatcgcaacccaatagggcgtatcctgaaccgtttctcaaaggacataggccacttagacgaccttcttcccctcacgtttctcgactttatccagaccctgctgcaagtcgtgggggtcgtcagtgtggcagtggctgtgatcccctggatagctatccctttggtccccctcgggatcattttcatcttcctgaggcggtattttctggagacgagtagagacgtgaaacgactggagtcaacaacacgttccccagtattttcccatctctcctcgagtcttcaggggctgtggacaatccgcgcctataaggctgaagaaagatgtcaggagctcttcgatgctcaccaggacctccattctgaggcctggttcctttttctgactacttctcggtggtttgctgtgcgactcgatgcgatttgtgcaatgttcgtgattattgtggccttcggatcactgatcctggctaagactctggatgcgggccaggtgggactggcgttgtcatatgctctgactctgatggggatgtttcagtggtgtgtcagacagagcgctgaagttgagaacatgatgatcagcgttgaaagagtgattgagtataccgatctggagaaggaagccccctgggaataccaaaaacgcccacctccagcctggccccacgaaggtgtgattatcttcgataacgttaactttatgtacagccccgggggcccgctggttctgaaacacctcaccgctctgattaagtcgcaggaaaaagtcgggattgtgggacgaaccggcgctggtaaatctagcctgatctcagcgctgtttcgcctgagtgaacctgaaggcaagatttggattgataagatcctgacgacagagattggtcttcacgaccttcgcaaaaagatgtctatcattccccaggaacccgttttgtttaccggcacaatgagaaaaaatcttgatccatttaatgagcacacagatgaagaactctggaatgccctacaggaagttcagctcaaggagacaattgaagacctgccaggcaagatggacaccgaactggcggaaagcggctcaaatttcagcgtcgggcagaggcagcttgtgtgtttagcacgggccattctccggaagaatcaaatactgattattgacgaggctactgctaacgtcgaccctcggaccgacgaattaatccagaagaaaatcagggaaaaatttgcccattgcactgtgttgacaatagctcacaggctgaatactatcattgacagcgacaaaatcatggtcctggactctggccgcttgaaggagtacgacgagccctacgtccttctccagaacaaggaaagcctcttctacaagatggtgcagcagcttggaaaggccgaagcagcagcattgacggagaccgcaaagcaggtatactttaaacgaaattaccctcacattggacatactgatcatatggtgaccaatacatccaatgggcaacctagtacactgactattttcgagaccgctctgtag

SEQ ID NO: 113981 - DNA, 3837 bp, Artificial Sequence
  derived and/or modified sequence
atgctgcctgtgtaccaggaggtgaagcccaaccccctgcaggatgccaacctgtgcagcagggtcttcttctggtggctgaaccccctcttcaagattggccacaagaggcggctggaggaggatgacatgtacagcgtgctgcctgaggacaggagccagcacctgggggaggagctgcagggcttctgggacaaggaggtgctgcgggcagaaaatgatgcccagaagcccagcctgacccgggccatcatcaagtgctactggaagagctacctggtgctgggcatcttcaccctgattgaggagagcgccaaggtgatccagcccatcttcctgggcaagatcatcaactactttgaaaattatgaccccatggacagcgtggccctgaacacagcctatgcctatgccaccgtgctgaccttctgcaccctcatcctggccatcctgcaccacctgtacttctaccacgtgcagtgtgccggcatgaggctgcgggtggccatgtgccacatgatctacaggaaggccctgcggctgagcaacatggccatgggcaagaccaccaccggccagatcgtgaacctgctgagcaatgatgtgaacaagtttgaccaggtgacagtgttcctgcacttcctgtgggccggccccctgcaggccatcgctgtgacagccctgctgtggatggagatcggcatcagctgcctggccggcatggctgtgctgatcatcctgctgcccctgcagagctgcttcggcaagctgttcagcagcctgcggagcaagacagccaccttcacagatgcccgcatccgcaccatgaatgaagtcatcaccggcatccgcatcatcaagatgtatgcctgggagaagagcttcagcaacctgatcaccaacctgaggaagaaggagatcagcaagatcctgcggagcagctgcctgcggggcatgaacctggccagcttcttcagcgccagcaagatcatcgtgtttgtgaccttcaccacctacgtgctgctgggcagcgtcatcacagccagccgggtgtttgtggccgtgaccctgtatggagctgtgcggctgactgtgaccctcttcttccccagcgccatcgagcgggtgtctgaggccatcgtgtccatccgccgcatccagaccttcctgctgctggatgagatcagccagaggaaccggcagctgcccagtgatggcaagaagatggtgcacgtgcaggacttcaccgccttctgggacaaggccagcgagacccccaccctgcagggcctgtccttcaccgtgcggcctggagagctgctggccgtggtgggccctgtgggcgccggcaagagcagcctgctgtctgctgtgctgggggagctggcccccagccacggcctggtgtctgtgcacggcagaattgcctacgtgtcccagcagccctgggtgttcagcggcaccctgcggagcaacatcctgtttgggaagaagtatgagaaggagagatatgagaaggtgatcaaggcctgtgccctgaagaaggacctgcagctgctggaggatggagacctgaccgtcatcggggaccggggcaccaccctgagcggcggccagaaggcccgggtgaacctggcccgggctgtgtaccaggatgctgacatctacctgctggatgaccccctgtctgctgtggatgctgaggtgagccgccacctgtttgagctgtgcatctgccagatcctgcacgagaagatcaccatcctggtgacccaccagctgcagtacctgaaggccgccagccagatcctgatcctgaaggatggcaagatggtgcagaagggcacctacacagagttcctgaagtctggaattgactttggcagcctgctgaagaaggacaatgaggagagcgagcagccccctgtgcccggcacccccaccctgaggaacagaaccttcagcgagagctctgtgtggagccagcagagcagccggcccagcctgaaggatggagccctggagagccaggatgtggcctacgtgctgcaggactggtggctgagctactgggccaacaagcagagcatgctgaatgtgacagtgaatggaggcggcaatgtgacagagaagctggacctgaactggtacctgggcatctacagcggcctgactgtggccaccgtgctgtttggaattgcccggagcctgctggtgttctacgtgctggtgaacagcagccagaccctgcacaacaagatgtttgagagcatcctgaaggcccctgtgctcttctttgacaggaaccccatcggccgcatcctgaaccgcttcagcaaggacatcggccacctggatgacctgctgcccctgaccttcctggacttcatccagaccctgctgcaggtggtgggcgtggtgtctgtggccgtggccgtcatcccctggatcgccatccccctggtgcccctgggcatcatcttcatcttcctgcggcgctacttcctggagaccagcagagatgtgaagaggctggagagcaccaccaggagccctgtgttcagccacctgagcagcagcctgcagggcctgtggaccatccgggcctacaaggccgaggagcgctgccaggagctgtttgatgcccaccaggacctgcacagcgaggcctggttcctgttcctgaccaccagccgctggtttgctgtgcggctggatgccatctgtgccatgtttgtgatcatcgtggccttcggcagcctcatcctggccaagaccctggatgctggccaggtgggcctggccctgtcctatgccctgaccctgatgggcatgttccagtggtgtgtgcggcagagcgctgaggtggagaacatgatgatctctgtggagcgggtgattgagtacacagacctggagaaggaggccccctgggagtaccagaagaggcctcctccagcctggccccatgagggcgtcatcatctttgacaacgtgaacttcatgtacagccctgggggccccctggtgctgaagcacctgacagccctgatcaagagccaggagaaggtgggcatcgtgggccgcactggagctgggaagagcagcctcatcagcgccctcttccggctgtctgagcctgagggcaagatctggattgacaagatcctgaccacagaaattggcctgcatgacctgaggaagaagatgagcatcatcccccaggagcctgtgctcttcaccggcaccatgaggaagaacctggaccccttcaatgagcacacagatgaggagctgtggaatgccctgcaggaggtgcagctgaaggagaccatcgaggacctgcccgggaagatggacacagagctggccgagagcggcagcaacttctctgtgggccagaggcagctggtgtgcctggcccgggccatcctgaggaagaaccagatcctgatcattgatgaggccacagccaacgtggaccccaggacagatgagctgatccagaagaagatccgggagaagtttgcccactgcaccgtgctgaccatcgcccaccggctgaacaccatcatcgacagcgacaagatcatggtgctggacagcggccgcctgaaggagtatgatgagccctacgtgctgctgcagaacaaggagagcctcttctacaagatggtgcagcagctgggcaaggccgaggccgccgccctgacagaaacagccaagcaggtgtacttcaagaggaactacccccacatcggccacacagaccacatggtgaccaacaccagcaatggccagcccagcaccctgaccatctttgaaacagccctgtag

SEQ ID NO: 113982 - DNA, 3837 bp, Artificial Sequence
  derived and/or modified sequence
atgctgcccgtgtaccaggaggtgaagcccaaccccctgcaggacgccaacctatgcagcagggtgtttttctggtggctgaatcctctttttaagatcggccacaagaggcgcctggaagaagatgacatgtacagcgtgctgcctgaggaccgaagtcaacatttgggcgaagagctccaggggttctgggacaaggaggtgttacgagctgaaaacgacgcccagaagccctccctgactagggctatcattaagtgctactggaagtcgtatctcgtactgggcattttcaccctgattgaagagtctgccaaagtcatccagccaattttcctgggcaaaattattaactattttgagaactacgacccaatggatagcgtcgccctgaacacggcttatgcctatgctacagtactcacattttgcactcttatcttggccatactccatcacttatacttttaccacgttcagtgcgccggaatgaggctccgtgtagccatgtgtcacatgatctacagaaaggccctaagattaagcaatatggccatggggaagaccacaacaggtcagatcgtgaatctgctttcaaacgatgtgaataagtttgatcaggtcacagtgttcctccacttcctgtgggctggacctctccaggcaatcgcagtcacagcgttgttatggatggagatcggtatatcttgtctcgcgggaatggctgtgctgattattctcctccctctgcaaagttgctttggaaagctattttccagcctacgcagcaaaaccgccacattcaccgatgctcggatacggacaatgaacgaagtaatcactggtattcggattatcaagatgtatgcttgggaaaagagttttagtaacttgattactaacctcagaaaaaaggagataagcaagattcttagatcctcctgtctgaggggcatgaacctagccagcttcttttcagctagcaaaattatcgtatttgtaacctttactacatatgtactcctgggttccgtcattacagcatcacgtgttttcgtggcagtcaccctctacggggctgtccgacttacagtgaccctatttttcccgtctgcaattgagcgggtgagtgaagccatcgtcagcatccggcgaatccagacgttcctccttctggatgagatttcccagcgcaatagacagttacccagtgacggtaagaagatggttcacgttcaggacttcaccgccttttgggataaggcatcagaaacaccaactttacaggggctgagcttcacggtgcgccccggggagttgctggctgtggtgggaccagtgggcgccggcaagagcagcctactttccgccgtcctcggagaattggctccgagccatgggcttgtcagtgtccacggccgcattgcatatgtttcacagcagccttgggtgttctcgggcacgctccgctcgaacattttgttcggcaagaagtatgagaaagaaagatacgagaaggtcattaaagcgtgtgccctgaaaaaggatttacagctactcgaggacggtgatctaactgttattggagatcgaggaacgaccttgtcaggggggcagaaagcacgtgtaaaccttgccagagctgtgtaccaggatgcggatatatatctgctggacgacccactgtccgccgtggacgctgaagttagtcggcatttatttgagttgtgtatatgtcagattctgcacgaaaaaattactattctggttactcaccagctgcagtacctcaaggccgccagccaaatactcatcctgaaagatggcaaaatggtccaaaaggggacatataccgaattccttaagagtggtattgactttggcagtctgcttaagaaggataatgaagagagcgaacagcccccagtgcctggaacaccaaccctgcggaacaggaccttttctgagtcatccgtctggtcccagcaatcctcaagaccctcccttaaagacggagcgctagagtcacaggatgtggcctacgtgttacaagactggtggctgtcctattgggcaaacaaacagagcatgttgaatgtgaccgttaatgggggaggtaacgtaaccgaaaaactcgatctgaattggtacctgggcatctattctggtttgactgtcgcaacagttttattcggcatcgcccggtctttactagtgttctatgtgctggtgaatagctcacagaccctgcacaataagatgttcgagtccatattaaaagctccggtgctgttctttgacagaaaccccattggtcgcattctaaatcggttctccaaagacataggtcacctggacgacctgttgccactcacctttcttgactttatccagaccctactgcaggtggtcggggtagtctcggtagcggtcgcagtcatcccatggatcgccattcccttagtgccattaggcataattttcattttcttgaggcgatactttctcgaaacaagcagagacgtaaaacgactcgagagtactacgaggtccccagtattttcacacttgagctcctcattgcaagggctgtggactatccgtgcctataaagcggaagaacgctgccaggagctgttcgatgctcaccaggacctccattcggaggcctggtttctgttcctcacgacctccaggtggttcgccgtccggctggacgccatttgcgcgatgtttgtgatcatcgttgcctttggcagtctcattctcgccaaaacgctcgatgcggggcaggttgggctcgctctatcatacgccctgaccctcatgggcatgttccagtggtgcgtgagacagagtgctgaggtggaaaacatgatgatcagcgttgagcgcgtaatcgagtacacagatttggagaaagaagctccctgggaatatcagaagcgaccccctcccgcatggccccatgagggagtcatcatctttgacaacgtcaatttcatgtattcccccgggggacccctcgtgcttaagcatcttactgcgctaatcaagtctcaagagaaagtgggaattgtcggaaggaccggcgccggaaagtcaagcctgatttccgcactctttcgtctgtccgagccggaaggtaagatctggatcgacaaaatcttgacgacagagattggactacacgatctgcgaaagaagatgagcattattccgcaggagccagttctgttcaccggaaccatgcggaaaaacctagacccattcaatgagcacactgatgaagagctgtggaatgctctgcaagaagtgcagcttaaggagaccatcgaagaccttcccggaaagatggatacagagctagccgaatccggttctaacttctcagtcgggcagcgacagctcgtgtgtctcgctagagccattttgagaaaaaaccagatcttaattattgacgaggccacagcaaacgtggatcctaggacagatgaattaatccagaagaagatccgggagaagtttgctcactgcacggttctcaccatcgcccacaggctcaacacaattatcgactccgacaagatcatggtacttgactctgggagactgaaggaatatgacgaaccctatgtgctcctgcagaacaaggagagcctgttttataaaatggtgcagcagttagggaaggctgaagccgcagcattaacggagaccgccaaacaggtgtattttaaacggaattaccctcacattggccatactgaccatatggtgacaaacacgagtaatggccagccttccacactgaccatcttcgaaacagctctgtag

SEQ ID NO: 113983 - DNA, 3837 bp, Artificial Sequence
  derived and/or modified sequence
atgctgcctgtgtaccaggaggttaagccaaatcccctgcaagacgctaacctgtgcagtagggtattcttctggtggcttaatccccttttcaagattggccacaaaagaagactcgaggaggatgatatgtattccgtgcttcctgaagacaggtcccagcacctgggagaagaactgcagggattctgggataaggaagtgttacgtgcggaaaatgacgctcagaagcccagtctcactcgtgcaattattaagtgctattggaagtcttacttagtcctcggaatctttaccctgatcgaggagtctgcaaaagtcattcagcccatcttcctgggtaagatcattaactattttgaaaactacgatccaatggacagtgtcgcactgaacactgcatacgcatacgcaacggtattgactttttgtacgctgatcctagccattcttcatcatctgtatttttaccacgtgcaatgcgcaggcatgaggctcagagttgctatgtgtcacatgatctaccgcaaggccttaaggctttcgaatatggctatgggcaaaacaactacgggccagatcgtgaacctcctctcgaacgacgtcaacaagtttgaccaggttacagtgtttctgcacttcctgtgggccggtcctcttcaagcaatcgccgtcaccgccttgctgtggatggagataggtatcagctgcttagccggtatggcagtgctgatcatactgctacctctccagagctgtttcgggaagctgttctcgtctttgaggagtaagactgccacttttacagatgcgcgaatacgcaccatgaacgaagtgatcacggggattagaattattaagatgtacgcatgggaaaaaagctttagcaacctgatcaccaatctgagaaagaaggagatttccaaaatcctgcgctcaagctgcctgcggggaatgaacctggcctcgtttttttccgcttcgaaaatcatcgtattcgtgacattcacaacctacgtcctcctcgggtcggtaatcacggcctccagagtgtttgtggctgtcacgctttacggtgctgtcagacttacggtgactttgttcttcccatctgccatcgaacgagtgagcgaagccatcgtgagcattagaaggatacagacatttctcttgttggacgagatatctcagcggaaccggcagctgccttcagacgggaagaagatggtacatgtgcaagattttaccgctttttgggataaagccagcgaaactcctactctacaaggcttgtcttttaccgtgaggccaggagagttattagccgttgttggacccgtcggggctggtaagtcttcgctcctgtcagcggtgctgggagaactcgcccctagccacggccttgttagcgtgcacgggagaattgcctacgtcagtcagcagccctgggttttctctgggactctgagaagcaacatactgtttggtaagaagtacgaaaaagaaagatatgagaaggtaataaaggcttgtgccctgaagaaagatcttcagctcctagaggacggagacctgaccgtgattggagatcgaggaactacactaagcgggggtcagaaagctagggtgaatttggctcgtgcggtatatcaggacgctgacatttatctattggacgaccccctgtctgctgtagatgccgaggtctcccggcatctctttgagctgtgcatatgccagatcctccatgagaagatcaccatcttggtgacccaccaactccaatatttgaaagccgcaagtcaaatcttgatactgaaggacgggaagatggttcagaagggcacctacaccgagttcttaaagtctgggatagacttcggcagcttgttaaaaaaagacaacgaagagtccgagcagccccctgttccaggtacccccacactccggaaccggacattctccgagtccagtgtgtggagtcagcagtcaagtcgcccaagccttaaagacggagcccttgagtctcaggatgtggcctacgtgctgcaagactggtggctgtcatattgggcgaacaagcaatcaatgttgaacgtcactgtcaatggcggaggcaatgtaacggaaaagttagatctgaattggtatctgggtatttattctggacttactgtcgccacggtgttgtttggaatcgcgaggtctctcctcgttttctacgtgctggtgaactcctcccaaacacttcataataaaatgttcgaaagtatcctgaaagctccagttctgttctttgacagaaacccaattggcaggattcttaacaggttttcaaaagatatcggacacctggacgacctgttaccgcttacttttcttgattttatacagaccctccttcaggtggtcggcgtggtgagcgtcgcagtggctgtgatcccttggatcgctatccccttggttccattaggcataattttcatctttctccggcgatattttctggaaaccagtagagacgtcaagaggctggaatctaccacgcgttcccccgtgttcagccacctgtctagttccttgcagggactgtggacgataagggcctataaagcagaagagcgctgtcaggagctgttcgacgcccaccaggacctgcactccgaggcatggttcctcttcttaaccacctcgaggtggtttgcagtgagactggatgctatatgtgccatgtttgtgatcattgtggcctttggatccttgattctggccaaaactctggatgccggacaggttggactcgccctatcttacgcccttacccttatggggatgttccagtggtgtgtgcggcaatctgcggaggtcgaaaatatgatgatctctgtggagagagttattgagtacacagaccttgaaaaagaggccccttgggagtaccagaagagaccacctcctgcctggccccatgaaggtgttataattttcgataacgtcaacttcatgtacagccctggcggtcctctggtcctgaagcaccttactgcacttattaagtcccaggagaaagttgggatcgtcggtcggaccggggcagggaaatcctcattgataagtgctcttttcaggctgtctgagccagagggtaaaatctggatagacaagatcttgactacggagattggcctgcatgacctgagaaagaagatgtctattatcccccaggagcccgtactattcactgggacaatgagaaaaaatctagatcccttcaatgagcatacagatgaggaactgtggaatgccttacaggaggtccagttgaaagagaccatcgaagacctacctggcaaaatggatactgagctggctgagtccgggtccaactttagcgttggacagaggcaacttgtgtgtctggccagagccatactgaggaagaaccagatcctcattattgatgaagccaccgcaaacgtagatcccagaacggacgagttaattcagaagaaaatacgtgaaaaatttgcgcactgcacggtcctcaccattgctcacagactgaacaccataatcgacagcgacaaaattatggtgctcgatagcggaaggctcaaggaatatgacgaaccatacgtgctgctgcagaacaaggagtcattattttataagatggtgcagcaactgggtaaggccgaggctgccgcactgaccgaaacggccaagcaagtgtacttcaaacgtaactacccacacattggccacactgaccatatggtaaccaatacaagtaacggacagcccagtacgctgacaatcttcgagacagccctctag

SEQ ID NO: 113984 - DNA, 5702 bp, Artificial Sequence
  derived and/or modified sequence
gagcggacaggcgtggcggccggagccccagcatccctgcttgaggtccaggagcggagcccgcggccaccgccgcctgatcagcgcgaccccggcccgcgcccgccccgcccggcaagatgctgcccgtgtaccaggaggtgaagcccaacccgctgcaggacgcgaacctctgctcacgcgtgttcttctggtggctcaatcccttgtttaaaattggccataaacggagattagaggaagatgatatgtattcagtgctgccagaagaccgctcacagcaccttggagaggagttgcaagggttctgggataaagaagttttaagagctgagaatgacgcacagaagccttctttaacaagagcaatcataaagtgttactggaaatcttatttagttttgggaatttttacgttaattgaggaaagtgccaaagtaatccagcccatatttttgggaaaaattattaattattttgaaaattatgatcccatggattctgtggctttgaacacagcgtacgcctatgccacggtgctgactttttgcacgctcattttggctatactgcatcacttatatttttatcacgttcagtgtgctgggatgaggttacgagtagccatgtgccatatgatttatcggaaggcacttcgtcttagtaacatggccatggggaagacaaccacaggccagatagtcaatctgctgtccaatgatgtgaacaagtttgatcaggtgacagtgttcttacacttcctgtgggcaggaccactgcaggcgattgcagtgactgccctactctggatggagataggaatatcgtgccttgctgggatggcagttctaatcattctcctgcccttgcaaagctgttttgggaagttgttctcatcactgaggagtaaaactgcaactttcacggatgccaggatcaggaccatgaatgaagttataactggtataaggataataaaaatgtacgcctgggaaaagtcattttcaaatcttattaccaatttgagaaagaaggagatttccaagattctgagaagttcctgcctcagagggatgaatttggcttcatttttcagtgcaagcaaaatcatcgtgtttgtgaccttcaccacctacgtgctcctcggcagtgtgatcacagccagccgcgtgttcgtggcagtgacgctgtatggggctgtgcggctgacggttaccctcttcttcccctcagccattgagagggtgtcagaggcaatcgtcagcatccgaagaatccagacctttttgctacttgatgagatatcacagcgcaaccgtcagctgccgtcagatggtaaaaagatggtgcatgtgcaggattttactgctttttgggataaggcatcagagaccccaactctacaaggcctttcctttactgtcagacctggcgaattgttagctgtggtcggccccgtgggagcagggaagtcatcactgttaagtgccgtgctcggggaattggccccaagtcacgggctggtcagcgtgcatggaagaattgcctatgtgtctcagcagccctgggtgttctcgggaactctgaggagtaatattttatttgggaagaaatacgaaaaggaacgatatgaaaaagtcataaaggcttgtgctctgaaaaaggatttacagctgttggaggatggtgatctgactgtgataggagatcggggaaccacgctgagtggagggcagaaagcacgggtaaaccttgcaagagcagtgtatcaagatgctgacatctatctcctggacgatcctctcagtgcagtagatgcggaagttagcagacacttgttcgaactgtgtatttgtcaaattttgcatgagaagatcacaattttagtgactcatcagttgcagtacctcaaagctgcaagtcagattctgatattgaaagatggtaaaatggtgcagaaggggacttacactgagttcctaaaatctggtatagattttggctcccttttaaagaaggataatgaggaaagtgaacaacctccagttccaggaactcccacactaaggaatcgtaccttctcagagtcttcggtttggtctcaacaatcttctagaccctccttgaaagatggtgctctggagagccaagatgttgcctatgtgcttcaagattggtggctttcatactgggcaaacaaacaaagtatgctaaatgtcactgtaaatggaggaggaaatgtaaccgagaagctagatcttaactggtacttaggaatttattcaggtttaactgtagctaccgttctttttggcatagcaagatctctattggtattctacgtccttgttaactcttcacaaactttgcacaacaaaatgtttgagtcaattctgaaagctccggtattattctttgatagaaatccaataggaagaattttaaatcgtttctccaaagacattggacacttggatgatttgctgccgctgacgtttttagatttcatccagacattgctacaagtggttggtgtggtctctgtggctgtggccgtgattccttggatcgcaatacccttggttccccttggaatcattttcatttttcttcggcgatattttttggaaacgtcaagagatgtgaagcgcctggaatctacaactcggagtccagtgttttcccacttatcatcttctctccaggggctctggaccatccgggcatacaaagcagaagagaggtgtcaggaactgtttgatgcacaccaggatttacattcagaggcttggttcttgtttttgacaacgtcccgctggtttgccgtccgtctggatgccatctgtgccatgtttgtcatcatcgttgcctttgggtccctgattctggcaaaaactctggatgccgggcaggttggtttggcactgtcctatgccctcacgctcatggggatgtttcagtggtgtgttcgacaaagtgctgaagttgagaatatgatgatctcagtagaaagggtcattgaatacacagaccttgaaaaagaagcaccttgggaatatcagaaacgcccaccaccagcctggccccatgaaggagtgataatctttgacaatgtgaacttcatgtacagtccaggtgggcctctggtactgaagcatctgacagcactcattaaatcacaagaaaaggttggcattgtgggaagaaccggagctggaaaaagttccctcatctcagccctttttagattgtcagaacccgaaggtaaaatttggattgataagatcttgacaactgaaattggacttcacgatttaaggaagaagatgtcaatcatacctcaggaacctgttttgttcactggaacaatgaggaaaaacctggatccctttaatgagcacacggatgaggaactgtggaatgccttacaagaggtacaacttaaagaaaccattgaagatcttcctggtaaaatggatactgaattagcagaatcaggatccaattttagtgttggacaaagacaactggtgtgccttgccagggcaattctcaggaaaaatcagatattgattattgatgaagcgacggcaaatgtggatccaagaactgatgagttaatacaaaaaaaaatccgggagaaatttgcccactgcaccgtgctaaccattgcacacagattgaacaccattattgacagcgacaagataatggttttagattcaggaagactgaaagaatatgatgagccgtatgttttgctgcaaaataaagagagcctattttacaagatggtgcaacaactgggcaaggcagaagccgctgccctcactgaaacagcaaaacaggtatacttcaaaagaaattatccacatattggtcacactgaccacatggttacaaacacttccaatggacagccctcgaccttaactattttcgagacagcactgtgaatccaaccaaaatgtcaagtccgttccgaaggcattttccactagtttttggactatgtaaaccacattgtacttttttttactttggcaacaaatatttatacatacaagatgctagttcatttgaatatttctcccaacttatccaaggatctccagctctaacaaaatggtttatttttatttaaatgtcaatagttgttttttaaaatccaaatcagaggtgcaggccaccagttaaatgccgtctatcaggttttgtgccttaagagactacagagtcaaagctcatttttaaaggagtaggacaaagttgtcacaggtttttgttgttgtttttattgcccccaaaattacatgttaatttccatttatatcagggattctatttacttgaagactgtgaagttgccattttgtctcattgttttctttgacataactaggatccattatttcccctgaaggcttcttgttagaaaatagtacagttacaaccaataggaacaacaaaaagaaaaagtttgtgacattgtagtagggagtgtgtaccccttactccccatcaaaaaaaaaaatggatacatggttaaaggatagaagggcaatattttatcatatgttctaaaagagaaggaagagaaaatactactttctcaaaatggaagcccttaaaggtgctttgatactgaaggacacaaatgtgaccgtccatcctcctttagagttgcatgacttggacacggtaactgttgcagttttagactcagcattgtgacacttcccaagaaggccaaacctctaaccgacattcctgaaatacgtggcattattcttttttggatttctcatttatggaaggctaaccctctgttgactgtaagccttttggtttgggctgtattgaaatcctttctaaattgcatgaataggctctgctaacgtgatgagacaaactgaaaattattgcaagcattgactataattatgcagtacgttctcaggatgcatccaggggttcattttcatgagcctgtccaggttagtttactcctgaccactaatagcattgtcatttgggctttctgttgaatgaatcaacaaaccacaatacttcctgggaccttttgtactttatttgaactatgagtctttaatttttcctgatgatggtggctgtaatatgttgagttcagtttactaaaggttttactattatggtttgaagtggagtctcatgacctctcagaataaggtgtcacctccctgaaattgcatatatgtatatagacatgcacacgtgtgcatttgtttgtatacatatatttgtccttcgtatagcaagttttttgctcatcagcagagagcaacagatgttttattgagtgaagccttaaaaagcacacaccacacacagctaactgccaaaatacattgaccgtagtagctgttcaactcctagtacttagaaatacacgtatggttaatgttcagtccaacaaaccacacacagtaaatgtttattaatagtcatggttcgtattttaggtgactgaaattgcatcagtgatcataatgaggtttgttaaaacgatagctatattcaaaatgtctatatgtttatttggacttttgaggttaaagacagtcatataaacgtcctgtttctgttttaatgttatcatagaattttttaatgaaactaaattcaattgaaataaatgatagttttcatctccattcaga

SEQ ID NO: 113985 - DNA, 3837 bp, Artificial Sequence
  derived and/or modified sequence
atgctgcccgtgtaccaggaggtgaagcccaaccccctgcaggacgccaacctgtgcagcagagtgttcttctggtggctgaaccccctgttcaagatcggccacaagagaagactggaggaggacgacatgtacagcgtgctgcccgaggacagaagccagcacctgggcgaggagctgcagggcttctgggacaaggaggtgctgagagccgagaacgacgcccagaagcccagcctgaccagagccatcatcaagtgctactggaagagctacctggtgctgggcatcttcaccctgatcgaggagagcgccaaggtgatccagcccatcttcctgggcaagatcatcaactacttcgagaactacgaccccatggacagcgtggccctgaacaccgcctacgcctacgccaccgtgctgaccttctgcaccctgatcctggccatcctgcaccacctgtacttctaccacgtgcagtgcgccggcatgagactgagagtggccatgtgccacatgatctacagaaaggccctgagactgagcaacatggccatgggcaagaccaccaccggccagatcgtgaacctgctgagcaacgacgtgaacaagttcgaccaggtgaccgtgttcctgcacttcctgtgggccggccccctgcaggccatcgccgtgaccgccctgctgtggatggagatcggcatcagctgcctggccggcatggccgtgctgatcatcctgctgcccctgcagagctgcttcggcaagctgttcagcagcctgagaagcaagaccgccaccttcaccgacgccagaatcagaaccatgaacgaggtgatcaccggcatcagaatcatcaagatgtacgcctgggagaagagcttcagcaacctgatcaccaacctgagaaagaaggagatcagcaagatcctgagaagcagctgcctgagaggcatgaacctggccagcttcttcagcgccagcaagatcatcgtgttcgtgaccttcaccacctacgtgctgctgggcagcgtgatcaccgccagcagagtgttcgtggccgtgaccctgtacggcgccgtgagactgaccgtgaccctgttcttccccagcgccatcgagagagtgagcgaggccatcgtgagcatcagaagaatccagaccttcctgctgctggacgagatcagccagagaaacagacagctgcccagcgacggcaagaagatggtgcacgtgcaggacttcaccgccttctgggacaaggccagcgagacccccaccctgcagggcctgagcttcaccgtgagacccggcgagctgctggccgtggtgggccccgtgggcgccggcaagagcagcctgctgagcgccgtgctgggcgagctggcccccagccacggcctggtgagcgtgcacggcagaatcgcctacgtgagccagcagccctgggtgttcagcggcaccctgagaagcaacatcctgttcggcaagaagtacgagaaggagagatacgagaaggtgatcaaggcctgcgccctgaagaaggacctgcagctgctggaggacggcgacctgaccgtgatcggcgacagaggcaccaccctgagcggcggccagaaggccagagtgaacctggccagagccgtgtaccaggacgccgacatctacctgctggacgaccccctgagcgccgtggacgccgaggtgagcagacacctgttcgagctgtgcatctgccagatcctgcacgagaagatcaccatcctggtgacccaccagctgcagtacctgaaggccgccagccagatcctgatcctgaaggacggcaagatggtgcagaagggcacctacaccgagttcctgaagagcggcatcgacttcggcagcctgctgaagaaggacaacgaggagagcgagcagccccccgtgcccggcacccccaccctgagaaacagaaccttcagcgagagcagcgtgtggagccagcagagcagcagacccagcctgaaggacggcgccctggagagccaggacgtggcctacgtgctgcaggactggtggctgagctactgggccaacaagcagagcatgctgaacgtgaccgtgaacggcggcggcaacgtgaccgagaagctggacctgaactggtacctgggcatctacagcggcctgaccgtggccaccgtgctgttcggcatcgccagaagcctgctggtgttctacgtgctggtgaacagcagccagaccctgcacaacaagatgttcgagagcatcctgaaggcccccgtgctgttcttcgacagaaaccccatcggcagaatcctgaacagattcagcaaggacatcggccacctggacgacctgctgcccctgaccttcctggacttcatccagaccctgctgcaggtggtgggcgtggtgagcgtggccgtggccgtgatcccctggatcgccatccccctggtgcccctgggcatcatcttcatcttcctgagaagatacttcctggagaccagcagagacgtgaagagactggagagcaccaccagaagccccgtgttcagccacctgagcagcagcctgcagggcctgtggaccatcagagcctacaaggccgaggagagatgccaggagctgttcgacgcccaccaggacctgcacagcgaggcctggttcctgttcctgaccaccagcagatggttcgccgtgagactggacgccatctgcgccatgttcgtgatcatcgtggccttcggcagcctgatcctggccaagaccctggacgccggccaggtgggcctggccctgagctacgccctgaccctgatgggcatgttccagtggtgcgtgagacagagcgccgaggtggagaacatgatgatcagcgtggagagagtgatcgagtacaccgacctggagaaggaggccccctgggagtaccagaagagacccccccccgcctggccccacgagggcgtgatcatcttcgacaacgtgaacttcatgtacagccccggcggccccctggtgctgaagcacctgaccgccctgatcaagagccaggagaaggtgggcatcgtgggcagaaccggcgccggcaagagcagcctgatcagcgccctgttcagactgagcgagcccgagggcaagatctggatcgacaagatcctgaccaccgagatcggcctgcacgacctgagaaagaagatgagcatcatcccccaggagcccgtgctgttcaccggcaccatgagaaagaacctggaccccttcaacgagcacaccgacgaggagctgtggaacgccctgcaggaggtgcagctgaaggagaccatcgaggacctgcccggcaagatggacaccgagctggccgagagcggcagcaacttcagcgtgggccagagacagctggtgtgcctggccagagccatcctgagaaagaaccagatcctgatcatcgacgaggccaccgccaacgtggaccccagaaccgacgagctgatccagaagaagatcagagagaagttcgcccactgcaccgtgctgaccatcgcccacagactgaacaccatcatcgacagcgacaagatcatggtgctggacagcggcagactgaaggagtacgacgagccctacgtgctgctgcagaacaaggagagcctgttctacaagatggtgcagcagctgggcaaggccgaggccgccgccctgaccgagaccgccaagcaggtgtacttcaagagaaactacccccacatcggccacaccgaccacatggtgaccaacaccagcaacggccagcccagcaccctgaccatcttcgagaccgccctgtag

SEQ ID NO: 113986 - protein, 784 aa, Artificial Sequence
  derived and/or modified sequence
MLPVYQEVKPNPLQDANLCSRVFFWWLNPLFKIGHKRRLEEDDMYSVLPEDRSQHLGEELQGFWDKEVLRAENDAQKPSLTRAIIKCYWKSYLVLGIFTLIEALRLSNMAMGKTTTGQIVNLLSNDVNKFDQVTVFLHFLWAGPLQAIAVTALLWMEIGISCLAGMAVLIILLPLQSCFGKLFSSLRSKTATFTDARIRTMNEVITGIRIIKMYAWEKSFSNLITNLRKKEISKILRSSCLRGMNLASFFSASKIIVFVTFTTYVLLGSVITASRVFVAVTLYGAVRLTVTLFFPSAIERVSEAIVSIRRIQTFLLLDEISQRNRQLPSDGKKMVHVQDFTAFWDKASETPTLQGLSFTVRPGELLAVVGPVGAGKSSLLSAVLGELAPSHGLVSVHGRIAYVSQQPWVFSGTLRSNILFGKKYEKERYEKVIKACALKKDLQLLEDGDLTVIGDRGTTLSGGQKARVNLARAVYQDADIYLLDDPLSAVDAEVSRHLFELCICQILHEKITILVTHQLQYLKAASQILILKDGKMVQKGTYTEFLKSGIDFGSLLKKDNEESEQPPVPGTPTLRNRTFSESSVWSQQSSRPSLKDGALESQDTENVPVTLSEENRSEGKVGFQAYKNYFRAGAHWIVFIFLILLNTAAQVAYVLQDWWLSYWANKQSMLNVTVNGGGNVTEKLDLNWYLGIYSGLTVATVLFGIARSLLVFYVLVNSSQTLHNKMFESILKAPVLFFDRNPIGRILNRFSKDIGHLDDLLPLTFLDFIQRWDLAVLSWLVSNS

SEQ ID NO: 113987 - protein, 24 aa, Artificial Sequence
  derived and/or modified sequence
MLPVYQEVKPNPLQDANLCSRVFF

SEQ ID NO: 113988 - DNA, 2355 bp, Artificial Sequence
  derived and/or modified sequence
atgctgccggtttaccaggaagttaaaccaaaccctttgcaggatgcgaatctctgctcgcgcgtcttcttctggtggctcaacccgctgtttaaaattggacacaagaggcgccttgaagaggacgacatgtattctgtactccccgaggacaggtcgcagcatctgggggaggagctacaggggttctgggacaaagaggtactgcgggctgagaatgacgctcaaaaacctagtctgactcgggcaattatcaaatgttattggaaatcgtacctcgtgctgggtattttcacactcatagaagccttgagactttcaaatatggccatgggtaaaaccacaacggggcaaattgtgaatttgctgtcaaacgatgtgaataagttcgaccaggtgactgtgtttctgcactttttgtgggcaggccccctacaggcaatcgcagtgacagccctcctgtggatggaaatcggaatctcttgtcttgccggcatggcagtattgattatcctgctgcctttacaatcctgctttgggaaactcttctccagtctgaggtctaaaacagctacgttcaccgacgccagaatcaggacaatgaacgaagtcatcactggcatacgtattattaagatgtacgcttgggaaaaaagtttctccaatcttataaccaatctacgcaagaaggaaatttccaagatcctgcgcagttcatgcctgcggggcatgaaccttgcttcatttttctcggcctccaagatcattgttttcgtgaccttcaccacatacgtcctgctgggctccgtaatcacggcctctcgggtgtttgtggccgtcaccctgtacggggccgtgaggctgaccgtgacactgttttttccctccgcgattgaaagagtgagcgaagccatcgtttccattcgcagaattcagactttcctgctcctcgatgagatcagtcagagaaacagacagctaccgtcagatgggaaaaagatggtccacgttcaggatttcacagccttctgggataaagcaagtgaaacaccgaccctccaagggctatcattcacagtgcggcccggtgagttgcttgccgtagtgggccccgtcggcgcagggaagtcctctcttctgagtgcagtcttgggtgagctggctccaagtcatggcttagtgtccgtgcacggacgtatcgcctatgtgtcccagcaaccgtgggtgtttagcggcacccttagatctaacatcctgttcgggaagaagtacgaaaaggagaggtacgaaaaagtgatcaaagcctgtgcactgaagaaggacctgcagctattggaagatggagatctgacagttatcggggacaggggtactacactgagtggtggacagaaggcacgagtaaacctagctagagcagtgtaccaggacgctgacatctaccttctggacgatccactgagcgctgtcgatgccgaggtctctcgccacttattcgagttgtgtatttgccagatcttgcacgagaaaatcacaatcttggttacccaccaactgcagtatctaaaagccgccagccagattcttattctaaaagatggcaagatggtacagaaaggaacttacactgaatttcttaaatccggcatcgactttggaagtctcttaaaaaaagataatgaagaaagtgaacagccaccagttcccggcacaccaacacttcgtaacagaacgttcagcgaaagcagcgtatggtcccagcagtcctctcggcctagcctgaaggacggagccttggaatctcaggacacagaaaacgtcccggtgactctgagcgaggaaaataggtccgaaggcaaggtaggattccaggcatacaagaactatttcagagcaggcgctcactggattgtgtttattttccttatacttctgaacaccgccgcgcaggtggcctatgtcttacaagactggtggctgagttactgggccaacaagcaaagtatgctcaatgtgacggtcaacgggggtgggaatgtgaccgagaaactggacctcaattggtatctgggaatctactcagggttaacagtggcgaccgtactgtttgggatagccaggagcctgctcgtgttttatgttttagtcaactccagccagactttacacaataaaatgttcgagagtatactgaaagcgcctgtcctattctttgaccgcaacccaatcgggcgtatcctgaatcgcttctccaaggacatcgggcatctcgacgatctcctccccctcacattcttggattttatacagcgatgggatctcgccgtgctctcatggctggtttcaaattcctag

SEQ ID NO: 113989 - DNA, 2355 bp, Artificial Sequence
  derived and/or modified sequence
atgctgcctgtgtaccaggaggtgaagcccaaccccctgcaggatgccaacctgtgcagcagggtcttcttctggtggctgaaccccctcttcaagattggccacaagaggcggctggaggaggatgacatgtacagcgtgctgcctgaggacaggagccagcacctgggggaggagctgcagggcttctgggacaaggaggtgctgcgggcagaaaatgatgcccagaagcccagcctgacccgggccatcatcaagtgctactggaagagctacctggtgctgggcatcttcaccctgattgaggccctgcggctgagcaacatggccatgggcaagaccaccaccggccagatcgtgaacctgctgagcaatgatgtgaacaagtttgaccaggtgaccgtcttcctgcacttcctgtgggccggccccctgcaggccatcgctgtgacagccctgctgtggatggagatcggcatcagctgcctggccggcatggctgtgctgatcatcctgctgcccctgcagagctgcttcggcaagctgttcagcagcctgcggagcaagacagccaccttcacagatgcccgcatccgcaccatgaatgaggtgatcaccggcatccgcatcatcaagatgtatgcctgggagaagagcttcagcaacctgatcaccaacctgaggaagaaggagatcagcaagatcctgcggagcagctgcctgcggggcatgaacctggccagcttcttcagcgccagcaagatcatcgtgtttgtgaccttcaccacctacgtgctgctgggcagcgtcatcacagccagccgggtgtttgtggccgtgaccctgtatggagctgtgcggctgactgtgaccctcttcttccccagcgccatcgagcgggtgtctgaggccatcgtgtccatccgccgcatccagaccttcctgctgctggatgagatcagccagaggaaccggcagctgcccagtgatggcaagaagatggtgcacgtgcaggacttcaccgccttctgggacaaggccagcgagacccccaccctgcagggcctgtccttcaccgtgcggcctggagagctgctggccgtggtgggccctgtgggcgctgggaagagcagcctgctgtctgctgtgctgggggagctggcccccagccacggcctggtgtctgtgcacggccgcatcgcctacgtgtcccagcagccctgggtgttttctggcaccctgcggagcaacatcctgtttgggaagaagtatgagaaggagagatatgagaaggtgatcaaggcctgtgccctgaagaaggacctgcagctgctggaggatggagacctgactgtgattggagaccggggcaccaccctgagcggcggccagaaggcccgggtgaacctggcccgggctgtgtaccaggatgctgacatctacctgctggatgaccccctgtctgctgtggatgctgaggtgagccgccacctgtttgagctgtgcatctgccagatcctgcacgagaagatcaccatcctggtgacccaccagctgcagtacctgaaggccgccagccagatcctgatcctgaaggatggcaagatggtgcagaagggcacctacacagagttcctgaagagcggcatcgactttggcagcctgctgaagaaggacaatgaggagagcgagcagccccctgtgcccggcacccccaccctgaggaacagaaccttcagcgagagctctgtgtggagccagcagagcagccggcccagcctgaaggatggagccctggagagccaggacacagaaaatgtgcctgtgaccctgtctgaggagaacagaagtgagggcaaggtgggcttccaggcctacaagaactacttccgggccggggcccactggatcgtgttcatcttcctgatcctgctgaacacagctgcccaggtggcctacgtgctgcaggactggtggctgagctactgggccaacaagcagagcatgctgaatgtgacagtgaatggaggcggcaatgtgacagagaagctggacctgaactggtacctgggcatctacagcggcctgactgtggccaccgtgctgtttggaattgcccggagcctgctggtgttctacgtgctggtgaacagcagccagaccctgcacaacaagatgtttgagagcatcctgaaggcccctgtgctcttctttgacaggaaccccatcggccgcatcctgaaccgcttcagcaaggacatcggccacctggatgacctgctgcccctgaccttcctggacttcatccagcgctgggacctggccgtgctgtcctggctggtgagcaacagctag

SEQ ID NO: 113990 - DNA, 2355 bp, Artificial Sequence
  derived and/or modified sequence
atgctgcccgtgtaccaggaggtgaagcccaaccccctgcaggacgctaatctgtgctcccgggtgttcttctggtggctgaacccactgtttaaaattggccataagcggcgcctggaggaggacgacatgtatagtgttctacctgaggatagaagccagcatttaggcgaggaactgcaaggattttgggataaggaggttctgcgcgctgaaaatgacgcgcagaaaccctcactcacacgggccatcatcaagtgttattggaagtcatatctcgtccttggcatttttacacttatagaagccttgagactgagcaatatggctatgggaaagacaacgacaggacagatcgtgaatctcctctctaacgatgtcaataaatttgaccaggttacagtctttctgcacttcctttgggctgggccactccaggcaattgcagtgacagctctgttgtggatggagatcgggatatcatgcctggccggcatggccgtcctgattattctcctgcccctgcaatcatgtttcgggaaactgtttagctctctaagatcaaaaaccgcaaccttcaccgacgccagaattcggactatgaacgaagtgatcaccggtatcagaatcattaagatgtatgcatgggaaaagtccttctccaacttgatcaccaatctgaggaagaaggagatcagtaaaattctgcggtcttcttgtttgcgagggatgaatcttgccagttttttctctgcctccaagatcattgtcttcgtaacgttcacgacatacgttttgctcggaagcgtgatcacggcctcgagagttttcgtggccgtgactctgtacggcgctgtgcgccttaccgtcaccctcttctttccatccgcgatagagcgcgtgtctgaagccatcgtgagcatcagaagaatacagactttcttgctcctcgatgaaatctcccaacgcaatagacagctgccttctgatggcaagaagatggtgcacgtccaggactttactgcattttgggataaagcctccgaaacacccacactgcagggcctgagcttcaccgttcgacctggcgagcttctggccgttgtgggtcccgttggcgccgggaagagctcgctgctctcagctgtgctcggagagctggcaccaagtcatggattggtttctgtgcacggacgcattgcatacgtgtcacagcagccatgggtcttctctggtacactccgcagcaacatcctcttcggaaagaaatatgagaaggagaggtacgagaaagtcatcaaggcttgtgcgttaaagaaggatctgcaacttctcgaagacggcgatctgactgtgatcggtgacagaggcaccactttgtccgggggccagaaggcccgtgtgaacctggcaagagccgtctaccaagacgccgatatttacctcctggatgatccactatcagccgtagacgcagaagtctcaaggcacttgttcgagctgtgcatctgtcagattttgcacgagaaaattacaattctagtcactcaccagctacagtatctcaaggcagcgtcacagattctgatcctgaaggatgggaagatggtacagaaggggacttacaccgagttcctgaaaagtggcatcgatttcggatccctgctaaagaaggataatgaagagtctgagcaaccaccagtgccggggacccccacactcagaaaccgcaccttctctgagagcagcgtttggtcacagcagtcctctcgcccaagcctgaaggatggggcactggagtcacaggacactgaaaacgtgcctgtgactctgtccgaggagaacaggtcagagggtaaggtgggattccaggcctataagaattattttcgagccggggcgcactggattgtgttcatctttttaatcttgttgaatacagctgctcaggtagcctacgtgctgcaggactggtggctcagctactgggccaacaagcagtctatgcttaacgtgaccgtcaatggaggggggaacgtcaccgaaaaactcgacctaaactggtatctgggtatctattccggactgacggtcgccactgttttgtttggcattgcccggagtttgctggttttctatgtccttgtgaatagctcacagacgttgcacaacaagatgttcgaaagcatcctgaaggcgccagtccttttcttcgatcgtaaccccatcgggcgaatcctgaaccgcttctctaaagatatcgggcaccttgatgacctgctgccattaacgttcctcgattttatacagagatgggacctggccgtgctcagctggcttgtgtcaaattcatag

SEQ ID NO: 113991 - DNA, 2355 bp, Artificial Sequence
  derived and/or modified sequence
atgctgccggtgtatcaggaggtgaaaccaaaccctttgcaggatgccaacctctgttcccgtgttttcttctggtggctaaaccctctgttcaagatcggtcacaagcgtcgactcgaggaggacgacatgtacagcgtgttgccagaagatagaagccagcatctgggcgaggagcttcagggcttctgggacaaagaagtgcttcgggctgaaaacgacgcacagaagcccagcttaaccagggccatcatcaaatgttactggaagtcatatctggtgcttggaattttcaccctgatcgaggcactacgattgtcgaatatggctatgggaaaaacaaccactggtcagatcgttaacctgctaagcaacgacgtcaacaagttcgaccaggtcaccgtttttttgcatttcctatgggccggacccctgcaagcaatcgcagtcactgcacttctgtggatggagattggtatatcgtgccttgcgggaatggccgtgctaataatccttctacccttgcagtcatgtttcgggaagcttttcagttctctccgctccaagaccgcgacttttaccgatgctcggattcgcaccatgaatgaagtcatcaccggaatccgcattatcaaaatgtatgcctgggaaaaatctttctctaatctgatcactaacctccggaagaaggagatcagcaaaattcttaggagttcctgtttaagagggatgaatcttgccagctttttcagcgcttctaaaattatagtgttcgtgacttttactacttacgtacttctcgggtctgtgatcaccgcttcccgagtctttgtagccgtaacactgtacggggcagtcaggctcacggttacactgttcttcccttcagccatagaacgtgtatctgaagcgattgtgtccattcgcagaatccagacctttctgttgctggatgagattagtcagcgtaaccggcagctccccagtgacggaaaaaagatggtacacgtccaggacttcactgccttttgggataaagcctccgaaactccaacactgcagggcctgtctttcaccgtgaggcccggtgagctgttagctgtggtagggcctgtgggcgcaggtaaatcaagcctcctttcggccgtcctgggtgaactggccccatcacacggcctagtgagcgtccacgggcgaatcgcctatgtgtctcagcaaccttgggtcttctcaggcactttacgaagtaacatcctgtttggcaagaagtacgaaaaggaacgttatgaaaaagtgatcaaagcttgcgctctgaagaaggaccttcagctcctggaggatggtgatttgactgttataggtgaccgtggcaccaccctgagcggaggacagaaggcaagggtgaatctagccagagctgtgtaccaggatgctgatatttatctgctggacgaccccctatctgccgttgatgccgaagtgtcccgacacctatttgagctatgcatatgccaaatcctccacgagaagattactatactggtaacccatcagctacagtacctcaaagctgcctcccaaatactgatcctgaaagatgggaaaatggttcaaaagggcacctacaccgaattcctgaagtccgggatcgactttggctcgttgctgaagaaagacaacgaagagtccgagcagcctcccgtccccggaactccaacgctaagaaatagaaccttctctgaatcctcggtgtggagccaacagagcagccgcccttccctcaaggatggcgcactagagtctcaggataccgaaaatgtgcccgtgacattgtctgaagagaaccggagcgaaggaaaggtgggctttcaggcatacaagaattactttagggcgggagcacattggatcgtttttattttcctgattctactgaacacagccgctcaagtggcctacgtgctgcaggactggtggctatcttactgggctaataagcagagcatgctaaacgtgacggttaacggtggcggaaacgtgactgaaaaattagatttaaattggtacctcggtatctatagcggtctgaccgtagcgactgtgcttttcgggatagcacggagcctcctggtgttctatgtgctagttaactcgagtcaaaccctccataataaaatgtttgagtccatactcaaggcccctgttctcttcttcgaccgcaacccaatcggcaggattttaaatcgtttttcgaaggatatcggtcatttggacgatctgctgccattaaccttcctggacttcatccaacgatgggatctggccgtgctctcatggctggtgagtaactcatag

SEQ ID NO: 113992 - DNA, 2840 bp, Artificial Sequence
  derived and/or modified sequence
gagcggacaggcgtggcggccggagccccagcatccctgcttgaggtccaggagcggagcccgcggccaccgccgcctgatcagcgcgaccccggcccgcgcccgccccgcccggcaagatgctgcccgtgtaccaggaggtgaagcccaacccgctgcaggacgcgaacctctgctcacgcgtgttcttctggtggctcaatcccttgtttaaaattggccataaacggagattagaggaagatgatatgtattcagtgctgccagaagaccgctcacagcaccttggagaggagttgcaagggttctgggataaagaagttttaagagctgagaatgacgcacagaagccttctttaacaagagcaatcataaagtgttactggaaatcttatttagttttgggaatttttacgttaattgaggcacttcgtcttagtaacatggccatggggaagacaaccacaggccagatagtcaatctgctgtccaatgatgtgaacaagtttgatcaggtgacagtgttcttacacttcctgtgggcaggaccactgcaggcgattgcagtgactgccctactctggatggagataggaatatcgtgccttgctgggatggcagttctaatcattctcctgcccttgcaaagctgttttgggaagttgttctcatcactgaggagtaaaactgcaactttcacggatgccaggatcaggaccatgaatgaagttataactggtataaggataataaaaatgtacgcctgggaaaagtcattttcaaatcttattaccaatttgagaaagaaggagatttccaagattctgagaagttcctgcctcagagggatgaatttggcttcatttttcagtgcaagcaaaatcatcgtgtttgtgaccttcaccacctacgtgctcctcggcagtgtgatcacagccagccgcgtgttcgtggcagtgacgctgtatggggctgtgcggctgacggttaccctcttcttcccctcagccattgagagggtgtcagaggcaatcgtcagcatccgaagaatccagacctttttgctacttgatgagatatcacagcgcaaccgtcagctgccgtcagatggtaaaaagatggtgcatgtgcaggattttactgctttttgggataaggcatcagagaccccaactctacaaggcctttcctttactgtcagacctggcgaattgttagctgtggtcggccccgtgggagcagggaagtcatcactgttaagtgccgtgctcggggaattggccccaagtcacgggctggtcagcgtgcatggaagaattgcctatgtgtctcagcagccctgggtgttctcgggaactctgaggagtaatattttatttgggaagaaatacgaaaaggaacgatatgaaaaagtcataaaggcttgtgctctgaaaaaggatttacagctgttggaggatggtgatctgactgtgataggagatcggggaaccacgctgagtggagggcagaaagcacgggtaaaccttgcaagagcagtgtatcaagatgctgacatctatctcctggacgatcctctcagtgcagtagatgcggaagttagcagacacttgttcgaactgtgtatttgtcaaattttgcatgagaagatcacaattttagtgactcatcagttgcagtacctcaaagctgcaagtcagattctgatattgaaagatggtaaaatggtgcagaaggggacttacactgagttcctaaaatctggtatagattttggctcccttttaaagaaggataatgaggaaagtgaacaacctccagttccaggaactcccacactaaggaatcgtaccttctcagagtcttcggtttggtctcaacaatcttctagaccctccttgaaagatggtgctctggagagccaagatacagagaatgtcccagttacactatcagaggagaaccgttctgaaggaaaagttggttttcaggcctataagaattacttcagagctggtgctcactggattgtcttcattttccttattctcctaaacactgcagctcaggttgcctatgtgcttcaagattggtggctttcatactgggcaaacaaacaaagtatgctaaatgtcactgtaaatggaggaggaaatgtaaccgagaagctagatcttaactggtacttaggaatttattcaggtttaactgtagctaccgttctttttggcatagcaagatctctattggtattctacgtccttgttaactcttcacaaactttgcacaacaaaatgtttgagtcaattctgaaagctccggtattattctttgatagaaatccaataggaagaattttaaatcgtttctccaaagacattggacacttggatgatttgctgccgctgacgtttttagatttcatccagagatgggatctcgctgtgttgtcctggctggtctcaaactcctaggctcaagcaatcctcctccctcctcaagcaaacctcagtgctgggattataggcatgagccactgtacctggctaaatgttgtttttttgatattcaatttttgtttatagaattttcatttgttttgctcttatacttttcatctttttatgtttattgaccaattaaatatcatttgggtaagcacctatttaagtgtcttaacaatttttctattgagtactctgggtttttgttttgtttttcttactgatttgtagaattctttatgtattctgaattgcagataccttccttctgtactaatgcttatctttttagccctgtaatattgtgttttcataaacatacttatcaatcttttc

SEQ ID NO: 113993 - DNA, 2355 bp, Artificial Sequence
  derived and/or modified sequence
atgctgcccgtgtaccaggaggtgaagcccaaccccctgcaggacgccaacctgtgcagcagagtgttcttctggtggctgaaccccctgttcaagatcggccacaagagaagactggaggaggacgacatgtacagcgtgctgcccgaggacagaagccagcacctgggcgaggagctgcagggcttctgggacaaggaggtgctgagagccgagaacgacgcccagaagcccagcctgaccagagccatcatcaagtgctactggaagagctacctggtgctgggcatcttcaccctgatcgaggccctgagactgagcaacatggccatgggcaagaccaccaccggccagatcgtgaacctgctgagcaacgacgtgaacaagttcgaccaggtgaccgtgttcctgcacttcctgtgggccggccccctgcaggccatcgccgtgaccgccctgctgtggatggagatcggcatcagctgcctggccggcatggccgtgctgatcatcctgctgcccctgcagagctgcttcggcaagctgttcagcagcctgagaagcaagaccgccaccttcaccgacgccagaatcagaaccatgaacgaggtgatcaccggcatcagaatcatcaagatgtacgcctgggagaagagcttcagcaacctgatcaccaacctgagaaagaaggagatcagcaagatcctgagaagcagctgcctgagaggcatgaacctggccagcttcttcagcgccagcaagatcatcgtgttcgtgaccttcaccacctacgtgctgctgggcagcgtgatcaccgccagcagagtgttcgtggccgtgaccctgtacggcgccgtgagactgaccgtgaccctgttcttccccagcgccatcgagagagtgagcgaggccatcgtgagcatcagaagaatccagaccttcctgctgctggacgagatcagccagagaaacagacagctgcccagcgacggcaagaagatggtgcacgtgcaggacttcaccgccttctgggacaaggccagcgagacccccaccctgcagggcctgagcttcaccgtgagacccggcgagctgctggccgtggtgggccccgtgggcgccggcaagagcagcctgctgagcgccgtgctgggcgagctggcccccagccacggcctggtgagcgtgcacggcagaatcgcctacgtgagccagcagccctgggtgttcagcggcaccctgagaagcaacatcctgttcggcaagaagtacgagaaggagagatacgagaaggtgatcaaggcctgcgccctgaagaaggacctgcagctgctggaggacggcgacctgaccgtgatcggcgacagaggcaccaccctgagcggcggccagaaggccagagtgaacctggccagagccgtgtaccaggacgccgacatctacctgctggacgaccccctgagcgccgtggacgccgaggtgagcagacacctgttcgagctgtgcatctgccagatcctgcacgagaagatcaccatcctggtgacccaccagctgcagtacctgaaggccgccagccagatcctgatcctgaaggacggcaagatggtgcagaagggcacctacaccgagttcctgaagagcggcatcgacttcggcagcctgctgaagaaggacaacgaggagagcgagcagccccccgtgcccggcacccccaccctgagaaacagaaccttcagcgagagcagcgtgtggagccagcagagcagcagacccagcctgaaggacggcgccctggagagccaggacaccgagaacgtgcccgtgaccctgagcgaggagaacagaagcgagggcaaggtgggcttccaggcctacaagaactacttcagagccggcgcccactggatcgtgttcatcttcctgatcctgctgaacaccgccgcccaggtggcctacgtgctgcaggactggtggctgagctactgggccaacaagcagagcatgctgaacgtgaccgtgaacggcggcggcaacgtgaccgagaagctggacctgaactggtacctgggcatctacagcggcctgaccgtggccaccgtgctgttcggcatcgccagaagcctgctggtgttctacgtgctggtgaacagcagccagaccctgcacaacaagatgttcgagagcatcctgaaggcccccgtgctgttcttcgacagaaaccccatcggcagaatcctgaacagattcagcaaggacatcggccacctggacgacctgctgcccctgaccttcctggacttcatccagagatgggacctggccgtgctgagctggctggtgagcaacagctag

SEQ ID NO: 113994 - protein, 297 aa, Artificial Sequence
  derived and/or modified sequence
MSNRVVCREASHAGSWYTASGPQLNAQLEGWLSQVQSTKRPARAIIAPHAGYTYCGSCAAHAYKQVDPSITRRIFILGPSHHVPLSRCALSSVDIYRTPLYDLRIDQKIYGELWKTGMFERMSLQTDEDEHSIEMHLPYTAKAMESHKDEFTIIPVLVGALSESKEQEFGKLFSKYLADPSNLFVVSSDFCHWGQRFRYSYYDESQGEIYRSIEHLDKMGMSIIEQLDPVSFSNYLKKYHNTICGRHPIGVLLNAITELQKNGMNMSFSFLNYAQSSQCRNWQDSSVSYAAGALTVH

SEQ ID NO: 113995 - protein, 300 aa, Artificial Sequence
  derived and/or modified sequence
MPLWRADKCQDVQSASWRPRRADGPQLNAQLEGWLSQVQSTKRPARAIIAPHAGYTYCGSCAAHAYKQVDPSITRRIFILGPSHHVPLSRCALSSVDIYRTPLYDLRIDQKIYGELWKTGMFERMSLQTDEDEHSIEMHLPYTAKAMESHKDEFTIIPVLVGALSESKEQEFGKLFSKYLADPSNLFVVSSDFCHWGQRFRYSYYDESQGEIYRSIEHLDKMGMSIIEQLDPVSFSNYLKKYHNTICGRHPIGVLLNAITELQKNGMNMSFSFLNYAQSSQCRNWQDSSVSYAAGALTVH

SEQ ID NO: 113996 - DNA, 894 bp, Artificial Sequence
  derived and/or modified sequence
atgagcaatagggtagtgtgtagagaggctagccacgccggctcgtggtatactgctagtgggccacaacttaacgctcagttggaaggatggctgagccaggtacagtcgacaaaacggcccgcgagagccattatcgcaccccacgcagggtatacgtactgtggtagttgtgctgctcacgcatataaacaagtcgacccttcaatcacgcggaggatttttatcctgggtccgtcacatcacgtacctctgagcagatgtgcactgtctagcgttgatatttataggacgcctctgtacgatctgcgaatcgaccagaagatctacggcgagctgtggaagaccggaatgtttgagaggatgagcctgcaaacagacgaggacgaacacagcattgaaatgcacctaccttacaccgctaaggccatggagagccacaaagacgaattcacgataatccccgtacttgtcggggcgctaagtgagtccaaggaacaggagttcggaaagctgttcagtaagtacttagcagacccttctaatctcttcgttgtgtcctctgacttctgccactggggccagagattccgctatagttattacgacgagagtcaaggggagatctatagaagcattgaacacctggacaagatgggaatgtccatcattgaacagttggacccagtgagtttctccaactacctgaaaaagtatcataataccatttgtggacggcatccgatcggggtgcttcttaacgccatcaccgagctgcagaagaacggcatgaacatgagtttctcttttctgaactacgctcagtcgtcccagtgccgtaattggcaggatagtagcgtgtcatatgccgccggcgcgttaaccgttcactag

SEQ ID NO: 113997 - DNA, 903 bp, Artificial Sequence
  derived and/or modified sequence
atgcccctctggcgagctgataaatgccaggatgtccagtcagcctcgtggaggccaaggcgcgccgacgggccacagcttaacgcccagctagaaggctggctgagccaggttcaatcaaccaagcggccggctcgggccatcatcgcaccccatgccgggtacacctactgcggcagctgtgccgcacacgcatacaaacaggtcgacccaagtataactagacgcattttcatcctgggaccatcacaccatgttcccctgtcaagatgtgccctttcctcagtggatatctaccgaacaccactgtatgatctccggatcgatcagaagatctacggcgagctttggaagacgggtatgtttgaaagaatgtcacttcagaccgatgaggacgagcatagcatcgagatgcacctcccctatacagccaaagcaatggaatcccataaagatgaatttacgatcattcctgttctggtgggcgcgctgagtgagtctaaggaacaggaattcgggaagctgttctcgaaatacctggctgaccccagcaacctcttcgtggtgtcttccgatttttgtcactggggtcaaaggtttcggtattcctactacgatgaaagccaaggcgaaatataccgatcgattgagcacctggataagatgggtatgtctatcattgaacaactggatcccgtatccttctccaactacctaaaaaagtatcacaatactatctgtggccgccatcccattggggtcctccttaacgctatcactgaactgcaaaagaacggaatgaatatgtcattctctttcttaaactatgcgcagagcagccaatgtcgcaactggcaggattcttctgtgagctatgctgccggggccctgactgtgcactag

SEQ ID NO: 113998 - DNA, 894 bp, Artificial Sequence
  derived and/or modified sequence
atgtctaaccgagtcgtctgtagagaggcgtctcacgctgggagttggtacaccgcgagcggcccacagctgaacgcacagcttgaggggtggctgagtcaggtgcagtccacgaaacgccccgcgcgcgcgatcatcgccccacacgctggctacacttattgcgggtcatgtgcggcacatgcatacaaacaggtagatccgagcatcacaagacggattttcatcctcggcccttctcaccatgtcccactgtcacggtgtgccctctcctcagtcgacatctacaggaccccgctgtacgatctgcggattgatcagaagatatacggggagctgtggaagaccggcatgttcgagcgaatgtctcttcagaccgacgaggacgagcacagcatcgagatgcatctgccatacacagccaaagcaatggaatcccacaaggacgagtttaccattatccccgtgctggttggcgcactctcggaaagtaaggaacaggaattcggcaaactgttctccaaatatctcgcagatccttcaaacctgttcgtcgtgtcatccgatttttgccactggggccagagatttcgctatagctattacgacgagagccagggagaaatctaccggagcattgagcatctggataagatgggtatgagcatcattgagcagctcgaccccgtgtccttctcgaactacctcaagaaataccacaatactatctgtggccggcatcctatcggagtgttgctaaatgccattaccgagctccagaagaacggaatgaacatgtcgttttctttcttgaactatgcacagtcgtcccaatgtaggaactggcaggatagctccgtgagctatgccgcaggggcacttaccgtccactag

SEQ ID NO: 113999 - DNA, 894 bp, Artificial Sequence
  derived and/or modified sequence
atgagcaacagagtggtgtgccgggaggccagccatgctggctcctggtacacagccagcggcccccagctgaatgcccagctggagggctggctgagccaggtgcagagcaccaagaggcctgcccgggccatcatcgcccctcatgctggctacacctactgcggcagctgtgccgcccacgcctacaagcaggtggaccccagcatcacccggcgcatcttcatcctgggccccagccaccacgtgcccctgagccgctgtgccctgagctctgtggacatctaccgcacccccctgtatgacctgagaattgaccagaagatctacggggagctgtggaagacaggcatgtttgagaggatgagcctgcagacagatgaagatgagcacagcattgagatgcacctgccctacacagccaaggccatggagagccacaaggatgagttcaccatcatccctgtgctggtgggcgccctgtctgagagcaaggagcaggagtttgggaagctgttcagcaagtacctggccgaccccagcaacctgtttgtggtgtccagtgacttctgccactggggccagcgcttccgctacagctactatgatgagagccagggcgagatctaccgcagcattgagcacctggacaagatgggcatgagcatcatcgagcagctggaccctgtgtccttcagcaactacctgaagaagtaccacaacaccatctgtggccgccaccccatcggcgtgctgctgaatgccatcacagagctgcagaagaatggcatgaacatgtccttctccttcctgaactatgcccagagcagccagtgcaggaactggcaggacagctctgtgtcctatgctgctggggccctgactgtgcactag

SEQ ID NO: 114000 - DNA, 903 bp, Artificial Sequence
  derived and/or modified sequence
atgcccctgtggagggctgacaagtgccaggatgtgcagagcgcctcctggaggccccggcgggcagatggcccccagctgaatgcccagctggagggctggctgagccaggtgcagagcaccaagaggcctgcccgggccatcatcgcccctcatgctggctacacctactgcggcagctgtgccgcccacgcctacaagcaggtggaccccagcatcacccggcgcatcttcatcctgggccccagccaccacgtgcccctgagccgctgtgccctgagctctgtggacatctaccgcacccccctgtatgacctgagaattgaccagaagatctatggagagctgtggaagacaggcatgtttgagaggatgagcctgcagacagatgaagatgagcacagcattgagatgcacctgccctacacagccaaggccatggagagccacaaggatgagttcaccatcatccctgtgctggtgggcgccctgtctgagagcaaggagcaggagtttgggaagctgttcagcaagtacctggccgaccccagcaacctgtttgtggtgtccagtgacttctgccactggggccagcgcttccgctacagctactatgatgagagccagggcgagatctaccgcagcattgagcacctggacaagatgggcatgagcatcatcgagcagctggaccctgtgtccttcagcaactacctgaagaagtaccacaacaccatctgtggccgccaccccatcggcgtgctgctgaatgccatcacagagctgcagaagaatggcatgaacatgtccttctccttcctgaactatgcccagagcagccagtgcaggaactggcaggacagctctgtgtcctatgctgctggggccctgactgtgcactag

SEQ ID NO: 114001 - DNA, 1756 bp, Artificial Sequence
  derived and/or modified sequence
gggacgccgggggccggggccagggctttccgggcttcggtgaggccgccgtgggccccatcttccggcggtcgccggagtttgtggtgattgttgctgccgccgccaccgccccggctgccatctcctcctcctgggccgccgcctcctcctcttcctcctcctcctgggccgggctgatcccctccccgctgccgcctcctcctgggctgggcccgcggtgtctcgtcccctcgcggagccgctcctgccgccgccgccgccgcctcctcattcatcctcgtgcaccataggcggcacaggcaccaagatgtccaaccgagtggtctgccgagaagccagtcacgccgggagctggtacacagcctcaggaccgcagctgaatgcacagctagaaggttggctttcacaagtacagtctacaaaaagacctgctagagccattattgccccccatgcaggatatacgtactgtgggtcttgtgctgcccatgcttataaacaagtggatccgtctattacccggagaattttcatccttgggccttctcatcatgtgcccctctctcgatgtgcactttccagtgtggatatatataggacacctctgtatgaccttcgtattgaccaaaagatttacggagaactgtggaagacaggaatgtttgaacgcatgtctctgcagacagatgaagatgaacacagtattgaaatgcatttgccttatacagctaaagccatggaaagccataaggatgagtttaccattattcctgtactggttggagctctgagtgagtcaaaagaacaggaattcggaaaactcttcagtaaatatctagcggatcctagtaatctctttgtggtttcttctgatttctgccattggggtcaaaggttccgttacagttactatgatgaatcccagggggagatttatagatccattgaacatctagataaaatgggtatgagtattatagaacaattagaccctgtatcttttagcaattacttgaagaaataccataatactatatgtggaagacatcccattggggtgttattaaatgctatcacagagctccagaagaatggaatgaatatgagtttttcgtttttgaattatgcccagtcgagccagtgtagaaactggcaagacagttcagtgagttatgcagctggagcactcacggtccactgaagctctgaatcctcagggatgccacctgcacattctcatactctgtccggggtcccagcctagcctttaccacgatactggtcctggtttggggggattctgaaacctcaaactaatagaactttcttctctttttttctagtaggtgtagtccttccttaatttcaactcattaaaaaatgctttatagtttagggcagtggaaggaaggctggcatcaaaatattttgatcaaaaaagatgacaatgtaaaggctcagttgtggcagacagttttttgaaagtaacttgtaaagcatttaccatatcctaaatttgcactctttgcagacttgtgcacatatattccgctttcagaatagttttgcaaattgtacacaaacaaacaaaaaggtggaagctttttaataaagaaattgcatttataaatgatctgtattagaatataataaatctccagttatagtcaattactacccatgttgtacaacagataccttctattttagttgctaataaagggctacacaactcaaaatagtctgatttaaa

SEQ ID NO: 114002 - DNA, 1498 bp, Artificial Sequence
  derived and/or modified sequence
cctatctgtagatctgtttatcttcaatatagaaagagatttatttggaattgactcatgccattatggagggctgacaagtgccaagatgtgcagtcagcaagctggagacccaggagagctgacggaccgcagctgaatgcacagctagaaggttggctttcacaagtacagtctacaaaaagacctgctagagccattattgccccccatgcaggatatacgtactgtgggtcttgtgctgcccatgcttataaacaagtggatccgtctattacccggagaattttcatccttgggccttctcatcatgtgcccctctctcgatgtgcactttccagtgtggatatatataggacacctctgtatgaccttcgtattgaccaaaagatttacggagaactgtggaagacaggaatgtttgaacgcatgtctctgcagacagatgaagatgaacacagtattgaaatgcatttgccttatacagctaaagccatggaaagccataaggatgagtttaccattattcctgtactggttggagctctgagtgagtcaaaagaacaggaattcggaaaactcttcagtaaatatctagcggatcctagtaatctctttgtggtttcttctgatttctgccattggggtcaaaggttccgttacagttactatgatgaatcccagggggagatttatagatccattgaacatctagataaaatgggtatgagtattatagaacaattagaccctgtatcttttagcaattacttgaagaaataccataatactatatgtggaagacatcccattggggtgttattaaatgctatcacagagctccagaagaatggaatgaatatgagtttttcgtttttgaattatgcccagtcgagccagtgtagaaactggcaagacagttcagtgagttatgcagctggagcactcacggtccactgaagctctgaatcctcagggatgccacctgcacattctcatactctgtccggggtcccagcctagcctttaccacgatactggtcctggtttggggggattctgaaacctcaaactaatagaactttcttctctttttttctagtaggtgtagtccttccttaatttcaactcattaaaaaatgctttatagtttagggcagtggaaggaaggctggcatcaaaatattttgatcaaaaaagatgacaatgtaaaggctcagttgtggcagacagttttttgaaagtaacttgtaaagcatttaccatatcctaaatttgcactctttgcagacttgtgcacatatattccgctttcagaatagttttgcaaattgtacacaaacaaacaaaaaggtggaagctttttaataaagaaattgcatttataaatgatctgtattagaatataataaatctccagttatagtcaattactacccatgttgtacaacagataccttctattttagttgctaataaagggctacacaactcaaaa

SEQ ID NO: 114003 - DNA, 1482 bp, Artificial Sequence
  derived and/or modified sequence
atgctcagtgggcaggacccgttagagtggcgagcggcacaggcaccaagatgtccaaccgagtggtctgccgagaagccagtcacgccgggagctggtacacagcctcaggaccgcagctgaatgcacagctagaaggttggctttcacaagtacagtctacaaaaagacctgctagagccattattgccccccatgcaggatatacgtactgtgggtcttgtgctgcccatgcttataaacaagtggatccgtctattacccggagaattttcatccttgggccttctcatcatgtgcccctctctcgatgtgcactttccagtgtggatatatataggacacctctgtatgaccttcgtattgaccaaaagatttacggagaactgtggaagacaggaatgtttgaacgcatgtctctgcagacagatgaagatgaacacagtattgaaatgcatttgccttatacagctaaagccatggaaagccataaggatgagtttaccattattcctgtactggttggagctctgagtgagtcaaaagaacaggaattcggaaaactcttcagtaaatatctagcggatcctagtaatctctttgtggtttcttctgatttctgccattggggtcaaaggttccgttacagttactatgatgaatcccagggggagatttatagatccattgaacatctagataaaatgggtatgagtattatagaacaattagaccctgtatcttttagcaattacttgaagaaataccataatactatatgtggaagacatcccattggggtgttattaaatgctatcacagagctccagaagaatggaatgaatatgagtttttcgtttttgaattatgcccagtcgagccagtgtagaaactggcaagacagttcagtgagttatgcagctggagcactcacggtccactgaagctctgaatcctcagggatgccacctgcacattctcatactctgtccggggtcccagcctagcctttaccacgatactggtcctggtttggggggattctgaaacctcaaactaatagaactttcttctctttttttctagtaggtgtagtccttccttaatttcaactcattaaaaaatgctttatagtttagggcagtggaaggaaggctggcatcaaaatattttgatcaaaaaagatgacaatgtaaaggctcagttgtggcagacagttttttgaaagtaacttgtaaagcatttaccatatcctaaatttgcactctttgcagacttgtgcacatatattccgctttcagaatagttttgcaaattgtacacaaacaaacaaaaaggtggaagctttttaataaagaaattgcatttataaatgatctgtattagaatataataaatctccagttatagtcaattactacccatgttgtacaacagataccttctattttagttgctaataaagggctacacaactcaaaa

SEQ ID NO: 114004 - DNA, 894 bp, Artificial Sequence
  derived and/or modified sequence
atgagcaaccgggtggtgtgccgggaggccagccacgccggcagctggtacactgcaagcggccctcagcttaatgctcagttggagggttggctcagccaggttcagagcaccaagaggcctgctagggcaattattgcccctcacgcagggtatacgtattgcggcagctgcgctgcacacgcctataagcaagtggaccccagcataaccaggcgtatcttcattctcggccccagtcatcacgtgcctctcagcaggtgcgccctttcctcggtcgatatttatcgaacccctctgtatgatctgcgcatagaccagaagatctatggagagctctggaaaactggcatgttcgaaaggatgtcgctgcagactgatgaggacgagcattcaattgaaatgcatctgccatacaccgccaaagccatggaaagccacaaggatgaattcactatcatcccggttcttgtcggtgcgttgtccgaatctaaggagcaggagttcggaaagctgttttcaaagtacctggcagacccatctaacttgttcgtcgtgtcctctgacttctgccactggggccagcgcttccgctatagctactacgacgagtcccagggagaaatctaccgctctatagagcatctggataagatggggatgagcattatagaacaactggatcccgtgtctttttctaattatctcaagaagtaccacaatactatctgtggccgccatcccattggagtcctgctcaacgcaattacggagctgcagaagaatggtatgaatatgtccttttcttttctgaattacgcccagagctcccagtgtcgtaactggcaggattccagcgtgtcatatgccgcaggagctctcactgtgcactag

SEQ ID NO: 114005 - DNA, 903 bp, Artificial Sequence
  derived and/or modified sequence
atgcccctgtggcgggccgacaagtgccaggacgtgcagagcgcctcctggcgacccaggagggccgacggcccccagctgaatgcccagttagaagggtggctcagccaggtgcagagcaccaagcgccccgcccgggcaattattgcacctcacgccggctacacctactgcggatcttgtgccgcacacgcttacaaacaagtggatccatctatcactcggaggatatttattcttggccccagtcatcacgtgcccctgagccgctgtgcgctttcatccgtggacatttataggacccccttatatgacctccgcatcgaccagaaaatttatggagagttgtggaagacagggatgttcgaaaggatgagcctccagaccgacgaggacgaacattccatcgaaatgcatctgccatataccgccaaggctatggagtcccacaaggacgagttcacaatcataccagttctcgtgggggccctctccgaatctaaggagcaagaatttggcaaattgttttcaaagtatctcgccgatccttctaatttgtttgttgtatcttcagacttctgtcactggggccagcgatttcggtattcctactatgatgagagtcaaggagaaatttatcggagcatagagcatcttgataaaatgggaatgtcaattatagagcagctcgacccggtgtctttttccaactatttgaagaaatatcataacacaatttgtgggcggcatcctataggcgtactcctgaacgccattactgaactgcaaaaaaatggcatgaatatgagtttttccttcctcaattatgcccagtcaagtcaatgccggaactggcaggacagcagtgtgtcttacgctgccggcgctcttactgtgcattag

SEQ ID NO: 114006 - DNA, 894 bp, Artificial Sequence
  derived and/or modified sequence
atgagcaaccgggtggtgtgccgggaggccagccacgccggcagctggtacaccgcatccggaccccaactcaatgctcagctggaaggttggctctcccaggtgcagtctacaaaacgccccgcaagggcaattatagccccgcatgccggctatacgtactgcggctcttgtgccgctcatgcatataaacaggtcgaccccagtataactagacgcatctttattctaggaccctcccaccacgtccccctttctagatgtgcattaagctccgtcgacatctatcgaaccccactttatgatctgcgtatcgaccagaaaatttacggagaactgtggaagacaggcatgttcgaaaggatgtccctgcaaaccgatgaagatgagcacagtatcgagatgcacttaccatacactgctaaagctatggagtctcacaaagacgaattcaccattatcccagttctggtgggcgcccttagcgagtctaaggaacaggaattcggtaaacttttttccaaatacctcgccgatcctagcaacctgttcgtcgttagctccgatttttgccactggggacagcggtttcgctatagctattatgatgaatcccagggggagatctatcgcagcatcgaacacttggacaagatgggtatgtctatcatcgagcagctggatccagtaagtttttcgaactatcttaaaaaataccacaataccatttgcgggaggcacccaattggcgttctgctaaacgccatcaccgaactgcagaaaaacggcatgaacatgtcgttttcgtttctgaattatgctcaaagcagccagtgtcggaactggcaggattcttctgtcagctacgccgctggcgctttgacagtccattag

SEQ ID NO: 114007 - DNA, 894 bp, Artificial Sequence
  derived and/or modified sequence
atgtctaaccgggtggtttgtagggaagccagccatgccggatcatggtacactgcctctggcccacagttaaatgctcaactggaagggtggctgtctcaggtacagtctacaaagcgaccagcacgcgctattattgcccctcatgccggatacacatattgcggcagctgtgcagctcacgcatacaagcaggtggacccgtcaattacacggaggatcttcatcctgggtccgtctcatcacgtgccgctgagccgctgcgccttgtcgtcggtggacatctacagaaccccactttatgacctgcggatcgaccaaaagatctatggggaactttggaagaccggcatgtttgaacgcatgtcccttcagaccgatgaagatgaacacagcattgaaatgcacctgccatacaccgctaaggctatggagtctcataaggatgaattcaccatcattcccgtcctggtgggagcactctccgagtcgaaagaacaggagtttggcaagctcttttctaagtatctcgccgacccaagtaatttgttcgtggtgtcctctgacttctgtcattgggggcagagatttcgctacagctactatgatgagagccagggagaaatttaccggtctatcgagcatctcgataagatggggatgagcatcatcgagcagctggacccggttagtttcagtaactacctgaaaaagtatcataacaccatttgcggacgccaccccatcggtgtgcttcttaacgccattactgaactccaaaagaacggtatgaacatgtcattcagttttctgaattatgcccagagctctcagtgtaggaactggcaggactcatctgtgtcttacgctgccggtgcgttgacagtccattag

SEQ ID NO: 114008 - DNA, 903 bp, Artificial Sequence
  derived and/or modified sequence
atgcctctttggcgagccgataaatgtcaggacgtacagtctgcttcctggaggcctagaagggctgacggaccacagctgaacgcacagttggaggggtggcttagccaggtccaaagcaccaagcgccctgctagggcaattatagctccacacgctgggtacacatattgcgggtcctgcgcagcccacgcctacaaacaggttgacccatccatcacccggcgaattttcattctaggcccaagccaccatgtgccattgagtagatgcgctctgtcttcagttgatatctacagaactcctttatacgacttacggatcgaccagaagatttacggagagctttggaaaactgggatgtttgagagaatgtcgttacagacggacgaagatgagcacagtatcgaaatgcacttgccgtacacagcgaaggccatggaatcacataaagatgaattcaccataatccccgtgcttgtgggcgcactcagtgagagtaaagaacaggagttcggaaaactcttttcgaagtacctcgccgatcctagcaacctcttcgtagtaagctcagatttctgccattggggccagagatttagatattcctactacgatgaaagtcagggtgagatctatcggtctatcgaacacctggataagatgggcatgtcaatcatagagcagttggaccctgtttctttctcaaactacctcaagaagtaccacaacactatctgcggccgtcatcccataggcgttctgctgaacgctattaccgaattgcagaagaacggtatgaatatgtctttttcctttctcaattatgcccagtccagccagtgtaggaattggcaggattcttccgtttcttacgctgctggggcactaaccgtacattag

SEQ ID NO: 114009 - DNA, 894 bp, Artificial Sequence
  derived and/or modified sequence
atgtccaatcgggtggtctgtcgcgaagctagccacgccggatcctggtatacagccagcggccctcagctgaatgcacagctagaaggctggctctcccaagtccagtcaactaaacgtccagctcgtgctatcatagctccccacgctggttatacttattgcggctcatgtgcagctcacgcctataagcaggtcgatccatcgattactcgtcggatctttattctgggtccctctcatcacgtgcccctctcccggtgcgccttgtcaagcgttgatatttaccgcacccccctgtatgacctgcgaatcgaccagaaaatttacggcgaactgtggaagaccggtatgtttgaacgcatgtcactccagacagatgaagatgaacactctatagaaatgcatctgccgtacacagcaaaagctatggagagccataaagatgagtttacaatcatccctgtgctggtgggagctcttagcgaatcaaaagaacaagaattcggcaaattattctccaaatacctggcagatcccagcaacttgttcgttgtgtcctctgacttctgtcattggggacagcggttcagatattcctattacgacgaatcccaaggggaaatctaccgcagcatcgagcatctcgataagatggggatgagcattattgagcagctcgacccagtctcgttctccaattacctgaagaagtatcacaacaccatctgcggccgtcatcctattggtgttctacttaacgcaataactgagcttcagaaaaacggaatgaatatgagcttttcgtttctaaattatgcacagagttctcaatgtcggaactggcaggatagttcagtgtcttatgccgctggggcactcacagtgcactag

SEQ ID NO: 114010 - DNA, 894 bp, Artificial Sequence
  derived and/or modified sequence
atgagcaacagagtggtgtgcagagaggccagccacgccggcagctggtacaccgccagcggcccccagctgaacgcccagctggagggctggctgagccaggtgcagagcaccaagagacccgccagagccatcatcgccccccacgccggctacacctactgcggcagctgcgccgcccacgcctacaagcaggtggaccccagcatcaccagaagaatcttcatcctgggccccagccaccacgtgcccctgagcagatgcgccctgagcagcgtggacatctacagaacccccctgtacgacctgagaatcgaccagaagatctacggcgagctgtggaagaccggcatgttcgagagaatgagcctgcagaccgacgaggacgagcacagcatcgagatgcacctgccctacaccgccaaggccatggagagccacaaggacgagttcaccatcatccccgtgctggtgggcgccctgagcgagagcaaggagcaggagttcggcaagctgttcagcaagtacctggccgaccccagcaacctgttcgtggtgagcagcgacttctgccactggggccagagattcagatacagctactacgacgagagccagggcgagatctacagaagcatcgagcacctggacaagatgggcatgagcatcatcgagcagctggaccccgtgagcttcagcaactacctgaagaagtaccacaacaccatctgcggcagacaccccatcggcgtgctgctgaacgccatcaccgagctgcagaagaacggcatgaacatgagcttcagcttcctgaactacgcccagagcagccagtgcagaaactggcaggacagcagcgtgagctacgccgccggcgccctgaccgtgcactag

SEQ ID NO: 114011 - DNA, 903 bp, Artificial Sequence
  derived and/or modified sequence
atgcccctgtggagagccgacaagtgccaggacgtgcagagcgccagctggagacccagaagagccgacggcccccagctgaacgcccagctggagggctggctgagccaggtgcagagcaccaagagacccgccagagccatcatcgccccccacgccggctacacctactgcggcagctgcgccgcccacgcctacaagcaggtggaccccagcatcaccagaagaatcttcatcctgggccccagccaccacgtgcccctgagcagatgcgccctgagcagcgtggacatctacagaacccccctgtacgacctgagaatcgaccagaagatctacggcgagctgtggaagaccggcatgttcgagagaatgagcctgcagaccgacgaggacgagcacagcatcgagatgcacctgccctacaccgccaaggccatggagagccacaaggacgagttcaccatcatccccgtgctggtgggcgccctgagcgagagcaaggagcaggagttcggcaagctgttcagcaagtacctggccgaccccagcaacctgttcgtggtgagcagcgacttctgccactggggccagagattcagatacagctactacgacgagagccagggcgagatctacagaagcatcgagcacctggacaagatgggcatgagcatcatcgagcagctggaccccgtgagcttcagcaactacctgaagaagtaccacaacaccatctgcggcagacaccccatcggcgtgctgctgaacgccatcaccgagctgcagaagaacggcatgaacatgagcttcagcttcctgaactacgcccagagcagccagtgcagaaactggcaggacagcagcgtgagctacgccgccggcgccctgaccgtgcactag

SEQ ID NO: 114012 - protein, 126 aa, Artificial Sequence
  derived and/or modified sequence
MASASTQPAALSAEQAKVVLAEVIQAFSAPENAVRMDEARDNACNDMGKMLQFVLPVATQIQQEVIKAYGFSCDGEGVLKFARLVKSYEAQDPEIASLSGKLKALFLPPMTLPPHGPAAGGSVAAS

SEQ ID NO: 114013 - DNA, 560 bp, Artificial Sequence
  derived and/or modified sequence
ctttccgctcccaggggcgttgggaacggttgtaggacgtggctctttattcgtgagttttccatttacctccgctgaacctagagcttcagacgccctatggcgtccgcctcgacccaaccggcggccttgagcgctgagcaagcaaaggtggtcctcgcggaggtgatccaggcgttctccgccccggagaatgcagtgcgcatggacgaggctcgggataacgcctgcaacgacatgggtaagatgctgcaattcgtgctgcccgtggccacgcagatccagcaggaggttatcaaagcctatggcttcagctgcgacggggaaggtgtccttaagtttgctcgcttggtcaagtcctacgaagcccaggatcctgagatcgccagcctgtcaggcaagctgaaggcgctgtttctgccgcccatgaccctgccaccccatgggcctgctgctggtggcagcgtggccgcctcctgagagttggccctcccttgtgccactgccaggggaggaaaggccttgatgttccagacaataataaatgcgcctgtgactta

SEQ ID NO: 114014 - DNA, 381 bp, Artificial Sequence
  derived and/or modified sequence
atggcatcagccagtacgcagcccgccgccttgtctgcagaacaagcaaaggttgtgctcgccgaagtgattcaggcatttagcgcccctgaaaatgcagtccggatggacgaggcgcgggacaatgcttgcaacgatatggggaagatgctgcagtttgtattaccagtggcaactcagatccagcaggaggtgatcaaagcttacggtttctcttgcgacggagaaggggttctcaagtttgccagactggtgaaaagttatgaagctcaagatccggagatcgccagcctgtctggcaagttaaaggctttatttctccccccaatgacactgcctccgcatggccctgccgcaggaggctctgtggccgcctcctag

SEQ ID NO: 114015 - DNA, 381 bp, Artificial Sequence
  derived and/or modified sequence
atggccagcgccagcacccagcctgctgccctgtctgctgagcaggccaaggtggtgctggccgaggtgatccaggccttcagcgccccagaaaatgctgtgaggatggatgaggcccgggacaatgcctgcaatgacatgggcaagatgctgcagtttgtgctgcctgtggccacccagatccagcaggaggtgatcaaggcctacggcttcagctgtgatggagaaggagtgctgaagtttgcccggctggtgaagagctatgaggcccaggaccctgagatcgccagcctgagcggcaagctgaaggccctcttcctgccccccatgaccctgccccctcatggccctgctgctgggggctctgtggccgccagctag

SEQ ID NO: 114016 - DNA, 381 bp, Artificial Sequence
  derived and/or modified sequence
atggccagcgccagcacccagcccgccgccctgagcgccgagcaggccaaggtcgtactcgccgaagtgatacaagcctttagtgcacccgaaaacgccgtccgcatggatgaagctcgcgacaacgcatgtaacgatatgggtaagatgctgcaattcgtgctcccagtggccactcagatccagcaggaggtgatcaaggcatacggcttctcctgcgacggggagggggtgctcaagtttgccagattggtgaagagctacgaagcccaagaccccgaaatcgcaagcttgtctggaaaactaaaagctctcttcctgccaccgatgaccctccctccacacggacctgctgcaggtggatcggtcgccgcctcctag

SEQ ID NO: 114017 - DNA, 381 bp, Artificial Sequence
  derived and/or modified sequence
atggcctcagcctccactcaacccgcagcgctctctgctgaacaagctaaggtggtactggccgaggtgatccaggctttcagtgcgcctgaaaacgcagtgagaatggacgaagcacgggacaacgcttgcaacgatatgggcaaaatgctgcaatttgtgttgcccgtggcaactcagatccagcaggaggttatcaaagcgtatgggttctcctgcgacggggagggagttctaaagtttgcccgactcgtcaaaagctatgaagcccaagaccctgagatcgctagtttgagtggtaagctgaaagccttattcctcccacccatgaccctgccaccgcatggtcccgcagccggagggtccgtggcagcttcatag

SEQ ID NO: 114018 - DNA, 381 bp, Artificial Sequence
  derived and/or modified sequence
atggccagcgccagcacccagcccgccgccctgagcgccgagcaggccaaggtggtgctggccgaggtgatccaggccttcagcgcccccgagaacgccgtgagaatggacgaggccagagacaacgcctgcaacgacatgggcaagatgctgcagttcgtgctgcccgtggccacccagatccagcaggaggtgatcaaggcctacggcttcagctgcgacggcgagggcgtgctgaagttcgccagactggtgaagagctacgaggcccaggaccccgagatcgccagcctgagcggcaagctgaaggccctgttcctgccccccatgaccctgcccccccacggccccgccgccggcggcagcgtggccgccagctag

SEQ ID NO: 114019 - protein, 292 aa, Artificial Sequence
  derived and/or modified sequence
MAGKKNVLSSLAVYAEDSEPESDGEAGIEAVGSAAEEKGGLVSDAYGEDDFSRLGGDEDGYEEEEDENSRQSDNTEAEKRDPQELVASFSERVRNMSPDEIKIPPEPPGRCSNHLQDKIQKLYERKIKEGMDMNYIIQRKKEFRNPSIYEKLIQFCAIDELGTNYPKDMFDPHGWSEDSYYEALAKAQKIEMDKLEKAKKERTKIEFVTGTKKGTTTNATSTTTTTASTAVADAQKRKSKWDSAIPVTTIAQPTILTTTATLPAVVTVTTSASGSKTTVISAVGTIVKKAKQ

SEQ ID NO: 114020 - DNA, 879 bp, Artificial Sequence
  derived and/or modified sequence
atggctgggaagaaaaacgtgctgagctctctagccgtatacgccgaggattctgagccagagtccgatggggaagctgggatcgaagcagtgggcagcgcagccgaagagaagggaggcctagtgtctgacgcttacggcgaggatgacttcagtagactgggcggcgatgaagatggttatgaggaggaggaggacgagaactcgcgacagtctgataatacagaggcggaaaaaagggacccgcaggaactggtggcaagcttctcagagcgggtgcgtaatatgtccccagacgagattaaaatccccccagaacctccaggcaggtgctccaaccacctccaggataagatccagaaactgtacgagcggaagattaaggaagggatggatatgaactacataatacaaagaaagaaagagttcagaaatccctcaatctacgagaagctcattcagttctgtgcaattgacgagttaggaacaaactatcccaaggacatgttcgatccgcacggatggtccgaagatagctactatgaggccctcgctaaggctcagaaaattgaaatggacaagcttgaaaaagcaaagaaggagcggacgaagatcgagttcgtgaccggcacaaaaaaaggaacaacgacgaacgccacctccaccacaacgactactgcttccactgccgtggccgatgcacagaagcgcaagagtaagtgggacagcgcgatcccagtgacaacaatcgctcagcctacaatcctgaccactaccgccactctccctgccgtggtgacggtaacaacttccgcctccggtagcaagactaccgtcattagcgccgttggaacaattgtgaagaaggcaaagcagtag

SEQ ID NO: 114021 - DNA, 879 bp, Artificial Sequence
  derived and/or modified sequence
atggccggcaagaagaatgtgctgagcagcctggccgtgtatgcagaggacagcgagcctgagagtgatggagaggccggcatcgaggccgtgggcagcgctgctgaggagaagggcggcctggtgtctgatgcctacggggaggatgacttcagccggctgggcggagatgaagatggctatgaggaggaggaggatgagaacagccggcagagcgacaacacagaagctgagaagagggacccccaggagctggtggccagcttcagcgagcgggtgaggaacatgagcccagatgagatcaagatccccccagagcccccaggccgctgcagcaaccacctgcaggacaagatccagaagctgtatgaaaggaagatcaaggagggcatggacatgaactacatcatccagaggaagaaggagttcaggaaccccagcatctatgagaagctgatccagttctgtgccattgatgagctgggcaccaactaccccaaggacatgtttgacccccacggctggagcgaagattcctactatgaggccctggccaaggcccagaagattgagatggacaagctggagaaggccaagaaggagaggaccaagattgaatttgtgacaggcaccaagaagggcaccaccaccaatgccaccagcaccaccaccaccacagccagcacagctgtggctgatgcccagaagaggaagagcaagtgggacagcgccatccctgtgaccaccatcgcccagcccaccatcctgaccaccacagccaccctgcctgctgtggtgacagtgaccaccagcgccagcggcagcaagaccaccgtcatctctgctgtgggcaccatcgtgaagaaggccaagcagtag

SEQ ID NO: 114022 - DNA, 879 bp, Artificial Sequence
  derived and/or modified sequence
atggccggcaagaagaacgtgctgagcagcctggccgtgtacgccgaagatagtgagcccgagagtgacggcgaagccggcattgaggccgtgggctccgccgcagaggagaaaggcggcttagtatctgacgcctatggtgaggacgatttctctcgcctgggcggcgacgaggatggctacgaggaggaagaggatgagaattcgagacagtccgataacacagaggcagagaagcgtgatcctcaagagttggtggctagtttttctgaaagagtacgtaacatgtcccccgacgagattaaaatcccccccgagccacctggcaggtgctccaatcatctgcaggataagattcaaaaactttacgaacgcaagattaaggaaggcatggacatgaactacattatccaacggaagaaggagttcaggaacccatctatctacgagaaattaatacagttttgtgctatagacgagttgggcacaaattaccctaaagacatgtttgatccacacggttggagcgaagattcctactatgaggccctcgccaaggcccaaaaaatagagatggacaaattggagaaggccaaaaaggagagaacaaagatcgaattcgtgaccggcacaaagaagggaactaccaccaacgccaccagcaccacaaccactacagcttctactgcagtcgccgacgcacaaaagcgaaaatctaagtgggatagcgccattccagtgactaccattgcccagccgaccattctgactactacagccacccttccagccgtcgtcacggttacgacgagcgcttcgggctctaaaacaaccgtgattagtgctgtgggcacaattgtcaaaaaagctaagcagtag

SEQ ID NO: 114023 - DNA, 879 bp, Artificial Sequence
  derived and/or modified sequence
atggccggaaaaaagaacgtgctgtcttctttggccgtatacgctgaggactctgaacccgaaagtgatggtgaggccggtatagaagctgtgggctcggctgcagaggagaaggggggtctggtgagtgatgcctatggcgaagatgacttcagccgcctggggggagatgaggacggctacgaagaagaagaagacgagaattcgcgccagtcggacaacactgaggcagagaagcgtgatccacaggaactggtggcctcattcagtgagcgagttcgaaacatgtcacctgatgaaataaaaatccctccagagcctccgggtcgctgttctaaccatctgcaagacaagatacagaagctgtatgagagaaagatcaaagaagggatggatatgaattacattattcagaggaaaaaagagtttaggaatccatctatttatgagaagctcatacagttttgcgcaattgatgaactggggactaactaccctaaagacatgtttgacccccatgggtggtcagaagattcatattatgaggcattggccaaggcacagaagattgaaatggataaattggagaaggcaaagaaggagagaacgaaaatagagttcgtgactgggaccaagaagggaacaactaccaacgcgacctcaactaccaccactacagcctcaacggctgtcgcggacgcgcaaaagaggaagtcaaagtgggactccgccatccctgtaacgaccatcgcccagccgaccattcttaccaccactgctacactgcctgcagtcgtgaccgtgacaacctccgctagcgggagcaagacaactgtgatcagcgcagtgggtaccatcgttaagaaggccaaacagtag

SEQ ID NO: 114024 - DNA, 1125 bp, Artificial Sequence
  derived and/or modified sequence
gtgggaataagatggcggggaagaagaatgttctgtcgtctctcgcagtttacgcggaagattcagagcccgagtctgatggcgaggctggaatcgaggcggtgggcagcgcggctgaggagaaaggcggattggtatctgatgcctatggggaggatgacttttctcgtctagggggtgatgaagatggttatgaagaagaagaagatgagaacagtagacagtcggataatacagaagcagaaaagcgagacccccaggaactcgtggcctccttttctgaaagagttcggaacatgtcgcctgatgaaatcaagatcccgccagaaccccctggcagatgttcaaatcacttgcaagacaagatccagaagctttatgaacgaaagataaaggagggaatggatatgaactacattatccaaaggaagaaagaatttcggaaccctagcatctacgagaagctgatccagttctgtgccattgacgagcttggcaccaactacccaaaggatatgtttgatccccatggctggtctgaggactcctactatgaggcattagccaaggcccagaaaattgagatggacaaattggaaaaggccaaaaaggagcgaacaaaaattgagtttgtgacgggcaccaaaaaaggcaccacgaccaacgccacgtccaccaccactaccactgccagcacagctgttgcagatgctcagaagagaaagagcaagtgggattcggctatcccagtgacaacgatagcccagcccaccatcctcaccaccacagccaccctgccagctgttgtcacggtcaccaccagcgccagcggctccaagaccaccgtcatctctgctgtgggcaccattgtgaagaaggccaagcagtgacctgaggggccaccctaggacttgaaaggaccgtgcagcccagtgaccactgcccagtgggaggcgccactttgtatatttcaggactgggacctactccccagatgccacctgagaggagcttctgtttggcattccagatggaaggacaggcagcacgggagccaggcgctgtggacagggtctgtccacgcaccacctggggtctgccgcctattaaaagtgccgtattctt

SEQ ID NO: 114025 - DNA, 879 bp, Artificial Sequence
  derived and/or modified sequence
atggccggcaagaagaacgtgctgagcagcctggccgtgtacgccgaggacagcgagcccgagagcgacggcgaggccggcatcgaggccgtgggcagcgccgccgaggagaagggcggcctggtgagcgacgcctacggcgaggacgacttcagcagactgggcggcgacgaggacggctacgaggaggaggaggacgagaacagcagacagagcgacaacaccgaggccgagaagagagacccccaggagctggtggccagcttcagcgagagagtgagaaacatgagccccgacgagatcaagatcccccccgagccccccggcagatgcagcaaccacctgcaggacaagatccagaagctgtacgagagaaagatcaaggagggcatggacatgaactacatcatccagagaaagaaggagttcagaaaccccagcatctacgagaagctgatccagttctgcgccatcgacgagctgggcaccaactaccccaaggacatgttcgacccccacggctggagcgaggacagctactacgaggccctggccaaggcccagaagatcgagatggacaagctggagaaggccaagaaggagagaaccaagatcgagttcgtgaccggcaccaagaagggcaccaccaccaacgccaccagcaccaccaccaccaccgccagcaccgccgtggccgacgcccagaagagaaagagcaagtgggacagcgccatccccgtgaccaccatcgcccagcccaccatcctgaccaccaccgccaccctgcccgccgtggtgaccgtgaccaccagcgccagcggcagcaagaccaccgtgatcagcgccgtgggcaccatcgtgaagaaggccaagcagtag

SEQ ID NO: 114026 - protein, 299 aa, Artificial Sequence
  derived and/or modified sequence
MEHFDASLSTYFKALLGPRDTRVKGWFLLDNYIPTFICSVIYLLIVWLGPKYMRNKQPFSCRGILVVYNLGLTLLSLYMFCELVTGVWEGKYNFFCQGTRTAGESDMKIIRVLWWYYFSKLIEFMDTFFFILRKNNHQITVLHVYHHASMLNIWWFVMNWVPCGHSYFGATLNSFIHVLMYSYYGLSSVPSMRPYLWWKKYITQGQLLQFVLTIIQTSCGVIWPCTFPLGWLYFQIGYMISLIALFTNFYIQTYNKKGASRRKDHLKDHQNGSMAAVNGHTNSFSPLENNVKPRKLRKD

SEQ ID NO: 114027 - protein, 289 aa, Artificial Sequence
  derived and/or modified sequence
MEHFDASLSTYFKALLGPRDTRVKGWFLLDNYIPTFICSVIYLLIVWLGPKYMRNKQPFSCRGILVVYKFCELVTGVWEGKYNFFCQGTRTAGESDMKIIRVLWWYYFSKLIEFMDTFFFILRKNNHQITVLHVYHHASMLNIWWFVMNWVPCGHSYFGATLNSFIHVLMYSYYGLSSVPSMRPYLWWKKYITQGQLLQFVLTIIQTSCGVIWPCTFPLGWLYFQIGYMISLIALFTNFYIQTYNKKGASRRKDHLKDHQNGSMAAVNGHTNSFSPLENNVKPRKLRKD

SEQ ID NO: 114028 - DNA, 900 bp, Artificial Sequence
  derived and/or modified sequence
atggaacacttcgatgctagcctgtccacctattttaaagctcttttggggccccgcgatacccgggtaaaaggttggtttctgttggacaactatatacccaccttcatttgctctgtcatttatctcttaatcgtgtggcttggaccaaaatacatgcgcaataagcagccattttcttgccggggcattctggttgtttacaatctcggcctcactctgctgtccctttacatgttttgtgagttagtgaccggggtttgggaaggaaagtacaactttttttgccaagggacccgaacagccggggagagcgatatgaaaattatccgggtactctggtggtattacttttctaagctcatcgagttcatggacaccttctttttcatcctccgaaagaataaccaccagattaccgtgttgcatgtctaccaccacgcatctatgttaaacatttggtggttcgtaatgaattgggtgccatgtggccactcctactttggagctaccctgaattcatttatccacgttctgatgtactcatattatggtctgagctccgtcccatcaatgcgaccttatctttggtggaagaagtacataactcagggccagttgctccagttcgtgctaaccatcatccagacatcttgcggggtgatttggccgtgcaccttcccgctcggatggctgtatttccagattggctatatgatttcactcatcgcgctgttcactaatttttacattcagacgtataataagaaaggtgcgtcccgccgcaaagatcatctcaaggaccatcagaacggttccatggccgctgtaaacgggcacaccaactccttctcccctttggagaataacgttaagcctcggaaactccggaaggactag

SEQ ID NO: 114029 - DNA, 870 bp, Artificial Sequence
  derived and/or modified sequence
atggagcattttgatgcctctctcagcacctactttaaagcgctgctaggacccagggataccagggtgaaggggtggtttctgctcgataattatataccaacatttatatgctccgttatataccttctgatcgtgtggctgggaccgaagtacatgagaaataaacagccattttcgtgtaggggcatattagtggtctacaaattttgtgagcttgtgaccggcgtgtgggaggggaaatataattttttttgccaagggactcgcaccgctggggaaagcgatatgaaaatcattagagtactgtggtggtactatttctcgaaattgatagaatttatggacacgttcttcttcattttgcggaaaaataaccatcagatcactgtcttgcacgtataccaccatgcctctatgctgaatatctggtggttcgtcatgaattgggttccttgcggccattcctacttcggagccaccctgaacagcttcatccatgttctcatgtactcatattatggactcagcagcgtaccatcaatgcgtccctatctttggtggaagaaatatatcacccaaggacagctcttacagttcgtgctgactatcatacagacaagctgcggcgttatctggccctgtacctttcctctcgggtggctgtattttcagattggatacatgataagtttgattgcgctctttaccaacttctacatccaaacctacaacaaaaagggcgcgtcacgccgaaaggaccaccttaaggatcatcagaacgggtccatggctgctgtgaatggccacactaactccttttcacctctggagaataacgtgaaacccagaaagctgcgcaaagattag

SEQ ID NO: 114030 - DNA, 900 bp, Artificial Sequence
  derived and/or modified sequence
atggagcacttcgacgcaagcctatctacatatttcaaagcgctgctcggaccaagagacacccgcgttaaggggtggtttctgctcgataactacatcccgactttcatttgttccgtcatatacctcttaattgtctggctgggcccaaagtatatgagaaataagcaacccttctcatgccggggaatcctggtcgtgtataacctcggtctcaccctcctttccctttatatgttttgcgaattggtgacaggtgtatgggaaggtaagtataactttttctgtcagggtactcgaactgccggagagagtgacatgaagatcattcgtgtgttatggtggtattacttctccaaattaatagagttcatggatacatttttcttcatattacggaaaaataatcatcagatcacggtgcttcacgtttatcatcacgcctccatgttgaacatatggtggttcgtgatgaactgggtgccatgcggccacagctatttcggtgcaacacttaacagttttattcatgttctcatgtattcctactatggactcagcagtgtcccctcaatgcgcccgtacctttggtggaagaaatacatcacacaggggcagctcctccagtttgttcttaccattattcagacatcatgtggtgtgatatggccttgtacgttccccttgggctggctgtactttcagatcggatatatgatttctttgattgccctattcacaaatttctatatccaaacatataacaaaaagggggcctccaggaggaaggaccaccttaaagatcaccaaaatggatcaatggcagcggtgaatgggcatacaaacagcttcagtccactggagaacaacgtgaaacctcgaaagctgcggaaagactag

SEQ ID NO: 114031 - DNA, 900 bp, Artificial Sequence
  derived and/or modified sequence
atggagcactttgatgccagcctgagcacctacttcaaggccctgctgggcccccgggacaccagggtgaagggctggttcctgctggacaactacatccccaccttcatctgcagcgtcatctacctgctgattgtgtggctgggccccaagtacatgaggaacaagcagcccttcagctgccggggcatcctggtggtgtacaacctgggcctgaccctgctgagcctgtacatgttctgtgagctggtgactggagtgtgggagggcaagtacaacttcttctgccagggcaccaggacagctggggagagtgacatgaagatcatccgggtgctgtggtggtactacttcagcaagctgattgagttcatggacaccttcttcttcatcctgaggaagaacaaccaccagatcaccgtgctgcacgtgtaccaccacgcctccatgctgaacatctggtggtttgtgatgaactgggtgccctgtggccacagctactttggagccaccctgaacagcttcatccacgtgctgatgtacagctactacggcctgagctctgtgcccagcatgaggccctacctgtggtggaagaagtacatcacccagggccagctgctgcagtttgtgctgaccatcatccagaccagctgtggggtcatctggccctgcaccttccccctgggctggctgtacttccagatcggctacatgatcagcctgattgccctcttcaccaacttctacatccagacctacaacaagaagggggccagcaggaggaaggaccacctgaaggaccaccagaatggctccatggctgctgtgaatggccacaccaacagcttcagccccctggagaacaacgtgaagcccaggaagctgaggaaggactag

SEQ ID NO: 114032 - DNA, 870 bp, Artificial Sequence
  derived and/or modified sequence
atggagcactttgatgccagcctgagcacctacttcaaggccctgctgggcccccgggacaccagggtgaagggctggttcctgctggacaactacatccccaccttcatctgcagcgtcatctacctgctgattgtgtggctgggccccaagtacatgaggaacaagcagcccttcagctgccggggcatcctggtggtgtacaagttctgtgagctggtgactggagtgtgggagggcaagtacaacttcttctgccagggcaccaggacagctggggagagtgacatgaagatcatccgggtgctgtggtggtactacttcagcaagctgattgagttcatggacaccttcttcttcatcctgaggaagaacaaccaccagatcaccgtgctgcacgtgtaccaccacgcctccatgctgaacatctggtggtttgtgatgaactgggtgccctgtggccacagctactttggagccaccctgaacagcttcatccacgtgctgatgtacagctactacggcctgagctctgtgcccagcatgaggccctacctgtggtggaagaagtacatcacccagggccagctgctgcagtttgtgctgaccatcatccagaccagctgtggggtcatctggccctgcaccttccccctgggctggctgtacttccagatcggctacatgatcagcctgattgccctcttcaccaacttctacatccagacctacaacaagaagggggccagcaggaggaaggaccacctgaaggaccaccagaatggctccatggctgctgtgaatggccacaccaacagcttcagccccctggagaacaacgtgaagcccaggaagctgaggaaggactag

SEQ ID NO: 114033 - DNA, 900 bp, Artificial Sequence
  derived and/or modified sequence
atggagcacttcgacgccagcctgagcacctacttcaaggccctgcttggcccccgcgatacccgagttaaggggtggttcctactggataattacatacctacatttatttgcagcgtcatctatttgctgatagtctggctgggtccaaaatacatgcgaaataaacagccattcagctgtaggggcatcctggtagtttataacctgggcttgacattgctgtcactgtacatgttctgcgaacttgtgactggtgtgtgggaaggaaagtataacttcttttgccaaggtactaggacagcaggcgaatctgacatgaagatcatcagggtactctggtggtactacttcagcaaactgattgaattcatggataccttctttttcattttgcgcaagaacaaccaccagattactgtgctgcacgtgtatcatcacgcttcgatgctgaatatttggtggtttgtgatgaactgggtcccgtgcggacactcatacttcggcgcaaccttaaactccttcattcatgtgctgatgtatagctactacgggctttcctccgtaccctctatgcgtccttacctctggtggaagaagtatatcacccaggggcagttactgcaatttgtgctgacgataattcagacatcctgcggggtgatttggccctgcacgttcccacttggatggctttattttcagataggctacatgatcagcttgattgcactttttaccaatttttacattcagacctacaacaaaaagggcgctagtaggagaaaggaccacttgaaggaccaccaaaacgggagcatggcagctgtgaatggtcataccaatagtttctcacctttagagaataacgtgaaacctcgcaaactacggaaagattag

SEQ ID NO: 114034 - DNA, 870 bp, Artificial Sequence
  derived and/or modified sequence
atggagcacttcgacgccagcctgagcacctacttcaaggccctgctgggacctcgcgataccagagtgaaaggctggttcctgttggacaactatatacccactttcatttgctctgtaatttacctgctgattgtgtggcttggccctaaatacatgaggaataagcagcccttttcctgcagggggatactggtggtgtacaaattctgcgagctggtcacaggcgtgtgggaaggcaaatataattttttctgccaaggaactagaacagcaggcgaatctgatatgaaaatcatccgggtcctgtggtggtattatttctccaaacttatcgagtttatggacaccttcttcttcattctaaggaagaataaccaccaaattactgtcttgcacgtgtatcatcatgcgtcgatgctgaacatttggtggttcgtaatgaattgggttccatgtggtcactcttatttcggcgccactttaaattcttttatccatgtgctgatgtatagttattacggtctgagttccgtgcctagcatgaggccctacctctggtggaagaagtacatcacgcagggacaactgttgcaattcgtgctgactatcattcagacctcctgtggtgttatttggccttgtacctttcccctgggctggctctattttcagatcggctacatgatttctctaattgccctgtttaccaatttttatatccagacgtataataaaaaaggggcatccagaaggaaagaccacctaaaggaccaccaaaacggatcaatggcagctgtcaacggccatactaactccttctcgcctctggaaaataacgttaagccccgaaaactccgcaaagattag

SEQ ID NO: 114035 - DNA, 900 bp, Artificial Sequence
  derived and/or modified sequence
atggagcacttcgacgccagcctgagcacctacttcaaggccctgttgggccccagagacaccagagtaaaaggctggtttctgctagataactacatccccaccttcatctgttctgtgatttacctgctcattgtgtggttgggtcctaaatacatgcgcaacaagcagcctttcagctgcagagggatccttgtggtgtacaacctgggactcaccctattgtccttatacatgttctgtgagttggtaaccggcgtctgggagggcaaatataatttcttctgtcagggaactcggaccgcaggcgagtcagacatgaagattatccgtgtgctctggtggtactacttttctaagctgatcgaatttatggatacatttttttttatattaagaaaaaacaatcatcagataacagtgctgcacgtataccaccacgcctccatgctaaatatatggtggttcgttatgaattgggtcccgtgtggtcactcttattttggagccactcttaactctttcattcatgtcctgatgtactcatattatggcctgtccagcgttcccagcatgcgcccttacctgtggtggaaaaaatatatcacacaaggccagcttcttcagttcgtcttaacaataatccaaacgagttgcggcgtcatttggccatgcacatttccattaggctggttatattttcagatcggttacatgatttccctaatcgccctgttcaccaatttctacatccagacgtacaacaagaagggcgcttcaaggagaaaagaccacttgaaggatcatcagaatgggtcgatggcagcagtcaatggccacactaacagcttttcgccgctggaaaataacgtgaagccgcgcaagctgaggaaggattag

SEQ ID NO: 114036 - DNA, 900 bp, Artificial Sequence
  derived and/or modified sequence
atggagcattttgatgctagtctctcgacttacttcaaggccctgcttggccctagggatacaagagtgaaggggtggtttttacttgacaactatatccctacgttcatctgtagcgtcatttacctattgatcgtatggttaggtcctaaatacatgcggaataaacagcctttcagctgcagaggaatccttgttgtttataaccttggcctgacccttctgagcctctacatgttttgtgaactggtaactggtgtctgggagggcaagtacaactttttttgccaggggacaagaaccgccggagagtcagatatgaagattatacgtgttttgtggtggtactactttagcaagctgatcgagttcatggacactttttttttcattttgagaaagaacaaccatcaaatcactgtcctgcacgtctaccatcacgctagtatgttgaacatatggtggttcgtcatgaactgggtcccctgtggccactcttattttggtgcaacgctgaattccttcattcacgtgctgatgtactcttattatgggctgagtagtgtaccatcgatgagaccctatctctggtggaaaaagtatattacccagggccagctcctgcagttcgtcctaactataattcagaccagttgtggggtgatctggccatgtaccttccctctgggctggctctacttccagatcggatacatgatttcactgattgctctgttcactaacttctacatccagacatacaacaagaaaggtgcatcgcgcaggaaggatcatctaaaggatcatcagaacgggagtatggcagccgtgaatggccatactaattccttctcccccctggaaaataacgtcaagccacgcaaacttagaaaagattag

SEQ ID NO: 114037 - DNA, 870 bp, Artificial Sequence
  derived and/or modified sequence
atggagcacttcgacgcctccctgtcaacatattttaaggcgctgctgggccctagagatactagggtcaaaggatggtttctgctggacaattacatccctaccttcatatgcagtgtcatctatctgttgatcgtttggctgggacccaagtacatgagaaacaagcaaccattcagctgcagaggtattttggtggtgtacaagttctgcgagctggttactggggtctgggaggggaagtataactttttctgccagggcacccggaccgctggagagagcgacatgaagataatccgtgttctctggtggtattatttcagtaagctgatcgaattcatggacacttttttcttcattttgcgcaaaaacaaccaccagattactgtccttcacgtgtaccaccatgcctcaatgctcaacatctggtggtttgttatgaactgggtgccatgcgggcactcctacttcggtgcaacactgaacagctttatacacgtcctgatgtacagctattatggcctgtcatccgttccctctatgaggccttacctctggtggaagaaatatattacacagggacaactcttgcaatttgtgctaaccataatacaaacttcatgtggtgttatatggccttgcacctttcccctgggatggctgtatttccagatcggctacatgatctctcttatagccctcttcactaacttctatattcaaacttataataaaaaaggcgcatcacgacgtaaagatcacttaaaggaccatcaaaacggctctatggctgccgtaaacggacacacaaattccttctctcccctcgagaataatgtgaaaccacggaaattacgcaaagattag

SEQ ID NO: 114038 - DNA, 900 bp, Artificial Sequence
  derived and/or modified sequence
atggagcacttcgacgcctcactctccacatacttcaaggcccttctcggtcctcgggatacacgtgtcaaaggctggtttcttctggacaattatatccccactttcatctgctccgtgatctatcttctcatcgtttggctaggccctaaatatatgaggaacaaacagccctttagttgcagaggcattttggtcgtgtataatctgggcctcacactactttccctgtacatgttttgtgaattggtaactggagtctgggaagggaaatacaatttcttttgccagggcaccaggactgcaggagaaagtgatatgaaaattattagggtgctgtggtggtattacttttctaaactcattgaattcatggacacattcttctttatactgcggaagaataatcaccagattaccgtactgcacgtgtatcatcatgccagcatgttgaatatctggtggtttgtcatgaattgggttccttgcggacatagctactttggcgctacactgaatagcttcatacatgtgcttatgtacagctactatggtctttctagtgtgccgagtatgaggccctacctttggtggaaaaaatacattacccaggggcagctgttacaatttgttctgaccattattcagaccagctgtggcgttatatggccttgcactttcccactgggatggttatactttcagattggctatatgatttctttgatcgccctctttacgaacttctacattcagacttataacaagaaaggcgctagccgtcgcaaggatcacctgaaagatcaccaaaacggaagcatggccgctgttaatgggcacaccaactcgtttagccccctggagaacaacgtgaaacctcgtaaacttcggaaagactag

SEQ ID NO: 114039 - DNA, 900 bp, Artificial Sequence
  derived and/or modified sequence
atggagcacttcgacgccagcctgagcacctacttcaaggccctgctgggccccagagacaccagagtgaagggctggttcctgctggacaactacatccccaccttcatctgcagcgtgatctacctgctgatcgtgtggctgggccccaagtacatgagaaacaagcagcccttcagctgcagaggcatcctggtggtgtacaacctgggcctgaccctgctgagcctgtacatgttctgcgagctggtgaccggcgtgtgggagggcaagtacaacttcttctgccagggcaccagaaccgccggcgagagcgacatgaagatcatcagagtgctgtggtggtactacttcagcaagctgatcgagttcatggacaccttcttcttcatcctgagaaagaacaaccaccagatcaccgtgctgcacgtgtaccaccacgccagcatgctgaacatctggtggttcgtgatgaactgggtgccctgcggccacagctacttcggcgccaccctgaacagcttcatccacgtgctgatgtacagctactacggcctgagcagcgtgcccagcatgagaccctacctgtggtggaagaagtacatcacccagggccagctgctgcagttcgtgctgaccatcatccagaccagctgcggcgtgatctggccctgcaccttccccctgggctggctgtacttccagatcggctacatgatcagcctgatcgccctgttcaccaacttctacatccagacctacaacaagaagggcgccagcagaagaaaggaccacctgaaggaccaccagaacggcagcatggccgccgtgaacggccacaccaacagcttcagccccctggagaacaacgtgaagcccagaaagctgagaaaggactag

SEQ ID NO: 114040 - DNA, 870 bp, Artificial Sequence
  derived and/or modified sequence
atggagcacttcgacgccagcctgagcacctacttcaaggccctgctgggccccagagacaccagagtgaagggctggttcctgctggacaactacatccccaccttcatctgcagcgtgatctacctgctgatcgtgtggctgggccccaagtacatgagaaacaagcagcccttcagctgcagaggcatcctggtggtgtacaagttctgcgagctggtgaccggcgtgtgggagggcaagtacaacttcttctgccagggcaccagaaccgccggcgagagcgacatgaagatcatcagagtgctgtggtggtactacttcagcaagctgatcgagttcatggacaccttcttcttcatcctgagaaagaacaaccaccagatcaccgtgctgcacgtgtaccaccacgccagcatgctgaacatctggtggttcgtgatgaactgggtgccctgcggccacagctacttcggcgccaccctgaacagcttcatccacgtgctgatgtacagctactacggcctgagcagcgtgcccagcatgagaccctacctgtggtggaagaagtacatcacccagggccagctgctgcagttcgtgctgaccatcatccagaccagctgcggcgtgatctggccctgcaccttccccctgggctggctgtacttccagatcggctacatgatcagcctgatcgccctgttcaccaacttctacatccagacctacaacaagaagggcgccagcagaagaaaggaccacctgaaggaccaccagaacggcagcatggccgccgtgaacggccacaccaacagcttcagccccctggagaacaacgtgaagcccagaaagctgagaaaggactag

SEQ ID NO: 114041 - DNA, 2827 bp, Artificial Sequence
  derived and/or modified sequence
gcgccattgtgacgtcacggtcagcccacgttctgattgtagatagccggcgccttcctcttcccatcgcgcgggtcctagccaccggtgtctccttctacatccgcctctgcgccggctgccacccgcgctccctccgccgccgccgccttgctgctgctcaaagctgctgccgccccttgggctaaaaggttttcaaatggaacattttgatgcatcacttagtacctatttcaaggcattgctaggccctcgagatactagagtaaaaggatggtttcttctggacaattatatacccacatttatctgctctgtcatatatttactaattgtatggctgggaccaaaatacatgaggaataaacagccattctcttgccgggggattttagtggtgtataaccttggactcacactgctgtctctgtatatgttctgtgagttagtaacaggagtatgggaaggcaaatacaacttcttctgtcagggcacacgcaccgcaggagaatcagatatgaagattatccgtgtcctctggtggtactacttctccaaactcatagaatttatggacactttcttcttcatcctgcgcaagaacaaccaccagatcacggtcctgcacgtctaccaccatgcctcgatgctgaacatctggtggtttgtgatgaactgggtcccctgcggccactcttattttggtgccacacttaatagcttcatccacgtcctcatgtactcttactatggtttgtcgtcagtcccttccatgcgtccatacctctggtggaagaagtacatcactcaggggcagctgcttcagtttgtgctgacaatcatccagaccagctgcggggtcatctggccgtgcacattccctcttggttggttgtatttccagattggatacatgatttccctgattgctctcttcacaaacttctacattcagacctacaacaagaaaggggcctcccgaaggaaagaccacctgaaggaccaccagaatgggtccatggctgctgtgaatggacacaccaacagcttttcacccctggaaaacaatgtgaagccaaggaagctgcggaaggattgaagtcaaagaattgaaaccctccaaaccacgtcatctgattgtaagcacaatatgagttgtgccccaatgctcgttaacagctgctgtaactagtctggcctacaatagtgtgattcatgtaggacttctttcatcaattcaaaacccctagaaaacgtatacagattatataagtagggataagatttctaacatttctgggctctctgacccctgcgctagactgtggaaagggagtattattatagtatacaacactgctgttgccttattagttataacatgataggtgctgaattgtgattcacaatttaaaaacactgtaatccaaacttttttttttaactgtagatcatgcatgtgattgtaaatgtaaatttgtacaatgttgttatggtagagaaacacacatgccttaaaatttaaaaagcagggcccaaagcttattagtttaaattagggtatgtttcaagtttgtattaatttgtaatagctctgtttagaaaaaatcaaagaccatgatttatgaaactaatgtgacataatttccagtgacttgttgatgtgaaatcagacacggcaccttcagttttgtactattggctttgaatcaagcaggctcaaatctagtggaacagtcagtttaactttttaacagatcttatttttttattttgagtgccactattaatgtaaaaaggggggggctctacagcagtcgtgatgaaacttaaatatatattctttgtcctcgagattttaggaagggtgtagggtgagtaggccatttttaatttctgaagtgctaagtgtttttatacagcaaacaaaaagtcaattttgctttccaccagtgcgagagaggatgtatacttttcaagagagatgattgcctatttaccgtttgacagagtcccgtagatgagcaatggggaactggttgccagggtctaaatttggattgatttatgcactgttatctgttttgacacagatttccttgtaaaatgtgcctagtttaccaaaattaacaaagggggggaaaggaccttagaactttttaaggtaaaatcaaatatagctacagcataagagaatcgagaaatttgatagaggtaacttgtttaatgtaaatctaatagtacttgtaatttctttctgcttagaatctaaagatgtgtttagaacctcttgtttaaaaataatagactgcttatcataaaatcacatctcacacatttgaggcagtggtcaaacaggtaaagcctatgatgtgtgtcattttaaagtgtcggaatttagcctctgaataccttctccattgggggaaagatattcttggaaccactcatgacatatcttagaaggtcattgacaatgtataaactaattgttggtttgatatttatgtaaatatcagtttaccatgctttaattttgcacattcgtactatagggagcctattggttctctattagtcttgtgggttttctgtttgaaaaggagtcatggcatctgtttacatttaccttatcaaacctagaatgtgtatatttataaatgtatgtcttcattgctaggtactaatttgcagatgtctttacatatttcaatacagaaactataacattcaatagtgtgctgtcaaagtgtgcttagctcacctggatatacctacattgttaaatgtctaaacagtaatcattaaaacatttttgattacctgt

SEQ ID NO: 114042 - DNA, 2940 bp, Artificial Sequence
  derived and/or modified sequence
aggggccaaccccggcctaggctctccaccgcatcggattctggaatttacgatcacgaaagttctattgtcccgcgattggctcccgggccgcatgacatcatagcgcttgattcatccttcgggtcccgattggctggccgcgccattgtgacgtcacggtcagcccacgttctgattgtagatagccggcgccttcctcttcccatcgcgcgggtcctagccaccggtgtctccttctacatccgcctctgcgccggctgccacccgcgctccctccgccgccgccgccttgctgctgctcaaagctgctgccgccccttgggctaaaaggttttcaaatggaacattttgatgcatcacttagtacctatttcaaggcattgctaggccctcgagatactagagtaaaaggatggtttcttctggacaattatatacccacatttatctgctctgtcatatatttactaattgtatggctgggaccaaaatacatgaggaataaacagccattctcttgccgggggattttagtggtgtataagttctgtgagttagtaacaggagtatgggaaggcaaatacaacttcttctgtcagggcacacgcaccgcaggagaatcagatatgaagattatccgtgtcctctggtggtactacttctccaaactcatagaatttatggacactttcttcttcatcctgcgcaagaacaaccaccagatcacggtcctgcacgtctaccaccatgcctcgatgctgaacatctggtggtttgtgatgaactgggtcccctgcggccactcttattttggtgccacacttaatagcttcatccacgtcctcatgtactcttactatggtttgtcgtcagtcccttccatgcgtccatacctctggtggaagaagtacatcactcaggggcagctgcttcagtttgtgctgacaatcatccagaccagctgcggggtcatctggccgtgcacattccctcttggttggttgtatttccagattggatacatgatttccctgattgctctcttcacaaacttctacattcagacctacaacaagaaaggggcctcccgaaggaaagaccacctgaaggaccaccagaatgggtccatggctgctgtgaatggacacaccaacagcttttcacccctggaaaacaatgtgaagccaaggaagctgcggaaggattgaagtcaaagaattgaaaccctccaaaccacgtcatctgattgtaagcacaatatgagttgtgccccaatgctcgttaacagctgctgtaactagtctggcctacaatagtgtgattcatgtaggacttctttcatcaattcaaaacccctagaaaacgtatacagattatataagtagggataagatttctaacatttctgggctctctgacccctgcgctagactgtggaaagggagtattattatagtatacaacactgctgttgccttattagttataacatgataggtgctgaattgtgattcacaatttaaaaacactgtaatccaaacttttttttttaactgtagatcatgcatgtgattgtaaatgtaaatttgtacaatgttgttatggtagagaaacacacatgccttaaaatttaaaaagcagggcccaaagcttattagtttaaattagggtatgtttcaagtttgtattaatttgtaatagctctgtttagaaaaaatcaaagaccatgatttatgaaactaatgtgacataatttccagtgacttgttgatgtgaaatcagacacggcaccttcagttttgtactattggctttgaatcaagcaggctcaaatctagtggaacagtcagtttaactttttaacagatcttatttttttattttgagtgccactattaatgtaaaaaggggggggctctacagcagtcgtgatgaaacttaaatatatattctttgtcctcgagattttaggaagggtgtagggtgagtaggccatttttaatttctgaagtgctaagtgtttttatacagcaaacaaaaagtcaattttgctttccaccagtgcgagagaggatgtatacttttcaagagagatgattgcctatttaccgtttgacagagtcccgtagatgagcaatggggaactggttgccagggtctaaatttggattgatttatgcactgttatctgttttgacacagatttccttgtaaaatgtgcctagtttaccaaaattaacaaagggggggaaaggaccttagaactttttaaggtaaaatcaaatatagctacagcataagagaatcgagaaatttgatagaggtaacttgtttaatgtaaatctaatagtacttgtaatttctttctgcttagaatctaaagatgtgtttagaacctcttgtttaaaaataatagactgcttatcataaaatcacatctcacacatttgaggcagtggtcaaacaggtaaagcctatgatgtgtgtcattttaaagtgtcggaatttagcctctgaataccttctccattgggggaaagatattcttggaaccactcatgacatatcttagaaggtcattgacaatgtataaactaattgttggtttgatatttatgtaaatatcagtttaccatgctttaattttgcacattcgtactatagggagcctattggttctctattagtcttgtgggttttctgtttgaaaaggagtcatggcatctgtttacatttaccttatcaaacctagaatgtgtatatttataaatgtatgtcttcattgctaggtactaatttgcagatgtctttacatatttcaatacagaaactataacattcaatagtgtgctgtcaaagtgtgcttagctcacctggatatacctacattgttaaatgtctaaacagtaatcattaaaacatttttgattacctgtg

SEQ ID NO: 114043 - DNA, 3070 bp, Artificial Sequence
  derived and/or modified sequence
gtcgggggccgccgctcggccatgacacccgcgcgagcgcgcggccgggaagcggtcagagagaactgccgttaggtctcggacctggtgccgagaaagagctgccggggcaacccgcgctccgcccgcggcctccagctccgccggctccggggtacagcccggctcctcgggcgcggggaaaggggtgcgggtgcgggcgcgggcggctcgccccacgccgaggctgaggcagggcgctcgggagcgttctctgtgctgcggtcccacctgtgcgcgctgacaggcgccgcggggcacgacaccgtgcccacaccagacgcggagggatggatctgtccgcctgggtcctcccgccctgcgggccggagcgcgcggcgggagagccgggggagcgctctcggagggagcgcgctttctttggagtcggcgaaacccgggttttcaaatggaacattttgatgcatcacttagtacctatttcaaggcattgctaggccctcgagatactagagtaaaaggatggtttcttctggacaattatatacccacatttatctgctctgtcatatatttactaattgtatggctgggaccaaaatacatgaggaataaacagccattctcttgccgggggattttagtggtgtataaccttggactcacactgctgtctctgtatatgttctgtgagttagtaacaggagtatgggaaggcaaatacaacttcttctgtcagggcacacgcaccgcaggagaatcagatatgaagattatccgtgtcctctggtggtactacttctccaaactcatagaatttatggacactttcttcttcatcctgcgcaagaacaaccaccagatcacggtcctgcacgtctaccaccatgcctcgatgctgaacatctggtggtttgtgatgaactgggtcccctgcggccactcttattttggtgccacacttaatagcttcatccacgtcctcatgtactcttactatggtttgtcgtcagtcccttccatgcgtccatacctctggtggaagaagtacatcactcaggggcagctgcttcagtttgtgctgacaatcatccagaccagctgcggggtcatctggccgtgcacattccctcttggttggttgtatttccagattggatacatgatttccctgattgctctcttcacaaacttctacattcagacctacaacaagaaaggggcctcccgaaggaaagaccacctgaaggaccaccagaatgggtccatggctgctgtgaatggacacaccaacagcttttcacccctggaaaacaatgtgaagccaaggaagctgcggaaggattgaagtcaaagaattgaaaccctccaaaccacgtcatctgattgtaagcacaatatgagttgtgccccaatgctcgttaacagctgctgtaactagtctggcctacaatagtgtgattcatgtaggacttctttcatcaattcaaaacccctagaaaacgtatacagattatataagtagggataagatttctaacatttctgggctctctgacccctgcgctagactgtggaaagggagtattattatagtatacaacactgctgttgccttattagttataacatgataggtgctgaattgtgattcacaatttaaaaacactgtaatccaaacttttttttttaactgtagatcatgcatgtgattgtaaatgtaaatttgtacaatgttgttatggtagagaaacacacatgccttaaaatttaaaaagcagggcccaaagcttattagtttaaattagggtatgtttcaagtttgtattaatttgtaatagctctgtttagaaaaaatcaaagaccatgatttatgaaactaatgtgacataatttccagtgacttgttgatgtgaaatcagacacggcaccttcagttttgtactattggctttgaatcaagcaggctcaaatctagtggaacagtcagtttaactttttaacagatcttatttttttattttgagtgccactattaatgtaaaaaggggggggctctacagcagtcgtgatgaaacttaaatatatattctttgtcctcgagattttaggaagggtgtagggtgagtaggccatttttaatttctgaagtgctaagtgtttttatacagcaaacaaaaagtcaattttgctttccaccagtgcgagagaggatgtatacttttcaagagagatgattgcctatttaccgtttgacagagtcccgtagatgagcaatggggaactggttgccagggtctaaatttggattgatttatgcactgttatctgttttgacacagatttccttgtaaaatgtgcctagtttaccaaaattaacaaagggggggaaaggaccttagaactttttaaggtaaaatcaaatatagctacagcataagagaatcgagaaatttgatagaggtaacttgtttaatgtaaatctaatagtacttgtaatttctttctgcttagaatctaaagatgtgtttagaacctcttgtttaaaaataatagactgcttatcataaaatcacatctcacacatttgaggcagtggtcaaacaggtaaagcctatgatgtgtgtcattttaaagtgtcggaatttagcctctgaataccttctccattgggggaaagatattcttggaaccactcatgacatatcttagaaggtcattgacaatgtataaactaattgttggtttgatatttatgtaaatatcagtttaccatgctttaattttgcacattcgtactatagggagcctattggttctctattagtcttgtgggttttctgtttgaaaaggagtcatggcatctgtttacatttaccttatcaaacctagaatgtgtatatttataaatgtatgtcttcattgctaggtactaatttgcagatgtctttacatatttcaatacagaaactataacattcaatagtgtgctgtcaaagtgtgcttagctcacctggatatacctacattgttaaatgtctaaacagtaatcattaaaacatttttgatt

SEQ ID NO: 114044 - protein, 1115 aa, Artificial Sequence
  derived and/or modified sequence
MLRGTMTAWRGMRPEVTLACLLLATAGCFADLNEVPQVTVQPASTVQKPGGTVILGCVVEPPRMNVTWRLNGKELNGSDDALGVLITHGTLVITALNNHTVGRYQCVARMPAGAVASVPATVTLANLQDFKLDVQHVIEVDEGNTAVIACHLPESHPKAQVRYSVKQEWLEASRGNYLIMPSGNLQIVNASQEDEGMYKCAAYNPVTQEVKTSGSSDRLRVRRSTAEAARIIYPPEAQTIIVTKGQSLILECVASGIPPPRVTWAKDGSSVTGYNKTRFLLSNLLIDTTSEEDSGTYRCMADNGVGQPGAAVILYNVQVFEPPEVTMELSQLVIPWGQSAKLTCEVRGNPPPSVLWLRNAVPLISSQRLRLSRRALRVLSMGPEDEGVYQCMAENEVGSAHAVVQLRTSRPSITPRLWQDAELATGTPPVSPSKLGNPEQMLRGQPALPRPPTSVGPASPQCPGEKGQGAPAEAPIILSSPRTSKTDSYELVWRPRHEGSGRAPILYYVVKHRKQVTNSSDDWTISGIPANQHRLTLTRLDPGSLYEVEMAAYNCAGEGQTAMVTFRTGRRPKPEIMASKEQQIQRDDPGASPQSSSQPDHGRLSPPEAPDRPTISTASETSVYVTWIPRGNGGFPIQSFRVEYKKLKKVGDWILATSAIPPSRLSVEITGLEKGTSYKFRVRALNMLGESEPSAPSRPYVVSGYSGRVYERPVAGPYITFTDAVNETTIMLKWMYIPASNNNTPIHGFYIYYRPTDSDNDSDYKKDMVEGDKYWHSISHLQPETSYDIKMQCFNEGGESEFSNVMICETKARKSSGQPGRLPPPTLAPPQPPLPETIERPVGTGAMVARSSDLPYLIVGVVLGSIVLIIVTFIPFCLWRAWSKQKHTTDLGFPRSALPPSCPYTMVPLGGLPGHQASGQPYLSGISGRACANGIHMNRGCPSAAVGYPGMKPQQHCPGELQQQSDTSSLLRQTHLGNGYDPQSHQITRGPKSSPDEGSFLYTLPDDSTHQLLQPHHDCCQRQEQPAAVGQSGVRRAPDSPVLEAVWDPPFHSGPPCCLGLVPVEEVDSPDSCQVSGGDWCPQHPVGAYVGQEPGMQLSPGPLVRVSFETPPLTI

SEQ ID NO: 114045 - DNA, 3348 bp, Artificial Sequence
  derived and/or modified sequence
atgctgagaggcaccatgaccgcctggagaggcatgagacccgaggtgaccctggcctgcctgctgctggccaccgccggctgcttcgccgacctgaacgaggtgccccaggtgaccgtgcagcccgccagcaccgtgcagaagcccggcggcaccgtgatcctgggctgcgtggtggagccccccagaatgaacgtgacctggagactgaacggcaaggagctgaacggcagcgacgacgccctgggcgtgctgatcacccacggcaccctggtgatcaccgccctgaacaaccacaccgtgggcagataccagtgcgtggccagaatgcccgccggcgccgtggccagcgtgcccgccaccgtgaccctggccaacctgcaggacttcaagctggacgtgcagcacgtgatcgaggtggacgagggcaacaccgccgtgatcgcctgccacctgcccgagagccaccccaaggcccaggtgagatacagcgtgaagcaggagtggctggaggccagcagaggcaactacctgatcatgcccagcggcaacctgcagatcgtgaacgccagccaggaggacgagggcatgtacaagtgcgccgcctacaaccccgtgacccaggaggtgaagaccagcggcagcagcgacagactgagagtgagaagaagcaccgccgaggccgccagaatcatctacccccccgaggcccagaccatcatcgtgaccaagggccagagcctgatcctggagtgcgtggccagcggcatccccccccccagagtgacctgggccaaggacggcagcagcgtgaccggctacaacaagaccagattcctgctgagcaacctgctgatcgacaccaccagcgaggaggacagcggcacctacagatgcatggccgacaacggcgtgggccagcccggcgccgccgtgatcctgtacaacgtgcaggtgttcgagccccccgaggtgaccatggagctgagccagctggtgatcccctggggccagagcgccaagctgacctgcgaggtgagaggcaaccccccccccagcgtgctgtggctgagaaacgccgtgcccctgatcagcagccagagactgagactgagcagaagagccctgagagtgctgagcatgggccccgaggacgagggcgtgtaccagtgcatggccgagaacgaggtgggcagcgcccacgccgtggtgcagctgagaaccagcagacccagcatcacccccagactgtggcaggacgccgagctggccaccggcaccccccccgtgagccccagcaagctgggcaaccccgagcagatgctgagaggccagcccgccctgcccagaccccccaccagcgtgggccccgccagcccccagtgccccggcgagaagggccagggcgcccccgccgaggcccccatcatcctgagcagccccagaaccagcaagaccgacagctacgagctggtgtggagacccagacacgagggcagcggcagagcccccatcctgtactacgtggtgaagcacagaaagcaggtgaccaacagcagcgacgactggaccatcagcggcatccccgccaaccagcacagactgaccctgaccagactggaccccggcagcctgtacgaggtggagatggccgcctacaactgcgccggcgagggccagaccgccatggtgaccttcagaaccggcagaagacccaagcccgagatcatggccagcaaggagcagcagatccagagagacgaccccggcgccagcccccagagcagcagccagcccgaccacggcagactgagcccccccgaggcccccgacagacccaccatcagcaccgccagcgagaccagcgtgtacgtgacctggatccccagaggcaacggcggcttccccatccagagcttcagagtggagtacaagaagctgaagaaggtgggcgactggatcctggccaccagcgccatcccccccagcagactgagcgtggagatcaccggcctggagaagggcaccagctacaagttcagagtgagagccctgaacatgctgggcgagagcgagcccagcgcccccagcagaccctacgtggtgagcggctacagcggcagagtgtacgagagacccgtggccggcccctacatcaccttcaccgacgccgtgaacgagaccaccatcatgctgaagtggatgtacatccccgccagcaacaacaacacccccatccacggcttctacatctactacagacccaccgacagcgacaacgacagcgactacaagaaggacatggtggagggcgacaagtactggcacagcatcagccacctgcagcccgagaccagctacgacatcaagatgcagtgcttcaacgagggcggcgagagcgagttcagcaacgtgatgatctgcgagaccaaggccagaaagagcagcggccagcccggcagactgcccccccccaccctggcccccccccagccccccctgcccgagaccatcgagagacccgtgggcaccggcgccatggtggccagaagcagcgacctgccctacctgatcgtgggcgtggtgctgggcagcatcgtgctgatcatcgtgaccttcatccccttctgcctgtggagagcctggagcaagcagaagcacaccaccgacctgggcttccccagaagcgccctgccccccagctgcccctacaccatggtgcccctgggcggcctgcccggccaccaggccagcggccagccctacctgagcggcatcagcggcagagcctgcgccaacggcatccacatgaacagaggctgccccagcgccgccgtgggctaccccggcatgaagccccagcagcactgccccggcgagctgcagcagcagagcgacaccagcagcctgctgagacagacccacctgggcaacggctacgacccccagagccaccagatcaccagaggccccaagagcagccccgacgagggcagcttcctgtacaccctgcccgacgacagcacccaccagctgctgcagccccaccacgactgctgccagagacaggagcagcccgccgccgtgggccagagcggcgtgagaagagcccccgacagccccgtgctggaggccgtgtgggacccccccttccacagcggccccccctgctgcctgggcctggtgcccgtggaggaggtggacagccccgacagctgccaggtgagcggcggcgactggtgcccccagcaccccgtgggcgcctacgtgggccaggagcccggcatgcagctgagccccggccccctggtgagagtgagcttcgagaccccccccctgaccatctag

SEQ ID NO: 114046 - DNA, 3348 bp, Artificial Sequence
  derived and/or modified sequence
atgctcaggggaactatgaccgcctggagaggcatgagacctgaagtgacactcgcttgcctgttgcttgctactgcaggatgcttcgcagacctgaatgaggtccctcaagtcaccgtgcaacctgcatctacagtacaaaagcctgggggcaccgtgatactgggctgcgtcgtagaacctccacgcatgaacgtaacctggcggctgaacggaaaggagctgaacggttcggacgacgccctgggcgtcttaattacccatggcacgctggtcataacggctctgaataatcacacggtcggacgatatcagtgcgtggcccgcatgccagctggggctgtagcgtcagtgcccgccacagtgactctggcaaatttgcaagattttaaactcgacgtccagcacgtgatcgaagttgatgaaggcaacaccgcagtcatagcgtgccacttgcccgaatctcatcccaaagctcaggtgcgctacagcgtcaagcaggaatggctggaagcatcaagaggaaactacctcatcatgccctcaggcaatctccaaattgtgaacgcttcccaagaagatgagggcatgtataagtgcgccgcatacaatcccgttacacaagaggtgaagacatctggctcatccgatcgcctaagggtcaggaggagtaccgcggaagctgcgcgaatcatctatcctccggaagcacagacaatcattgtaacgaaaggacagagcctgatcctggaatgcgttgcttcggggattcctccaccaagggtgacatgggccaaggacggcagtagcgtcaccggatataacaaaactagatttctgcttagtaatctcctcattgacacaacaagcgaggaggactctggcacgtacagatgtatggctgataatggagtgggacagccaggcgccgccgtcatcctgtacaatgtccaggttttcgaacctcccgaggtgacaatggaactctcacagcttgtgataccgtggggacaaagcgcaaagctgacgtgtgaagtgcgcggaaatcctcctccatcagttttatggctgcgtaacgccgtgcccctcatctccagccagaggttgcggctctctaggagagctctaagagtcctctccatgggccccgaggacgagggcgtctaccaatgcatggcagaaaatgaggtcggtagcgctcatgccgtggtgcagttaagaacctccagacctagcataacgccccgtctgtggcaggatgccgaacttgctacaggaactccacctgtcagtcctagcaagcttggaaatcccgaacagatgctcagaggacagcccgctctgccccggccacccacttcagtgggacctgctagccctcagtgtccaggcgaaaaaggacaaggagcccctgccgaggcccccattattctcagttcaccgaggaccagcaagaccgacagttatgagttagtctggaggccacgtcacgaaggatccggtagggctccgatcttgtactatgtagtgaaacaccggaagcaagtaactaactctagtgacgattggacaatcagcggcattcctgccaaccagcacaggctgacattaacccggctggatcccggctcactgtacgaagtcgagatggctgcctataactgcgctggcgaggggcaaaccgccatggtgacttttagaaccggccggcgccccaagccagaaataatggcatctaaggagcagcagattcagagagacgacccaggcgcatctccccagtcttcatctcagcctgatcacggtcgcttgagccccccagaagctccagacagacccactattagcacggcctccgaaacctctgtctacgtcacctggatccctcggggaaacggcggattccctattcagagttttagggtcgaatacaaaaagctgaaaaaagttggagactggatacttgccaccagtgccattcccccctctcgcctgtcagtcgagattactgggctcgaaaaaggtacatcatacaagttcagggtcagggccttgaatatgctgggcgaaagcgagcccagcgcccccagccggccttatgtggtttctggatatagtgggcgcgtgtacgaacgcccagttgccggaccatatataaccttcaccgatgctgtgaatgaaaccaccattatgttgaagtggatgtacatccctgcctctaataataatacaccaattcatggcttttatatctattataggccgaccgactccgataacgattctgattacaaaaaggacatggtggagggagataaatattggcactccatctcacatctccagcctgagacgtcctacgacatcaaaatgcagtgctttaacgaggggggtgagtcagagttttccaatgtgatgatttgtgagacaaaagccagaaagagttccggccagcccggccgactcccaccccccacattggcacctccacagccccctttgcctgagacgatcgaacggccagttggcaccggagcgatggtcgctcggagcagcgatttgccttacttgattgtcggcgtggtcttaggatctatcgtgctgatcatagtgacttttattcctttctgcctgtggagggcttggagcaagcaaaagcacacaaccgatcttggattcccacgatctgcgcttcccccttcgtgcccttatacaatggtgccgctggggggcctgccaggccatcaggcttctgggcagccctacctgagcgggattagcggccgcgcgtgtgccaatggaattcatatgaaccgcggctgcccatctgccgccgttggctatccagggatgaagccccagcaacactgtcccggggagcttcagcaacagagtgatacatcttcccttcttagacaaacccacctaggaaacggctacgatccccagagccatcagatcacacgggggcccaagagtagccccgacgagggtagtttcctgtacaccctgcccgacgattcgacacaccagttgctgcagccccaccacgactgttgccagcgccaagagcagcccgctgcggtgggacagtcaggcgtgagacgcgcgcccgattcacccgtcctcgaggccgtatgggatcccccatttcactctggccccccttgctgtctgggcctggtaccggtcgaagaggttgactcccccgattcgtgccaagtttctggaggcgactggtgtccgcaacatcccgtgggggcttacgtcggccaggaacctggtatgcagctcagccccggtcctcttgtgcgggtcagtttcgaaactccccccctgaccatatag

SEQ ID NO: 114047 - DNA, 3348 bp, Artificial Sequence
  derived and/or modified sequence
atgctgcggggcaccatgacagcctggaggggcatgaggcctgaggtgaccctggcctgcctgctgctggccacagctggctgctttgctgacctgaatgaggtgccccaggtgacagtgcagcctgccagcacagtgcagaagccaggcggcaccgtcatcctgggctgtgtggtggagccccccaggatgaatgtgacctggaggctgaatggcaaggagctgaatggaagtgatgatgccctgggcgtgctgatcacccacggcaccctggtgatcacagccctgaacaaccacacagtgggccgctaccagtgtgtggccaggatgcctgctggagctgtggcctctgtgcctgccaccgtgaccctggccaacctgcaggacttcaagctggatgtgcagcacgtgattgaggtggatgagggcaacacagctgtgattgcctgccacctgcctgagagccaccccaaggcccaggtgcgctacagcgtgaagcaggagtggctggaggccagccggggcaactacctgatcatgcccagcggcaacctgcagatcgtgaatgccagccaggaggatgagggcatgtacaagtgtgccgcctacaaccctgtgacccaggaggtgaagaccagcggcagcagtgaccggctgcgggtgcggcgcagcacagctgaggccgcccgcatcatctacccacctgaggcccagaccatcatcgtgaccaagggccagagcctcatcctggagtgtgtggccagcggcatccccccaccccgggtgacctgggccaaggatggcagctctgtgacaggctacaacaagacccgcttcctgctgagcaacctgctgattgacaccaccagcgaggaggacagcggcacctaccgctgcatggctgacaatggagtgggccagcccggggctgctgtgatcctgtacaacgtgcaggtgtttgagcccccagaggtgaccatggagctgagccagctggtgatcccctggggccagagcgccaagctgacctgtgaggtgcggggcaaccccccaccttctgtgctgtggctgagaaatgctgtgcccctcatcagcagccagaggctgcggctgagcagaagagccctgcgggtgctgtccatgggcccagaagatgaaggagtgtaccagtgcatggccgagaatgaggtgggcagcgcccatgctgtggtgcagctgcggaccagccggcccagcatcaccccccggctgtggcaggatgctgagctggccaccggcaccccacctgtgagccccagcaagctgggcaaccctgagcagatgctgcggggccagcctgccctgcccaggcctcccacctctgtgggccctgccagcccccagtgccctggagagaagggccagggcgccccagctgaggcccccatcatcctgagcagccccaggaccagcaagacagacagctatgagctggtgtggaggcccaggcatgagggcagcggccgggcccccatcctgtactacgtggtgaagcacaggaagcaggtgaccaacagcagtgatgactggaccatcagcggcatcccagccaaccagcaccggctgaccctgacccggctggaccccggcagcctgtatgaggtggagatggccgcctacaactgtgccggggagggccagacagccatggtgaccttcagaacaggccggcggcccaagccagagatcatggccagcaaggagcagcagatccagagagatgatcctggggccagcccccagagcagcagccagcctgaccacggccgcctgagccccccagaggccccagaccggcccaccatcagcacagccagcgagacctctgtgtatgtgacctggatccccagaggaaatggaggcttccccatccagagcttccgggtggagtacaagaagctgaagaaggtgggggactggatcctggccaccagcgccatcccccccagccggctgtctgtggagatcaccggcctggagaagggcaccagctacaagttccgggtgcgggccctgaacatgctgggggagagcgagcccagcgcccccagccggccctacgtggtgtctggctacagcggccgggtgtatgaaagacctgtggccggcccctacatcaccttcacagatgctgtgaatgagaccaccatcatgctgaagtggatgtacatcccagccagcaacaacaacacccccatccacggcttctacatctactaccggcccacagacagcgacaatgacagcgactacaagaaggacatggtggagggggacaagtactggcacagcatcagccacctgcagcctgagaccagctatgacatcaagatgcagtgcttcaatgaaggaggagagagcgagttcagcaatgtgatgatctgtgagaccaaggccaggaagagcagcggccagcccggccgcctgcccccacccaccctggccccaccccagccccccctgcctgagaccatcgagaggcctgtgggcaccggggccatggtggcccggagcagtgacctgccctacctgattgtgggcgtggtgctgggcagcatcgtgctgatcatcgtgaccttcatccccttctgcctgtggagggcctggagcaagcagaagcacaccacagacctgggcttccccaggtctgccctgccccccagctgcccctacaccatggtgcccctgggcggcctgcccggccaccaggccagcggccagccctacctgagcggcatcagcggccgggcctgtgccaacggcatccacatgaacagaggctgccccagcgctgctgtgggctacccaggcatgaagccccagcagcactgccctggagagctgcagcagcagagcgacaccagcagcctgctgcggcagacccacctgggcaatggctatgacccccagagccaccagatcacccggggccccaagagcagcccagatgagggcagcttcctgtacaccctgcctgatgacagcacccaccagctgctgcagccccaccacgactgctgccagaggcaggagcagcctgctgctgtgggccagagcggcgtgagaagagccccagacagccctgtgctggaggccgtgtgggacccccccttccacagcggccccccctgctgcctgggcctggtgcctgtggaggaggtggacagcccagacagctgccaggtgtctggaggagactggtgcccccagcaccctgtgggcgcctacgtgggccaggagcccggcatgcagctgagccctggccccctggtgcgggtgtcctttgagaccccacccctgaccatctag

SEQ ID NO: 114048 - DNA, 3348 bp, Artificial Sequence
  derived and/or modified sequence
atgctgcggggcaccatgaccgcctggcggggcatgcggcccgaggtgaccctagcttgccttttgctggccaccgctgggtgttttgctgatctgaacgaggttccgcaggtgaccgtccagccagccagtacggtgcaaaagcctggcggcaccgtgatcctgggctgtgtagtggaacccccccgaatgaacgtgacatggcgcctgaatggaaaggagctcaacgggtccgacgacgctttgggcgtgctgatcacccacgggaccttggtgattacagcgctaaacaatcacaccgtgggaaggtaccagtgcgtcgctaggatgcctgccggggccgtggcctcagtgcctgctactgtgacactggctaacctgcaggactttaaattggatgtgcagcacgtcatagaggtggatgagggtaatacagcggttattgcgtgccacctgcccgagtctcaccccaaggctcaggtcaggtactccgtgaagcaggagtggctggaggcctcacgaggaaactacttaatcatgccctctggaaatctgcagattgtcaatgcgtcccaggaggacgagggcatgtacaaatgcgctgcatataacccagtgacccaagaagtgaaaactagcggtagttcggaccggctgcgtgtccgacgcagcaccgccgaagccgctcgcattatttaccccccagaggcacagacaatcatcgtgacaaagggccagtccctgatcctggaatgcgttgcctcaggtatccccccacctagagttacctgggccaaagatggttccagtgtcaccggatacaacaagacaagattcctgctgagcaatttgctcatcgacaccacatccgaggaggattccggcacgtataggtgtatggccgacaacggcgtcggacagcccggtgcagccgttattctctataacgtgcaggtatttgagccccccgaggtcacaatggaattgagccagctggttattccgtgggggcagtctgcaaagctgacgtgcgaagtacgggggaaccctcccccttcggtcctctggctccgcaacgcagtgcccctgatctcctcacagaggttaaggctgtcgcgtcgcgcgctcagagttctgagtatgggcccagaggatgaaggcgtgtaccagtgcatggccgagaacgaggtcggttccgctcacgcggtggtgcagctgaggacctcaagacccagtatcacacctcgactgtggcaggatgcggaacttgccaccgggaccccccctgtcagtccgtctaagctcggcaacccagagcaaatgctcagaggacaacccgcactgccaaggcctcctacctcggtgggccctgcaagcccacagtgcccgggagaaaagggccagggcgcgcctgctgaggcaccgattatcctttctagcccacgcacaagtaagacagatagttacgagctggtttggcgaccaagacacgagggctcggggagggcccccatcctgtattatgtggtcaagcaccgaaagcaagtgacaaacagttcagatgactggaccatctccggcatccccgccaaccagcaccgcctcacactgacccgcctggaccctggttctctctatgaggtcgaaatggctgcctacaattgtgccggcgagggacaaactgccatggttaccttccggaccggaagacgcccgaaaccagaaatcatggcatccaaggaacagcagatccagcgggacgacccaggtgcctccccccagtccagctcacagcccgaccacgggagactcagtcctcccgaagctcctgaccgccctactatctcgaccgcgagcgagacgagtgtttacgtaacgtggatcccacgtggaaacggcggcttccctatccaatcatttagggtggagtacaagaaacttaaaaaggtaggggattggatacttgccacctcggccattccgcctagtaggttgtccgtggaaattaccggtctcgaaaagggaacctcatataaatttagagtgcgggccctaaatatgcttggcgaatccgaaccatccgcaccgtccaggccctatgtggtgagcggctacagtgggcgcgtctatgaaaggcctgttgctggcccttacattacttttacggacgcagtgaacgagactacaattatgttgaagtggatgtatatccctgcatctaacaacaacaccccaatccatggattctatatctactatagacctaccgattccgataatgatagcgattacaagaaagatatggtggaaggggataagtactggcattccatttctcacctccagccagaaacaagctacgatatcaaaatgcagtgctttaatgagggaggtgaatccgagttctcaaacgtcatgatctgcgagactaaggctagaaaatctagcggacagccaggacgactgccacccccaacattggcccccccacagcctcccctgcccgaaaccatcgagcggccagttgggactggcgccatggtggcccgatcatctgaccttccttaccttatcgttggtgtggtgttaggcagcatcgttctgataatcgttacattcatcccattttgcctctggcgcgcctggagtaaacagaaacacaccactgatctgggatttcctcgtagtgctctgcccccctcttgtccatatactatggtccccctggggggtctgcccggtcatcaggcaagcggacagccatatctttcgggcatatccgggcgcgcctgtgcgaacgggattcatatgaatcgagggtgcccctctgctgccgtaggctatcccggcatgaagcctcagcaacattgcccaggggaactgcagcagcagtctgatacttcctccctgctgaggcagacacatctcggcaacggctacgacccccagagccatcagatcacacgtggccccaagagcagcccagacgagggcagctttctttatactctcccggatgacagcacccaccagttgttacagcctcatcatgactgttgccagaggcaggaacaaccagctgcagtgggccagtctggtgttcggcgcgcacctgactctcctgtgcttgaggcagtgtgggatcccccctttcattcaggaccgccctgttgcctaggcctggtgccagttgaggaggtggatagccccgattcatgccaggtgtcgggtggagattggtgtccacagcatcctgtgggagcttacgtcggacaggagcctgggatgcagctgtcacccgggcctttagtacgggtgtcattcgaaacccccccactgacaatctag

SEQ ID NO: 114049 - DNA, 3348 bp, Artificial Sequence
  derived and/or modified sequence
atgctgaggggtaccatgacagcgtggcgcggtatgcggcctgaggtgaccttagcatgcctgctattggctacggctggatgtttcgccgacctgaacgaagtgccacaggtgacagtgcagcccgctagcacggtacagaagcctggcggaacagtgattctgggctgtgttgtcgagcccccacgcatgaacgtgacttggagactaaacggaaaggagctcaacggcagtgatgacgcattgggagtgctcattacacacggcacattggttattaccgccttgaataaccatacggttggcagataccagtgcgtggctcgtatgcccgctggggctgtagcgtcggtcccagcaacggtgactctggcaaacctgcaggacttcaaacttgacgttcagcatgtaatagaagtcgacgaggggaacaccgccgtgatcgcgtgccacctgccagagtcacaccccaaggcccaagtgcgatactccgtgaagcaggagtggttggaggcgtcccgcggtaactacctgattatgcccagcggtaatctacagatcgtgaacgctagccaggaagatgaagggatgtacaagtgcgccgcttacaatcccgtaacccaggaagtgaagacatcaggatcttccgaccgccttagagtgcgacgcagcacagcagaggcggcacgcattatttacccaccagaagcccagacgatcattgtgaccaagggacagagccttatcttggagtgtgtcgcctctgggataccgcctccaagggtaacctgggccaaggacggctcgagcgtgaccggatacaataaaacacgctttttactgtcaaacctgctgattgacacaacctcggaggaggactctggcacttatcgttgtatggcagataatggagtgggacagcccggtgcggctgtcatcctgtacaatgttcaggtcttcgaacccccagaggtgacgatggaactgtcacagctcgtaattccttgggggcagtcagccaaactaacgtgcgaagtgcggggaaacccacctccaagtgtgctgtggctacgcaacgctgtccccttgatcagcagccagaggttacgcctgtctaggagagctttgcgggtattatctatggggcctgaggacgaaggggtctatcaatgcatggccgagaacgaggtgggcagcgcccacgcggtcgtccagctgaggacatccagaccgagtattacaccaaggctgtggcaggacgccgaattggccacgggcaccccgcctgtgtcgcccagcaaattaggaaatcccgaacagatgctgaggggccagccggcactaccacgtccccctacgagcgtgggaccagcttcccctcagtgccccggagaaaaaggccagggggctcctgccgaggcacccatcatcctgtcctcgccaagaaccagtaagaccgattcctacgagctggtgtggcggcctaggcatgaggggtctggacgggctcctattctgtactatgtcgtgaagcatcgaaagcaggtgaccaattcatcagacgattggacaattagcggaattcctgccaaccagcacagactgactctaactcgcctggatcctgggagtctatatgaggttgagatggccgcatataactgcgccggagaggggcagactgcgatggtcacatttcgcacgggcaggagaccaaagcccgaaataatggcaagcaaagagcagcagatccagcgggatgaccccggtgcaagccctcaaagctcaagccagccggatcatgggcgactgtcccctcctgaagcaccggacaggccaactatctccactgctagtgagacttcggtctacgtaacttggatccctaggggaaacgggggatttccaattcagtcttttcgagttgagtacaagaagcttaagaaggtgggggactggattctagccactagcgctatccctccatccaggctgtccgtggagatcactggcttagagaaaggaacatcctacaagtttagagttcgagcactaaacatgctcggagagagtgaaccgtctgcgccaagtcgtccttatgtcgttagcggctatagcggcagggtttacgagcgtccagtggctgggccatacataaccttcaccgatgccgtgaatgagacgaccataatgctcaaatggatgtacattcccgcatcaaacaacaacacgcctatccatggtttctatatctactatagacctaccgactccgacaacgacagcgattacaagaaggatatggtggagggagataagtattggcacagcatctcccatctccagcccgagacctcttacgatatcaagatgcaatgctttaacgagggcggagagagcgagtttagcaatgtcatgatttgtgaaactaaggccagaaagagctctggccaacccggtcgcctgcctccaccaactctagcccctccccaacctccactgccagagaccatcgaaaggcctgtaggaactggggcaatggtcgctcgaagctcagatttgccttacttgatcgttggagtagtccttggctccattgtgctcatcatcgtgacctttatccccttctgcctttggcgcgcatggtcaaagcagaaacatacaacagacctgggttttcccagatccgcattaccgccttcatgtccatatactatggtcccactagggggactgccaggccatcaagcctccggtcagccatacctgtctggaatatcaggacgagcctgcgccaacggtattcatatgaatagaggctgcccctcagccgcagttggatatccaggtatgaagccacagcagcattgccccggtgagctgcagcagcaatcagacacctcaagcctgctgagacagacccacttgggcaacggttatgatccacaaagtcatcaaattactcggggaccaaagtcaagtcccgatgaggggtcattcttgtacaccctgccagacgactccactcatcagctcctgcagcctcaccacgattgctgtcagagacaggagcagcctgccgcagtcgggcagagtggcgtcagaagggccccagatagtcccgttctcgaggctgtgtgggaccccccttttcattctggcccaccttgttgtttgggcttggtgccagtcgaggaggtagacagcccggattcctgccaggtgtccggtggagactggtgtccccagcatcctgtgggtgcatatgtggggcaagaaccgggaatgcaactttctccaggacccttggtccgtgtgtcatttgagacccctcctcttaccatctag

SEQ ID NO: 114050 - DNA, 4276 bp, Artificial Sequence
  derived and/or modified sequence
gtttctcatagttggcgtcttctaaaggaaaaacactaaaatgaggaactcagcggaccgggagcgacgcagcttgagggaagcatccctagctgttggcgcagaggggcgaggctgaagccgagtggcccgaggtgtctgaggggctggggcaaaggtgaaagagtttcagaacaagcttcctggaacccatgacccatgaagtcttgtcgacatttataccgtctgagggtagcagctcgaaagtagaagaagtggagtgttgccagggacggcagtatctctttgtgtgaccctggcggcttatgggacgttggcttcagacctttgtgatacaccatgctgcgtgggacgatgacggcgtggagaggaatgaggcctgaggtcacactggcttgcctcctcctagccacagcaggctgctttgctgacttgaacgaggtccctcaggtcaccgtccagcctgcgtccaccgtccagaagcccggaggcactgtgatcttgggctgcgtggtggaacctccaaggatgaatgtaacctggcgcctgaatggaaaggagctgaatggctcggatgatgctctgggtgtcctcatcacccacgggaccctcgtcatcactgcccttaacaaccacactgtgggacggtaccagtgtgtggcccggatgcctgcgggggctgtggccagcgtgccagccactgtgacactagccaatctccaggacttcaagttagatgtgcagcacgtgattgaagtggatgagggaaacacagcagtcattgcctgccacctgcctgagagccaccccaaagcccaggtccggtacagcgtcaaacaagagtggctggaggcctccagaggtaactacctgatcatgccctcagggaacctccagattgtgaatgccagccaggaggacgagggcatgtacaagtgtgcagcctacaacccagtgacccaggaagtgaaaacctccggctccagcgacaggctacgtgtgcgccgctccaccgctgaggctgcccgcatcatctaccccccagaggcccaaaccatcatcgtcaccaaaggccagagtctcattctggagtgtgtggccagtggaatcccacccccacgggtcacctgggccaaggatgggtccagtgtcaccggctacaacaagacgcgcttcctgctgagcaacctcctcatcgacaccaccagcgaggaggactcaggcacctaccgctgcatggccgacaatggggttgggcagcccggggcagcggtcatcctctacaatgtccaggtgtttgaaccccctgaggtcaccatggagctatcccagctggtcatcccctggggccagagtgccaagcttacctgtgaggtgcgtgggaaccccccgccctccgtgctgtggctgaggaatgctgtgcccctcatctccagccagcgcctccggctctcccgcagggccctgcgcgtgctcagcatggggcctgaggacgaaggcgtctaccagtgcatggccgagaacgaggttgggagcgcccatgccgtagtccagctgcggacctccaggccaagcataaccccaaggctatggcaggatgctgagctggctactggcacacctcctgtatcaccctccaaactcggcaaccctgagcagatgctgagggggcaaccggcgctccccagacccccaacgtcagtggggcctgcttccccgcagtgtccaggagagaaggggcagggggctcccgccgaggctcccatcatcctcagctcgccccgcacctccaagacagactcatatgaactggtgtggcggcctcggcatgagggcagtggccgggcgccaatcctctactatgtggtgaaacaccgcaagcaggtcacaaattcctctgacgattggaccatctctggcattccagccaaccagcaccgcctgaccctcaccagacttgaccccgggagcttgtatgaagtggagatggcagcttacaactgtgcgggagagggccagacagccatggtcaccttccgaactggacggcggcccaaacccgagatcatggccagcaaagagcagcagatccagagagacgaccctggagccagtccccagagcagcagccagccagaccacggccgcctctcccccccagaagctcccgacaggcccaccatctccacggcctccgagacctcagtgtacgtgacctggattccccgtgggaatggtgggttcccaatccagtccttccgtgtggagtacaagaagctaaagaaagtgggagactggattctggccaccagcgccatccccccatcgcggctgtccgtggagatcacgggcctagagaaaggcacctcctacaagtttcgagtccgggctctgaacatgctgggggagagcgagcccagcgccccctctcggccctacgtggtgtcgggctacagcggtcgcgtgtacgagaggcccgtggcaggtccttatatcaccttcacggatgcggtcaatgagaccaccatcatgctcaagtggatgtacatcccagcaagtaacaacaacaccccaatccatggcttttatatctattatcgacccacagacagtgacaatgatagtgactacaagaaggatatggtggaaggggacaagtactggcactccatcagccacctgcagccagagacctcctacgacattaagatgcagtgcttcaatgaaggaggggagagcgagttcagcaacgtgatgatctgtgagaccaaagctcggaagtcttctggccagcctggtcgactgccacccccaactctggccccaccacagccgccccttcctgaaaccatagagcggccggtgggcactggggccatggtggctcgctccagcgacctgccctatctgattgtcggggtcgtcctgggctccatcgttctcatcatcgtcaccttcatccccttctgcttgtggagggcctggtctaagcaaaaacatacaacagacctgggttttcctcgaagtgcccttccaccctcctgcccgtatactatggtgccattgggaggactcccaggccaccaggccagtggacagccctacctcagtggcatcagtggacgggcctgtgctaatgggatccacatgaataggggctgcccctcggctgcagtgggctacccgggcatgaagccccagcagcactgcccaggcgagcttcagcagcagagtgacaccagcagcctgctgaggcagacccatcttggcaatggatatgacccccaaagtcaccagatcacgaggggtcccaagtctagcccggacgagggctctttcttatacacactgcccgacgactccactcaccagctgctgcagccccatcacgactgctgccaacgccaggagcagcctgctgctgtgggccagtcaggggtgaggagagcccccgacagtcctgtcctggaagcagtgtgggaccctccatttcactcagggcccccatgctgcttgggccttgtgccagttgaagaggtggacagtcctgactcctgccaagtgagtggaggagactggtgtccccagcaccccgtaggggcctacgtaggacaggaacctggaatgcagctctccccggggccactggtgcgtgtgtcttttgaaacaccacctctcacaatttaggcagaagctgatatcccagaaagactatatattgttttttttttaaaaaaaaaaagaagaaaaaagagacagagaaaattggtatttatttttctattatagccatatttatatatttatgcacttgtaaataaatgtatatgttttataattctggagagacataaggagtcctacccgttgaggttggagagggaaaataaagaagctgccacctaacaggagtcacccaggaaagcaccgcacaggctggcgcgggacagactcctaacctggggcctctgcagtggcaggcgaggctgcaggaggcccacagataagctggcaagaggaaggatcccaggcacatggttcatcacgagcatgagggaacagcaaggggcacggtatcacagcctggagacacccacacagatggctggatccggtgctacgggaaacattttcctaagatgcccatgagaacagaccaagatgtgtacagcactatgagcattaaaaaaccttccagaatcaataatccgtggcaacatatctctgtaaaaacaaacactgtaacttctaaataaatgtttagtcttccctgtaa

SEQ ID NO: 114051 - DNA, 66 bp, Artificial Sequence
  derived and/or modified sequence
aacagaaagaaggagggcaagaagaaccagagccccccccccaccgtgagccccctggccacctag

SEQ ID NO: 114052 - DNA, 66 bp, Artificial Sequence
  derived and/or modified sequence
aacaggaagaaggagggcaagaagaaccagagccccccacccaccgtgagccccctggccacctag

SEQ ID NO: 114053 - DNA, 66 bp, Artificial Sequence
  derived and/or modified sequence
aaccggaagaaggagggcaagaagaaccagagccccccccccaccgtttcccctctcgctacttag

SEQ ID NO: 114054 - DNA, 66 bp, Artificial Sequence
  derived and/or modified sequence
aatcgtaaaaaggaaggaaaaaaaaatcaaagtcctccaccaactgtgtcccccctggccacttag

SEQ ID NO: 114055 - DNA, 63 bp, Artificial Sequence
  derived and/or modified sequence
aatagaaagaaagaaggaaagaaaaatcaatcacctcctcccaccgtcagcccgttagctact

SEQ ID NO: 114056 - protein, 157 aa, Artificial Sequence
  derived and/or modified sequence
MLRGTMTAWRGMRPEVTLACLLLATAGCFADLNEVPQVTVQPASTVQKPGGTVILGCVVEPPRMNVTWRLNGKELNGSDDALGVLITHGTLVITALNNHTVGRYQCVARMPAGAVASVPATVTLASESAPLPPCHGAVPPHLSHPEAPTIHAASCYS

SEQ ID NO: 114057 - DNA, 69 bp, Artificial Sequence
  derived and/or modified sequence
atgctgagaggcaccatgaccgcctggagaggcatgagacccgaggtgaccctggcctgcctgctgtag

SEQ ID NO: 114058 - DNA, 258 bp, Artificial Sequence
  derived and/or modified sequence
atgctgagaggcaccatgaccgcctggagaggcatgagacccgaggtgaccctggcctgcctgctgctggccaccgccggctgcttcgccgacctgaacgaggtgccccaggtgaccgtgcagcccgccagcaccgtgcagaagcccggcggcaccgtgatcctgggctgcgtggtggagccccccagaatgaacgtgacctggagactgaacggcaaggagctgaacggcagcgacgacgccctgggcgtgctgtag

SEQ ID NO: 114059 - DNA, 474 bp, Artificial Sequence
  derived and/or modified sequence
atgctgagaggcaccatgaccgcctggagaggcatgagacccgaggtgaccctggcctgcctgctgctggccaccgccggctgcttcgccgacctgaacgaggtgccccaggtgaccgtgcagcccgccagcaccgtgcagaagcccggcggcaccgtgatcctgggctgcgtggtggagccccccagaatgaacgtgacctggagactgaacggcaaggagctgaacggcagcgacgacgccctgggcgtgctgatcacccacggcaccctggtgatcaccgccctgaacaaccacaccgtgggcagataccagtgcgtggccagaatgcccgccggcgccgtggccagcgtgcccgccaccgtgaccctggccagcgagagcgcccccctgcccccctgccacggcgccgtgcccccccacctgagccaccccgaggcccccaccatccacgccgccagctgctacagctag

SEQ ID NO: 114060 - DNA, 99 bp, Artificial Sequence
  derived and/or modified sequence
atgctgagaggcaccatgaccgcctggagaggcatgagacccgaggtgaccctggcctgcctgctgctggccaccgccggctgcttcgccgacctgtag

SEQ ID NO: 114061 - DNA, 69 bp, Artificial Sequence
  derived and/or modified sequence
atgctaagaggcacaatgactgcttggcgaggcatgagacccgaggttacattagcttgtctgctctag

SEQ ID NO: 114062 - DNA, 258 bp, Artificial Sequence
  derived and/or modified sequence
atgttgagagggactatgaccgcgtggaggggcatgcggcccgaggtgacccttgcctgtctccttctcgctactgcaggttgcttcgccgacttaaatgaagtacctcaggtgaccgtacagccagcatccacagtgcagaagcccggggggaccgtgatacttggctgcgtggtggagccccccaggatgaatgtgacctggagactgaatggtaaagagttgaacgggtcagacgacgctctcggtgtgctgtag

SEQ ID NO: 114063 - DNA, 474 bp, Artificial Sequence
  derived and/or modified sequence
atgctcagaggaacaatgaccgcatggcggggcatgcgaccggaggtcactcttgcctgcctgctcctggccactgctggttgctttgcagatctgaacgaggtacctcaggtgaccgtccagccggcctcaactgtccagaagcccggcggaaccgtgatcttgggatgcgttgtggaacccccacgtatgaacgttacctggcgccttaacgggaaggagctgaacggctccgacgacgctctgggtgtgttgataactcatggaaccttggttattactgcactgaacaatcatactgtggggagatatcagtgtgtcgccagaatgcctgccggggcagtggcatctgtgcctgccaccgtaacactcgcctctgagtccgcccctttacctccttgtcatggagctgtcccgcctcacctatcccatcccgaggcccccactattcacgccgccagctgctattcgtag

SEQ ID NO: 114064 - DNA, 474 bp, Artificial Sequence
  derived and/or modified sequence
atgttgcgaggtactatgactgcctggcgagggatgcgccctgaggttacactggcatgcctgctgctagcaactgcaggctgctttgcagacctcaatgaagtaccacaagtaactgtgcagcccgcctccaccgtccaaaagccgggagggactgtgattctcgggtgcgttgttgagcccccccgtatgaatgtgacatggcgcctgaacggcaaagaattgaatggttcggacgacgccctgggcgttctgatcacacatggtacacttgtgattaccgctctgaacaatcacactgttggtcgctaccaatgcgtggcgcgcatgcctgctggtgcggtcgcctctgtgccagctacggtgaccttggcttctgaaagtgcgcccctcccaccttgtcatggggcggtgcccccccatttgtctcaccccgaagcaccgacaatccatgcagcgagttgttactcctag

SEQ ID NO: 114065 - DNA, 99 bp, Artificial Sequence
  derived and/or modified sequence
atgcttagggggaccatgactgcgtggagaggtatgcgccccgaagtgacccttgcctgtctcctcctcgctactgcaggctgcttcgcagacctgtag

SEQ ID NO: 114066 - DNA, 69 bp, Artificial Sequence
  derived and/or modified sequence
atgctgcggggcaccatgacagcctggaggggcatgaggcctgaggtgaccctggcctgcctgctgtag

SEQ ID NO: 114067 - DNA, 258 bp, Artificial Sequence
  derived and/or modified sequence
atgctgcggggcaccatgacagcctggaggggcatgaggcctgaggtgaccctggcctgcctgctgctggccacagctggctgctttgctgacctgaatgaggtgccccaggtgacagtgcagcctgccagcacagtgcagaagccaggcggcaccgtcatcctgggctgtgtggtggagccccccaggatgaatgtgacctggaggctgaatggcaaggagctgaatggaagtgatgatgccctgggcgtgctgtag

SEQ ID NO: 114068 - DNA, 474 bp, Artificial Sequence
  derived and/or modified sequence
atgctgcggggcaccatgacagcctggaggggcatgaggcctgaggtgaccctggcctgcctgctgctggccacagctggctgctttgctgacctgaatgaggtgccccaggtgacagtgcagcctgccagcacagtgcagaagccaggcggcaccgtcatcctgggctgtgtggtggagccccccaggatgaatgtgacctggaggctgaatggcaaggagctgaatggaagtgatgatgccctgggcgtgctgatcacccacggcaccctggtgatcacagccctgaacaaccacacagtgggccgctaccagtgtgtggccaggatgcctgctggagctgtggcctctgtgcctgccaccgtgaccctggccagcgagagcgcccccctgcccccctgccacggggctgtgcccccccacctgagccaccctgaggcccccaccatccacgccgccagctgctacagctag

SEQ ID NO: 114069 - DNA, 99 bp, Artificial Sequence
  derived and/or modified sequence
atgctgcggggcaccatgacagcctggaggggcatgaggcctgaggtgaccctggcctgcctgctgctggccacagctggctgctttgctgacctgtag

SEQ ID NO: 114070 - DNA, 69 bp, Artificial Sequence
  derived and/or modified sequence
atgctgcggggcaccatgaccgcctggcggggcatgcggcccgaggtcactctggcgtgcctcctatag

SEQ ID NO: 114071 - DNA, 258 bp, Artificial Sequence
  derived and/or modified sequence
atgctgcggggcaccatgaccgcctggcggggcatgcggcccgaggtaacattggcttgcctgcttctggctacggccggatgcttcgccgacctgaatgaagtcccccaggtgacagtgcagcccgccagcacagtgcaaaagcccgggggaaccgttatcttggggtgtgtggtggagcctccccgcatgaacgtgacatggagactcaatgggaaggagctaaatggatccgacgatgctcttggcgtgttgtag

SEQ ID NO: 114072 - DNA, 474 bp, Artificial Sequence
  derived and/or modified sequence
atgctgcggggcaccatgaccgcctggcggggcatgcggcccgaggtcacactggcatgcctgctgctcgctaccgcaggctgttttgcggatctgaacgaagtgccacaggtgacagtgcagcccgcctccactgtccagaagcctgggggcacagtgatcctcggatgtgttgttgagccgccccgcatgaatgtcacctggaggcttaacggaaaagagctgaatggttcagatgacgcgctcggcgtgttaatcacgcatgggacgctggtgatcactgccctcaacaatcacaccgtgggcaggtatcagtgcgtagcccgaatgccagctggcgctgtagccagcgtcccagccactgtgacccttgccagcgagtccgcccccctgcccccttgtcacggcgcagtgcctcctcacctgtctcatcccgaagcccccaccattcacgctgctagctgttactcttag

SEQ ID NO: 114073 - DNA, 474 bp, Artificial Sequence
  derived and/or modified sequence
atgctgcggggcaccatgaccgcctggcggggcatgcggcccgaggtgaccttagcatgcctcctgctcgccaccgccggctgcttcgctgatctaaatgaggtgccacaggtgacagttcagccggcaagcaccgtacaaaagccaggaggcactgtaattcttggctgtgtggtggagccaccgaggatgaatgttacctggcgattgaacggaaaggaactaaatggttcagatgatgcgctgggcgtgctaatcacccatgggacgctggtgatcaccgccttgaacaatcataccgtggggagataccagtgcgttgcccgtatgccagctggagccgttgcctcggtcccagccaccgttacgctggcttccgaaagcgcaccgctgcctccatgccatggagccgtgccaccacacctctcacaccccgaggctcctaccatccatgctgctagctgctactcatag

SEQ ID NO: 114074 - DNA, 99 bp, Artificial Sequence
  derived and/or modified sequence
atgctgcggggcaccatgaccgcctggcggggcatgcggcccgaggtgacacttgcgtgtctgttgcttgctacagcaggatgctttgcagacttgtag

SEQ ID NO: 114075 - DNA, 69 bp, Artificial Sequence
  derived and/or modified sequence
atgctgcgcggaaccatgaccgcgtggcgtgggatgagacccgaagtaacactggcatgtctgctctag

SEQ ID NO: 114076 - DNA, 258 bp, Artificial Sequence
  derived and/or modified sequence
atgctcaggggtacaatgaccgcttggaggggcatgagacccgaagtgactctggcgtgtctgctccttgctaccgccggatgctttgcagacttgaacgaagtgccccaggtgactgtgcaaccagcttcaaccgtccagaagcccggtggaactgtcattctggggtgcgtcgtggaacctcctcgtatgaacgttacttggagactgaatgggaaggaacttaacggatctgatgacgcacttggtgttctctag

SEQ ID NO: 114077 - DNA, 474 bp, Artificial Sequence
  derived and/or modified sequence
atgcttagagggacgatgactgcatggcgagggatgcgcccagaagtgaccttggcatgcctattgctcgccaccgccggttgtttcgctgatcttaacgaagtgccacaagtgacggtgcaacccgctagtaccgtgcaaaaacccggtggcacagtaattctggggtgtgtggttgagccgccaagaatgaacgtcacgtggcgactgaatgggaaagagcttaatggtagtgacgatgctttgggggttctgatcacccacggcacactggtaattacagctctcaataatcacaccgtaggaagatatcagtgtgttgccaggatgcctgccggtgctgtcgcgagtgtgccggctactgtgaccctggcaagcgagtccgcccctctgcccccatgtcacggcgcagtacctccgcatttatcccacccagaggcgcctactatccacgccgcttcctgttattcttag

SEQ ID NO: 114078 - DNA, 474 bp, Artificial Sequence
  derived and/or modified sequence
atgctgcggggaacaatgacagcatggcgtggcatgagaccagaggtgactctggcgtgcctattgctggcgaccgccggttgtttcgctgacctgaacgaggtgccgcaggtgactgttcagcctgcaagcaccgtacagaagccgggtgggaccgtgatcttggggtgtgtggtggagccccctcggatgaacgttacatggaggctgaacggcaaagaactgaacggctcggacgatgcactcggcgtactgattacgcacggcacgctggttatcacagccttgaacaaccacacggttggtaggtatcaatgcgtggctcgcatgcccgctggggctgtcgcgtctgtacccgcaacagtcaccctagcctcagagtctgctccattaccgccttgccacggagctgtgcccccacacctgagtcacccggaagccccaactatccatgctgccagctgttacagctag

SEQ ID NO: 114079 - DNA, 99 bp, Artificial Sequence
  derived and/or modified sequence
atgctgagagggactatgactgcttggagaggcatgaggccagaggtgaccttggcttgcctactgttggcaaccgcgggatgttttgctgacctgtag

SEQ ID NO: 114080 - DNA, 582 bp, Artificial Sequence
  derived and/or modified sequence
aaccgaccgagggggtcgggggaggctgcgttaaggcttccctgagattggtttccttatcattttctccaccgccgctgtcccattttctgatgagtttgcttttaatgatttatccaacagtttgtcttgcagaagaagaagaccattgagagtttcagaacaagcttcctggaacccatgacccatgaagtcttgtcgacatttataccgtctgagggtagcagctcgaaagtagaagaagtggagtgttgccagggacggcagtatctctttgtgtgaccctggcggcttatgggacgttggcttcagacctttgtgatacaccatgctgcgtgggacgatgacggcgtggagaggaatgaggcctgaggtcacactggcttgcctcctcctagccacagcaggctgctttgctgacttgaacgaggtccctcaggtcaccgtccagcctgcgtccaccgtccagaagcccggaggcactgtgatcttgggctgcgtggtggaacctccaaggatgaatgtaacctggcgcctgaatggaaaggagctgaatggctcggatgatgctctgggtgtcct

SEQ ID NO: 114081 - DNA, 1286 bp, Artificial Sequence
  derived and/or modified sequence
ttagagatagtttttctcatcctcaagtattgggagtccaactttgagtggaatctggactaaacttcagagtgttgccagggacggcagtatctctttgtgtgaccctggcggcttatgggacgttggcttcagacctttgtgatacaccatgctgcgtgggacgatgacggcgtggagaggaatgaggcctgaggtcacactggcttgcctcctcctagccacagcaggctgctttgctgacttgaacgaggtccctcaggtcaccgtccagcctgcgtccaccgtccagaagcccggaggcactgtgatcttgggctgcgtggtggaacctccaaggatgaatgtaacctggcgcctgaatggaaaggagctgaatggctcggatgatgctctgggtgtcctcatcacccacgggaccctcgtcatcactgcccttaacaaccacactgtgggacggtaccagtgtgtggcccggatgcctgcgggggctgtggccagcgtgccagccactgtgacactagccagtgagtctgctcctttgcctccctgccatggtgcggtccctcctcatctctcccaccctgaagcccccaccattcatgctgcctcttgttactcttagcataaaatgggccttaactgcagaaatgtcaaatcagaacagtagctgcctagtaatgcccagtgatgggggacccttgtgcccttggaaaacctcactccaagtagaggctgtatctggagtgagtgtctacagagaggggaattggtcagtgcatggcagaacttgacatggcagaactgttccgtgggccccagagcagggccgtgccgtgccttcctacttggtcatcctgtggctgtaggtgcactgtcccaactgctcacacaccttccagtcccctccctccattctcaccacagttacagtcggagcagggagagacaggacaccaagagacatgggcagggccacgtgtagtctggacagagcccacccagcccagacttggcctcctgtctctctgtgaggggcaagcatagtccgaaggcctggattataaatattagaacataatgaaaaggaaactgtgtggcaaagggataaagggatacagagaaaagaaacaaggaagagatgaggtgacagtttggaccaaggaaaatgccaagagaagacttcacactaccttttttttttctggttttgccattcttttattcatgttgttacactcagtataggatagtttattaaaatcattatgtctgtagacattcta

SEQ ID NO: 114082 - DNA, 2173 bp, Artificial Sequence
  derived and/or modified sequence
aaaaagcttcttccatatggagggaccgggtgcgctgggcgcggcgtcccctgcgttgtcctcctgctgccgcccccgcggccgccgctttctgccgcggggaccctgagccccggcccgccggtgtcagccgccgcgcgcgcgcacagacacacacacagagacacacaaacacacacagaaaagacacacacgcgcacacacggcgcgcacaccctcacgcccgccacagccacaacacgcccgcacgcgccctccctctccggcccgcaacttctcggtcctcggctcctttgttgctccagccgcggccgctcgcccgtgttgtgtgtccccggtgtcaccgagcgtgttgtgtgtccgtgcggcgcggcgctgtgtggctccctcgcgcccaccacgctggcccccgggccccggctcgcccttcccaggcgccggctgcagcagagtttcagaacaagcttcctggaacccatgacccatgaagtcttgtcgacatttataccgtctgagggtagcagctcgaaagtagaagaagtggagtgttgccagggacggcagtatctctttgtgtgaccctggcggcttatgggacgttggcttcagacctttgtgatacaccatgctgcgtgggacgatgacggcgtggagaggaatgaggcctgaggtcacactggcttgcctcctcctagccacagcaggctgctttgctgacttgaacgaggtccctcaggtcaccgtccagcctgcgtccaccgtccagaagcccggaggcactgtgatcttgggctgcgtggtggaacctccaaggatgaatgtaacctggcgcctgaatggaaaggagctgaatggctcggatgatgctctgggtgtcctcatcacccacgggaccctcgtcatcactgcccttaacaaccacactgtgggacggtaccagtgtgtggcccggatgcctgcgggggctgtggccagcgtgccagccactgtgacactagccagtgagtctgctcctttgcctccctgccatggtgcggtccctcctcatctctcccaccctgaagcccccaccattcatgctgcctcttgttactcttagcataaaatgggccttaactgcagaaatgtcaaatcagaacagtagctgcctagtaatgcccagtgatgggggacccttgtgcccttggaaaacctcactccaagtagaggctgtatctggagtgagtgtctacagagaggggaattggtcagtgcatggcagaacttgacatggcagaactgttccgtgggccccagagcagggccgtgccgtgccttcctacttggtcatcctgtggctgtaggtgcactgtcccaactgctcacacaccttccagtcccctccctccattctcaccacagttacagtcggagcagggagagacaggacaccaagagacatgggcagggccacgtgtagtctggacagagcccacccagcccagacttggcctcctgtctctctgtgaggggcaagcatagtccgaaggcctggattataaatattagaacataatgaaaaggaaactgtgtggcaaagggataaagggatacagagaaaagaaacaaggaagagatgaggtgacagtttggaccaaggaaaatgccaagagaagacttcacactaccttttttttttctggttttgccattcttttattcatgttgttacactcagtataggatagtttattaaaatcattatgtctgtagacattctatttgtgatatagaaattgtgttatttctgacctctattttttcctattatgtgacaaagaacataggtcctcagaccaacatgtggaaaccaagggccaaatggcttctaaggtccctcccaactgaataattctggtaaattccatttccatgtgctcactgacggatggtcctaataaccgctcttatttcttttatgcttgtgaaagtcatagtttttacaaaattacttgagggtgtattataaagattcaacagagcaaagtaaaggccaagtgacttgacatagtcatagctggaagaggagccttaccaagacaggtgtttctagttgccattatacttattctaccttatgaggacccattgtatgaggctagatggaagtgagtaaacagacgtcctacctttg

SEQ ID NO: 114083 - protein, 127 aa, Artificial Sequence
  derived and/or modified sequence
MQQRGLAIVALAVCAALHASEAILPIASSCCTEVSHHISRRLLERVNMCRIQRADGDCDLAAVILHVKRRRICVSPHNHTVKQWMKVQAAKKNGKGNVCHRKKHHGKRNSNRAHQGKHETYGHKTPY

SEQ ID NO: 114084 - protein, 80 aa, Artificial Sequence
  derived and/or modified sequence
MCRIQRADGDCDLAAVILHVKRRRICVSPHNHTVKQWMKVQAAKKNGKGNVCHRKKHHGKRNSNRAHQGKHETYGHKTPY

SEQ ID NO: 114085 - protein, 117 aa, Artificial Sequence
  derived and/or modified sequence
MQQRGLAIVALAVCAALHASEAILPIASSCCTEVSHHISRRLLERVNMCRIQRADGDCDLAAVMLECSDMISAHYNLHLPGSNDSPTSAFQVAGITAFMSSAEESVSARTTILLSSG

SEQ ID NO: 114086 - DNA, 384 bp, Artificial Sequence
  derived and/or modified sequence
atgcaacagaggggcctggctattgtggcgctcgccgtatgcgccgcactccatgcatccgaggctatccttccgattgcaagctcgtgttgtacggaggtgagccaccacatctcccggaggttactggagcgcgtaaatatgtgcagaatccaacgagcggacggagattgcgatctggccgccgtcatactgcacgttaagcgacgtagaatttgtgtgagtccccataaccacaccgtgaagcaatggatgaaggtgcaggccgctaagaaaaacggaaaaggcaacgtgtgccatcgcaagaagcaccatggaaagagaaattcgaaccgtgcacaccagggaaaacatgaaacatacggacacaaaacaccatattag

SEQ ID NO: 114087 - DNA, 384 bp, Artificial Sequence
  derived and/or modified sequence
atgcaacagaggggcctagcgatcgtcgcactggcagtctgtgccgccctccacgcttctgaagccatcctgcctatcgcctcctcctgttgcacagaggtctcacaccatataagcaggagactgctggagcgggtcaatatgtgcaggatccagagagcagacggcgattgtgatctggccgcggtgatcctacacgtcaaacgcagaaggatttgtgtgtcaccccataaccataccgtcaaacaatggatgaaagtgcaggccgcgaaaaaaaacgggaagggcaacgtctgccaccgtaagaagcatcatggaaagaggaacagcaatcgcgcgcaccagggcaagcatgagacttatggccataaaactccttactag

SEQ ID NO: 114088 - DNA, 354 bp, Artificial Sequence
  derived and/or modified sequence
atgcagcagaggggcttggccatagtggccctggcggtgtgcgcagccttgcacgctagtgaggcaatcttacccatcgcctcctcttgctgtacggaagtttcacaccatatctctcggcgcctgctggagagggttaatatgtgtcgcatccagcgtgcggacggagattgcgacctggccgcggtaatgctggagtgttccgacatgataagcgcccattacaacctccacctgcctggtagcaacgattccccaaccagtgcattccaggtcgccggtatcacagcttttatgtcttccgccgaagagtctgtttctgcacgtacaacaatcctgctgtcatccggatag

SEQ ID NO: 114089 - DNA, 384 bp, Artificial Sequence
  derived and/or modified sequence
atgcagcagaggggcctggccatcgtggccctggccgtgtgtgccgccctgcacgccagcgaggccatcctgcccatcgccagcagctgctgcacagaggtgagccaccacatcagccggcggctgctggagcgggtgaacatgtgccgcatccagagagcagatggagactgtgacctggccgccgtcatcctgcacgtgaagagaagacgcatctgtgtgagcccccacaaccacacagtgaagcagtggatgaaggtgcaggccgccaagaagaatggaaaaggaaatgtgtgccacaggaagaagcaccacggcaagaggaacagcaacagagcccaccagggcaagcatgagacctacggccacaagaccccctactag

SEQ ID NO: 114090 - DNA, 354 bp, Artificial Sequence
  derived and/or modified sequence
atgcagcagaggggcctggccatcgtggccctggccgtgtgtgccgccctgcacgccagcgaggccatcctgcccatcgccagcagctgctgcacagaggtgagccaccacatcagccggcggctgctggagcgggtgaacatgtgccgcatccagagagcagatggagactgtgacctggccgctgtgatgctggagtgcagcgacatgatcagcgcccactacaacctgcacctgcccggcagcaatgacagccccaccagcgccttccaggtggccggcatcacagccttcatgagcagcgctgaggagagcgtgtctgcccggaccaccatcctgctgagcagcggctag

SEQ ID NO: 114091 - DNA, 384 bp, Artificial Sequence
  derived and/or modified sequence
atgcagcagcggggcctggccatcgtggccctggccgtgtgcgccgcgttacatgctagcgaagctatcctgcccatcgcttcctcatgttgtacagaagtaagtcatcacatcagcaggcgactgttggagcgggtaaatatgtgtagaatccaaagggcagacggggactgcgaccttgctgccgttatcctgcacgtgaaacgtcggcgaatctgtgtctctccccataatcacacagtcaaacaatggatgaaggtacaggccgccaagaagaacgggaaaggaaacgtctgtcaccgaaagaaacatcacggcaagaggaacagcaatcgggcacaccagggaaaacacgagacgtacgggcacaagacgccatattag

SEQ ID NO: 114092 - DNA, 384 bp, Artificial Sequence
  derived and/or modified sequence
atgcagcagcggggcctggccatcgtggccctggccgtgtgcgccgcactccacgcttcggaggcgattctgccaatcgcgtcgtcctgctgtacagaagtttcccatcacatcagccgccgactactggagcgcgtgaacatgtgccgcatccaaagggctgacggcgactgcgatcttgccgccgtaattctgcacgttaaacggaggagaatttgtgtctcaccccataatcacaccgtaaaacagtggatgaaagtgcaggccgctaaaaaaaatggtaaaggtaatgtgtgccatcgaaagaagcaccatggaaagagaaattctaacagagcccaccagggtaaacatgaaacctatggccacaaaactccgtattag

SEQ ID NO: 114093 - DNA, 354 bp, Artificial Sequence
  derived and/or modified sequence
atgcagcagcggggcctggccatcgtggccctggccgtgtgcgccgcgctgcacgcttctgaggccatcttacctattgccagctcatgctgcacagaggtgtcccaccacatttcccgccgcttgctcgagcgtgttaacatgtgccggattcagcgggctgacggggactgcgatctcgccgcggttatgttggaatgcagtgacatgataagcgctcactacaaccttcatcttcccggctccaatgattccccgacctcagccttccaggtggcgggtatcactgcttttatgagtagcgcagaggagtccgtgtctgctcggaccaccatccttctcagctcaggatag

SEQ ID NO: 114094 - DNA, 384 bp, Artificial Sequence
  derived and/or modified sequence
atgcagcagaggggtctggccatagttgctctggcagtgtgtgctgcactccatgcctcagaggctattctgcctattgcctcgagctgctgtaccgaggtgtctcaccatatttcacggagactcctggaaagagtcaatatgtgtagaattcaaagggccgacggtgactgtgatctggctgctgttattctgcatgtaaaacgacgaaggatatgcgttagcccccacaatcacaccgtgaaacagtggatgaaggtgcaggcagctaaaaaaaatggtaaaggaaacgtgtgtcacagaaaaaaacaccatgggaagaggaatagcaacagggcccatcagggaaagcacgagacctatgggcataagaccccctactag

SEQ ID NO: 114095 - DNA, 384 bp, Artificial Sequence
  derived and/or modified sequence
atgcaacagcgtggtctcgccatcgttgcccttgccgtgtgcgcggcactgcatgcatcggaggcgattctgcctatagcttcaagttgttgtacagaagtgtcacatcatattagccggaggttgctggagagggtgaacatgtgccgtatccagcgcgctgacggagattgcgatctagccgcagtcattctgcacgtgaaacggagaagaatatgtgtgtcaccccacaaccacactgtcaagcagtggatgaaagtgcaggcagccaagaagaatgggaaaggcaatgtgtgccaccggaagaaacaccacggtaaaaggaactcaaaccgcgcacatcagggaaaacacgaaacttatggccacaagacaccttactag

SEQ ID NO: 114096 - DNA, 354 bp, Artificial Sequence
  derived and/or modified sequence
atgcaacaaagggggctggccattgtcgctctggcagtatgcgctgccttgcacgcatccgaggccattctccctatcgcatcttcctgttgcactgaggtgtcacaccatatcagccgacggctgctggaaagagtaaatatgtgccgaattcagcgtgccgatggcgactgcgacctggcagcagtgatgctggaatgttccgatatgatttcagctcattacaacctgcacttgcccggaagtaatgacagtccaaccagcgccttccaggtcgccggaattaccgccttcatgtccagcgccgaggaatccgtatcagcgagaacaacgatactccttagctctggctag

SEQ ID NO: 114097 - DNA, 384 bp, Artificial Sequence
  derived and/or modified sequence
atgcagcaaagaggcttagccattgtggccctcgcagtttgtgctgcactccatgcatccgaagccattctgcccattgccagcagttgctgcacagaggtttcccatcatattagcagacgcctgctcgagcgtgttaacatgtgccgaatccagagagctgacggggattgtgaccttgccgctgtcatactccacgtaaaacgccgccgcatctgtgtttccccacataatcataccgtgaaacagtggatgaaggtgcaggctgctaagaagaacggaaagggcaacgtttgtcacagaaagaagcaccacggaaagaggaatagtaatcgagctcaccagggaaaacatgagacgtacggacacaaaacaccatactag

SEQ ID NO: 114098 - DNA, 384 bp, Artificial Sequence
  derived and/or modified sequence
atgcagcagcggggactagctatagtcgcacttgccgtgtgtgcagccctccatgcttccgaagctatacttcccatagccagtagctgttgcactgaggtctcccaccatatctcaagaaggctgttagagagggtcaatatgtgtcgaattcagagagcagacggggattgtgatctcgccgccgtaattttacacgtaaaacgtcgaagaatctgcgtatcacctcataatcatacagttaagcagtggatgaaagtacaagccgcaaagaagaacggtaaaggcaacgtctgtcatcggaagaaacatcacggcaagaggaattccaaccgggcccatcaggggaaacacgaaacttacggacataagactccttactag

SEQ ID NO: 114099 - DNA, 354 bp, Artificial Sequence
  derived and/or modified sequence
atgcaacagagagggctagcaattgtggctctcgccgtttgcgccgcactacacgcgtccgaagccatcctgccaatcgcctcctcctgttgtacagaagtatctcatcatatctcccgaaggctgcttgagagagtgaatatgtgcagaatccaacgcgccgatggtgactgtgatctcgcggccgtgatgctggaatgtagcgatatgatctccgcccattataatcttcacctcccaggttccaatgactctccgacctccgccttccaggtggccggaattaccgctttcatgagctctgcagaggaatcagtgagcgctcggactaccatcctgcttagtagtggctag

SEQ ID NO: 114100 - DNA, 384 bp, Artificial Sequence
  derived and/or modified sequence
atgcagcagcgcggactcgccatcgtcgctctcgcagtatgtgctgccttacacgctagcgaagcaatcctcccaattgcgtcgtcttgctgtacagaagtttctcaccacatttcgagaagactccttgagagagtgaatatgtgcaggatacagagggccgacggagattgcgatcttgccgcggtgatcctccatgtcaagcgaaggagaatatgcgtttccccccataaccacacagtgaaacagtggatgaaggtccaggcggcaaagaagaacgggaaaggtaatgtgtgccatagaaagaagcaccacggaaagaggaatagtaatcgagctcaccagggaaaacatgagacgtacggacacaaaacaccatactag

SEQ ID NO: 114101 - DNA, 384 bp, Artificial Sequence
  derived and/or modified sequence
atgcagcagcggggactagctatagtcgcacttgccgtgtgtgcagccctccatgcttccgaagctatacttcccatagccagtagctgttgcactgaggtctcccaccatatctcaagaaggctgttagagagggtcaatatgtgtcgaattcagagagcagacggggattgtgatctcgccgccgtaattttacacgtaaaacgtcgaagaatctgcgtatcacctcataatcatacagttaagcagtggatgaaagtacaagccgcaaagaagaacggtaaaggcaacgtctgtcatagaaaaaagcaccatggcaaaagaaactcaaacagagcccatcaaggaaagcacgagacatacggccacaagaccccttactag

SEQ ID NO: 114102 - DNA, 354 bp, Artificial Sequence
  derived and/or modified sequence
atgcaacagagagggctagcaattgtggctctcgccgtttgcgccgcactacacgcgtccgaagccatcctgccaatcgcctcctcctgttgtacagaagtatctcatcatatctcccgaaggctgcttgagagagtgaatatgtgcagaatccaacgcgccgatggtgactgtgatctcgcggccgtgatgctggaatgtagcgatatgatctccgcccattataatcttcacctcccaggttccaatgactctccgacctccgccttccaggtggccggaattaccgctttcatgagctctgccgaagaatccgtttcagctcgaaccaccatactcctctcttctgggtag

SEQ ID NO: 114103 - DNA, 3126 bp, Artificial Sequence
  derived and/or modified sequence
aggacacctttagcctcatttcctgatcgaacagcctcacttgtgttgctgtcagtgccagtagggcaggcaggaatgcagcagagaggactcgccatcgtggccttggctgtctgtgcggccctacatgcctcagaagccatacttcccattgcctccagctgttgcacggaggtttcacatcatatttccagaaggctcctggaaagagtgaatatgtgtcgcatccagagagctgatggggattgtgacttggctgctgtcatccttcatgtcaagcgcagaagaatctgtgtcagcccgcacaaccatactgttaagcagtggatgaaagtgcaagctgccaagaaaaatggtaaaggaaatgtttgccacaggaagaaacaccatggcaagaggaacagtaacagggcacatcaggggaaacacgaaacatacggccataaaactccttattagagagtctacagataaatctacagagacaattcctcaagtggacttggccatgattggttgtaagtttatcatctgaattctccttattgtagacaacagaacaaaacaaaatattggtttttaaaaaatgaacaattgtgcggtatgcaaatgtagccaataatatactcaactggaaaatgaaatgaaaagataatactggctgggtatggtggttcacaccttttatcccagcacttcgggaggctgaggcaggaggatcacttgagaccaggagtttgagaccagcctgggcaacatagcaagacctcatttctacaaacaaaaaaaaaattggcccggcatggtagtacttgcctataatcccagccacatgggaggctgaggtgggaggatcacttgagtctgggagagtttgaggttgcagtgagcagcctgggtgacagaatgagaccctgtctctaaaaataataataataatgatagtgtatatcttcatataatattttaagaggagcatatagatataacttctcccaactttttaattatagttttccaaacttacagagaagttaaaagaatggtacaatgaacatctatatatctttcaccacaatattaatcattgttaatattgtgtcacatttgctttctctctcctctctttgtatgtgtttctatataaaatattataacttttaaaatatatcttgttttgctaaaccatttgaaaataagttgcaaaaatcatgacacttcacccctagtttctttttggtgttataacttgacataccctaaaataaagacatttttctacataatcaccttatcagttttatacctaaaaaattaataatttcatctaatatattccatattcaaattttcccaactatttagagagcattttatgtagtttttttttcactccagtaatcaatcaaggttgacatacatattgcaaataattgttatttttctttaatatctttcaatctaagaaagttcctctgtcttttttttttaatttttaaaattattttgttgagggagggtcttgctgtgtcttccaggctggagtgcagtggcacaattttgattttggctcactgaagcctcaacttctagggctcaagcaatcctcccacctcagcctcccgagtatctgggatcaaggtgcatacccaccacacctggctaattttgtttattttttgtagagacagggtctcactatgttgcccaggttgatctcaaactcctgggctcaagcgatcctcccaccttagcctcccaaagtactgggattataggtgtgagccacagtgcctggcctaattattttcttgtgatcaaattcaggtttaatgtttttggttaagaatttcctacgtgaattcgtgtacttattttgtcatttagagttcataaatattagggtttattttctaaatagaatagtttaaactaaatataacttcaaaacgtctagtttgagtagctaccgttgtttggattgaaattttctgatactgaaaagaacaaaaagcctgcctttctgcccagaaccttttgcctcccccagtcagttcttggagcagcactagttaggggcccagagttcggccttctgtgtggtgattttacgctctgcctaaacaaggagcctacatcttttagctcctattccacccttctcacacgtttttgttgttgtttggttgtttttttttgagacagagtctcactctgttgcccaggctggagtgcagtggcacaatctcggctcattgcaacctccgcctcccgcgttcaagtgattctcttgcctcagcctcccaagtaactgatattacaggcgcccagccaccacaccccgctgatttttgtatttttagtagagacggggttttcccacgttggccgggctggtctcaaactcttgacctcaagtgaaccacccgcctgtgcctcccaaagtgctggaattaccagcgtgagccaccatgccgggctcacacgtttgagttgataccattgtgccattcctcttttggcctcttttttgtccatagaggcttcaagatagataggtaagagcccagtagtgttcataagaagccaatagagagcaggagccactttatcaggtggcaggtgtcctgggcctccctgctggctagtcccaagcggtggtgttgccaggatgtcttggaggtgataatgggacacacagaggcactgagtctccataggttaaaatgccaccaaaactggcctttgcctaatatccctcattgactatttagcatttaatttatttattttcctgacatttctgcaagctttgtatttatatttccactttatagatgaggaaatttgaggctcttagaggtaaaatgacttgcccaggtcacacaggaagtggcagagacaagctttttaaataagaaaaaattaataaaatataatatgagagtaacttaaaatattaataaaccacaattttaaattaattaaccgtgataaccaacattaataaaagttaagataccaaaacactggtgtctaattctttcaactaacaacttgaattattttccattttaaattaattaaccgtgataaccaacattaataaaagttaagataccaaaa

SEQ ID NO: 114104 - DNA, 1342 bp, Artificial Sequence
  derived and/or modified sequence
catttcctgatcgaacagcctcacttgtgttgctgtcagtgccagtagggcaggcaggaatgcagcagagaggactcgccatcgtggccttggctgtctgtgcggccctacatgcctcagaagccatacttcccattgcctccagctgttgcacggaggtttcacatcatatttccagaaggctcctggaaagagtgaatatgtgtcgcatccagagagctgatggggattgtgacttggctgctgtcatccttcatgtcaagcgcagaagaatctgtgtcagcccgcacaaccatactgttaagcagtggatgaaagtgcaagctgccaagaaaaatggtaaaggaaatgtttgccacaggaagaaacaccatggcaagaggaacagtaacagggcacatcaggggaaacacgaaacatacggccataaaactccttattagagagtctacagataaatctacagagacaattcctcaagtggacttggccatgattggttagtctcactctatcacacaggctggagggcagtggcaggatctcagttcaccccaacctttgcctcacgggttcaagggattctcgtgcctcagccttccaagtagctgggattacaggtgtgcgccagtacgcctggctagttttagtattttttgttacagacggggtttcaccatgttggctgggctggtctcaaacttctgatctcaagtgatccatctgccttggcctcccaaagtgctgggattacaggcatgagccactgcacctggcctacgtattaggctttatgtaagatgtacatagtactccatactcctttccttttcctcctattgaaactgttcctataaactttataaaattaatcagagaagaagagagggtgagaaacataaataatccaagcttgcaccacattcagcattaatcactaggtcactttgcttgctgaccccttcctcatagttgtttggctattgcttcagaattatgtggagtctgttacaagattatagttccccttaactgctctatagataacagcttgaacattatgaaatgctaagttttcccttcgagacattctttcaggtcctgcatactgatgaaactactgatgtcagctggtctgaaggaccctaccagaagctaaatcatcaaagaatgcaatttccatatcctaatgattcaatctcccttaccctgaccaatcagtggcccaaattttccagccccttgcctcccagaaccccagcccagaactcttcagagatttaagaatctcctcctacctcctgactcagcaccatgtaatcattaaactctctgctgcaaa

SEQ ID NO: 114105 - DNA, 1518 bp, Artificial Sequence
  derived and/or modified sequence
cccgcggtaggctaggcctggtcctgggcgccccagccggctcccccgggtccaggcgtgcgcctgcgggcgacgtgcgcgtctgggcatccggccgtcacgcgctgcctgggactccaccctacctacccttcgcgtagtacttgttatactttggcagcttcttcacgtcggtcctctccgcgcgcgggtaggaaccgtccacggccttaaagaagcctcctcaccagccatacttcccattgcctccagctgttgcacggaggtttcacatcatatttccagaaggctcctggaaagagtgaatatgtgtcgcatccagagagctgatggggattgtgacttggctgctgtcatccttcatgtcaagcgcagaagaatctgtgtcagcccgcacaaccatactgttaagcagtggatgaaagtgcaagctgccaagaaaaatggtaaaggaaatgtttgccacaggaagaaacaccatggcaagaggaacagtaacagggcacatcaggggaaacacgaaacatacggccataaaactccttattagagagtctacagataaatctacagagacaattcctcaagtggacttggccatgattggttgtaagtttatcatctgaattctccttattgtagacaacagaacaaaacaaaatattggtttttaaaaaatgaacaattgtgcggtatgcaaatgtagccaataatatactcaactggaaaatgaaatgaaaagataatactggctgggtatggtggttcacaccttttatcccagcacttcgggaggctgaggcaggaggatcacttgagaccaggagtttgagaccagcctgggcaacatagcaagacctcatttctacaaacaaaaaaaaaattggcccggcatggtagtacttgcctataatcccagccacatgggaggctgaggtgggaggatcacttgagtctgggagagtttgaggttgcagtgagcagcctgggtgacagaatgagaccctgtctctaaaaataataataataatgatagtgtatatcttcatataatattttaagaggagcatatagatataacttctcccaactttttaattatagttttccaaacttacagagaagttaaaagaatggtacaatgaacatctatatatctttcaccacaatattaatcattgttaatattgtgtcacatttgctttctctctcctctctttgtatgtgtttctatataaaatattataacttttaaaatatatcttgttttgctaaaccatttgaaaataagttgcaaaaatcatgacacttcacccctagtttctttttggtgttataacttgacataccctaaaataaagacatttttctacataatcaccttatcagttttatacctaaaaaattaataatttcatctaatatattccatattcaaattttcccaactatttagagagcattttatgtagtttttttttcactccagtaatcaatcaaggttgacatacatattgc

SEQ ID NO: 114106 - DNA, 354 bp, Artificial Sequence
  derived and/or modified sequence
atgcagcagagaggactcgccatcgtggccttggctgtctgtgcggccctacatgcctcagaagccatacttcccattgcctccagctgttgcacggaggtttcacatcatatttccagaaggctcctggaaagagtgaatatgtgtcgcatccagagagctgatggggattgtgacttggctgctgtcatgctggagtgcagtgacatgatctcagctcactacaacctccacctacctggttcaaacgattctcctacctcagccttccaagtagctgggattacagccttcatgtcaagcgcagaagaatctgtgtcagcccgcacaaccatactgttaagcagtggatga

SEQ ID NO: 114107 - DNA, 384 bp, Artificial Sequence
  derived and/or modified sequence
atgcagcagagaggcctggccatcgtggccctggccgtgtgcgccgccctgcacgccagcgaggccatcctgcccatcgccagcagctgctgcaccgaggtgagccaccacatcagcagaagactgctggagagagtgaacatgtgcagaatccagagagccgacggcgactgcgacctggccgccgtgatcctgcacgtgaagagaagaagaatctgcgtgagcccccacaaccacaccgtgaagcagtggatgaaggtgcaggccgccaagaagaacggcaagggcaacgtgtgccacagaaagaagcaccacggcaagagaaacagcaacagagcccaccagggcaagcacgagacctacggccacaagaccccctactag

SEQ ID NO: 114108 - DNA, 354 bp, Artificial Sequence
  derived and/or modified sequence
atgcagcagagaggcctggccatcgtggccctggccgtgtgcgccgccctgcacgccagcgaggccatcctgcccatcgccagcagctgctgcaccgaggtgagccaccacatcagcagaagactgctggagagagtgaacatgtgcagaatccagagagccgacggcgactgcgacctggccgccgtgatgctggagtgcagcgacatgatcagcgcccactacaacctgcacctgcccggcagcaacgacagccccaccagcgccttccaggtggccggcatcaccgccttcatgagcagcgccgaggagagcgtgagcgccagaaccaccatcctgctgagcagcggctag

SEQ ID NO: 114109 - DNA, 243 bp, Artificial Sequence
  derived and/or modified sequence
atgtgtcgcatacagcgggccgacggggattgcgacctagctgctgtgatactgcatgtgaaaagaaggagaatttgtgtttccccacacaatcacacggtaaagcagtggatgaaagtccaggccgccaaaaaaaacggaaaaggcaatgtgtgccataggaaaaagcatcacggaaagcgtaattctaatcgagctcatcaggggaaacacgagacctatggacacaagacgccttactag

SEQ ID NO: 114110 - DNA, 243 bp, Artificial Sequence
  derived and/or modified sequence
atgtgccgcatccagagagcagatggagactgtgacctggccgctgtgatcctgcacgtgaagagaagacgcatctgtgtgagcccccacaaccacacagtgaagcagtggatgaaggtgcaggccgccaagaagaatggaaaaggaaatgtgtgccacaggaagaagcaccacggcaagaggaacagcaacagagcccaccagggcaagcatgagacctacggccacaagaccccctactag

SEQ ID NO: 114111 - DNA, 243 bp, Artificial Sequence
  derived and/or modified sequence
atgtgccggatccagcgggccgacggcgactgcgacctggccgccgttatcctgcacgtcaagcggcgaaggatctgcgtttcacctcacaaccataccgtcaagcaatggatgaaagtccaagccgccaaaaaaaacggtaaaggcaatgtgtgtcatcgcaaaaagcatcacgggaaacggaacagtaacagagcccaccaaggcaagcacgagacatacggacataagactccttattag

SEQ ID NO: 114112 - DNA, 243 bp, Artificial Sequence
  derived and/or modified sequence
atgtgccggatccagcgcgctgatggcgactgcgatctggcagctgtgattctgcacgttaaaaggcggcgaatttgtgtcagcccccacaatcacactgtaaaacagtggatgaaggtgcaggccgcaaagaaaaacggaaaagggaacgtgtgtcacaggaagaagcaccatgggaagcggaactccaatagagctcaccagggaaagcacgagacctacggacacaagaccccctactag

SEQ ID NO: 114113 - DNA, 243 bp, Artificial Sequence
  derived and/or modified sequence
atgtgtagaatacagcgcgccgacggagattgtgacctggccgccgtcatcctgcacgtcaagcgaagacggatttgcgtgagtccacataatcacacagttaaacaatggatgaaagtgcaggcagcgaaaaaaaatggaaaggggaacgtgtgccataggaaaaaacaccacggcaaacgcaattctaaccgtgcacaccaaggaaaacatgaaacatacggccacaagacaccatactag

SEQ ID NO: 114114 - DNA, 243 bp, Artificial Sequence
  derived and/or modified sequence
atgtgcagaatccagagagccgacggcgactgcgacctggccgccgtgatcctgcacgtgaagagaagaagaatctgcgtgagcccccacaaccacaccgtgaagcagtggatgaaggtgcaggccgccaagaagaacggcaagggcaacgtgtgccacagaaagaagcaccacggcaagagaaacagcaacagagcccaccagggcaagcacgagacctacggccacaagaccccctactag

SEQ ID NO: 114115 - RNA, 243 nt, Artificial Sequence
  derived and/or modified sequence
auguguagaauacagcgcgccgacggagauugugaccuggccgccgucauccugcacgucaagcgaagacggauuugcgugaguccacauaaucacacaguuaaacaauggaugaaagugcaggcagcgaaaaaaaauggaaaggggaacgugugccauaggaaaaaacaccacggcaaacgcaauucuaaccgugcacaccaaggaaaacaugaaacauacggccacaagacaccauacuag

SEQ ID NO: 114116 - protein, 511 aa, Artificial Sequence
  derived and/or modified sequence
MVLKKFLKEIQSILPGISAKLTWTSEEGSYSQDMTGVTPFQMIFEVDEKPRTLMTDCLVIKHFLRKIIMVHPKVRFHFSVKVNGILSTEIFGVENEPTLNLGNGIALLVDSQHYVSRPNFGTIESHCSRIHPVLGHPVMLFIPEDVAGMDLLGELILTPAAALCPSPKVSSNQLNRISSVSIFLYGPLGLPLILSTWEQPMTTFFKDTSSLVDWKKYHLCMIPNLDLNLDRDLVLPDVSYQVESSEEDQSQTMDPQGQTLLLFLFVDFHSAFPVQQMEIWGVYTLLTTHLNAILVESHSVVQGSIQFTVDKVLEQHHQAAKAQQKLQASLSVAVNSIMSILTGSTRSSFRKMCLQTLQAADTQEFRTKLHKVFREITQHQFLHHCSCEVKQLTLEKKDSAQGTEDAPDNSSLELLADTSGQAENKRLKRGSPRIEEMRALRSARAPSPSEAAPRRPEATAAPLTPRGREHREAHGRALAPGRASLGSRLEDVLWLQEVSNLSEWLSPSPGP

SEQ ID NO: 114117 - DNA, 1786 bp, Artificial Sequence
  derived and/or modified sequence
actggcggagttccaagcccgggctgaggagggggcggcggcggcggcggcggcggcgggcgggtacccttcgactgggcgttgccgctgttccctgcgcggcatggaggggacggccgtggccgtgttcgagttgcttctgcaggaagcctttttggtggcatggtcctcaagaagttcctaaaagaaatacagtccatactgcccggaatctctgcaaagctgacttggacttcagaggaaggcagctattctcaggatatgacaggggtaacacccttccagatgatttttgaggttgatgaaaagcccagaaccttgatgacagattgtctggttataaagcattttttacgtaaaatcatcatggtgcaccctaaggtcagatttcatttcagtgtaaaggtaaatggaatcctctccacagagatctttggggtggagaatgaacccactttgaaccttgggaatggaattgctcttttggtcgactcccagcattatgtgagtagaccaaattttggtacaattgaatcacactgcagcagaattcaccctgtgctaggacatccagtaatgcttttcatccctgaagacgtggctggcatggacttgttgggagaactgatactgactccagcagctgcactgtgccccagcccaaaggtttcttccaaccagcttaacaggatttcttcagtttccatatttctatatggacctttgggtctgcctctgatattgtcaacttgggagcagccgatgactactttcttcaaagatacctcttctttagttgactggaaaaaataccatttgtgtatgatacccaatttggatctcaatttggatagagatttggtgcttccagatgtgagttatcaggtggaatccagtgaggaggatcagtctcagactatggatcctcaaggacaaactctgctgctttttctctttgtggatttccacagtgcatttccagtccagcaaatggaaatctggggagtctatactttgctcacaactcatctcaatgccatccttgtggagagccacagtgtagtgcaaggttccatccaattcactgtggacaaggtcttggagcaacatcaccaggctgccaaggctcagcagaaactacaggcctcactctcagtggctgtgaactccatcatgagtattctgactggaagcactaggagcagcttccgaaagatgtgtctccagacccttcaagcagctgacacacaagagttcaggaccaaactgcacaaagtatttcgtgagatcacccaacaccaatttcttcaccactgctcatgtgaggtgaagcagctaaccctagaaaaaaaggactcagcccagggcactgaggacgcacctgataacagcagcctggagctcctagcagataccagcgggcaagcagaaaacaagaggctcaagaggggcagcccccgcatagaggagatgcgagctctgcgctctgccagggccccgagcccgtcagaggccgccccgcgccgcccggaagccaccgcggcccccctcactcctagaggaagggagcaccgcgaggctcacggcagggccctggcgccgggcagggcgagcctcggaagccgcctggaggacgtgctgtggctgcaggaggtctccaacctgtcagagtggctgagtcccagccctgggccctgagccgggtccccttccgcaagcgcccaccgatccggaggctgcgggcagccgttatcccgtggtttaataaagctgccgcgcgctcacc

SEQ ID NO: 114118 - DNA, 1536 bp, Artificial Sequence
  derived and/or modified sequence
atggtgctgaagaagttcctgaaggagatccagagcatcctgcccggcatcagcgccaagctgacctggaccagcgaggagggcagctacagccaggacatgaccggcgtgacccccttccagatgatcttcgaggtggacgagaagcccagaaccctgatgaccgactgcctggtgatcaagcacttcctgagaaagatcatcatggtgcaccccaaggtgagattccacttcagcgtgaaggtgaacggcatcctgagcaccgagatcttcggcgtggagaacgagcccaccctgaacctgggcaacggcatcgccctgctggtggacagccagcactacgtgagcagacccaacttcggcaccatcgagagccactgcagcagaatccaccccgtgctgggccaccccgtgatgctgttcatccccgaggacgtggccggcatggacctgctgggcgagctgatcctgacccccgccgccgccctgtgccccagccccaaggtgagcagcaaccagctgaacagaatcagcagcgtgagcatcttcctgtacggccccctgggcctgcccctgatcctgagcacctgggagcagcccatgaccaccttcttcaaggacaccagcagcctggtggactggaagaagtaccacctgtgcatgatccccaacctggacctgaacctggacagagacctggtgctgcccgacgtgagctaccaggtggagagcagcgaggaggaccagagccagaccatggacccccagggccagaccctgctgctgttcctgttcgtggacttccacagcgccttccccgtgcagcagatggagatctggggcgtgtacaccctgctgaccacccacctgaacgccatcctggtggagagccacagcgtggtgcagggcagcatccagttcaccgtggacaaggtgctggagcagcaccaccaggccgccaaggcccagcagaagctgcaggccagcctgagcgtggccgtgaacagcatcatgagcatcctgaccggcagcaccagaagcagcttcagaaagatgtgcctgcagaccctgcaggccgccgacacccaggagttcagaaccaagctgcacaaggtgttcagagagatcacccagcaccagttcctgcaccactgcagctgcgaggtgaagcagctgaccctggagaagaaggacagcgcccagggcaccgaggacgcccccgacaacagcagcctggagctgctggccgacaccagcggccaggccgagaacaagagactgaagagaggcagccccagaatcgaggagatgagagccctgagaagcgccagagcccccagccccagcgaggccgcccccagaagacccgaggccaccgccgcccccctgacccccagaggcagagagcacagagaggcccacggcagagccctggcccccggcagagccagcctgggcagcagactggaggacgtgctgtggctgcaggaggtgagcaacctgagcgagtggctgagccccagccccggcccctag

SEQ ID NO: 114119 - DNA, 1536 bp, Artificial Sequence
  derived and/or modified sequence
atggtactcaaaaagttccttaaagagatccagtctatcctccccgggatttcagccaaactgacctggacctcagaagaaggaagctacagccaggatatgactggggtaacccccttccagatgatctttgaagtggacgagaaacccagaacattgatgaccgactgcctggtaatcaagcactttctgaggaagattattatggtacacccgaaagtgaggtttcacttcagtgtgaaagttaacgggattctctcaaccgaaatctttggagtcgagaatgagccgaccctgaacttgggcaatggaatagcactcctcgtggattctcagcactacgtttccagacccaacttcgggaccatcgagagtcattgctcccggatccatcccgtcctgggacatccagtgatgcttttcatacctgaggacgtggcaggtatggatctgctgggagagcttatcctaacgccagcagcagccctttgcccatcccctaaggtgagcagcaaccagctgaaccgaatttcctcggtctcaatatttctgtatggcccactgggccttccattgattctctcaacctgggagcaaccaatgaccaccttcttcaaagacactagttcacttgtcgactggaagaaataccatttatgtatgatccccaacctggacctcaatcttgaccgggacctggtccttcccgatgtgagttaccaggtcgaaagctcggaggaggaccagtcacagaccatggatccacaaggacaaacccttcttctgttcttattcgtcgactttcatagtgcattcccagtgcagcagatggagatctggggcgtctataccctgctaaccacccaccttaacgctatcttagtggagtcccattcagtcgtacaagggtctatccaattcacagtcgataaagtgttggaacaacaccaccaggcagcaaaagctcagcagaagctgcaggcaagcctgagtgttgcagtgaattccatcatgagtattctgaccggcagtacccgctcatcatttcgcaaaatgtgcctgcaaaccctccaggccgcagacactcaggagttccgtactaaacttcacaaagtgttccgggagatcacccagcaccaattcctgcatcactgcagttgcgaggtaaaacagttaaccctggagaaaaaggattcagcacaaggcaccgaggacgcccctgacaattcatccttagaactccttgctgatacttcgggccaggccgagaacaagaggctgaagcgcggctcgcccagaatcgaggagatgcgggcactcagaagtgcgagggctccttccccctctgaagccgctccgcgaaggccagaggctacagccgccccccttacaccaagggggagagagcatcgggaagcccatggtcgtgcacttgccccggggcgggcttctctcgggagtagactcgaggacgtgctttggttacaggaggtgtccaatctgtctgagtggctgtccccctcccccggcccctag

SEQ ID NO: 114120 - DNA, 1536 bp, Artificial Sequence
  derived and/or modified sequence
atggtgctgaagaagttcctgaaggagatccagagcatcctgcccggcatcagcgccaagctgacctggaccagcgaggagggcagctacagccaggacatgactggagtgacccccttccagatgatctttgaggtggatgagaagcccaggaccctgatgacagactgcctggtgatcaagcacttcctgaggaagatcatcatggtgcaccccaaggtgcgcttccacttctctgtgaaggtgaatggcatcctgagcacagagatctttggagtggagaatgagcccaccctgaacctgggcaatggaattgccctgctggtggacagccagcactacgtgtcccggcccaactttggcaccatcgagagccactgcagccgcatccaccctgtgctgggccaccctgtgatgctgttcatcccagaagatgtggccggcatggacctgctgggggagctgatcctgaccccagctgctgccctgtgccccagccccaaggtgagcagcaaccagctgaaccgcatcagctctgtgtccatcttcctgtatggccccctgggcctgcccctcatcctgagcacctgggagcagcccatgaccaccttcttcaaggacaccagcagcctggtggactggaagaagtaccacctgtgcatgatccccaacctggacctgaacctggaccgggacctggtgctgcctgatgtgtcctaccaggtggagagcagcgaggaggaccagagccagaccatggacccccagggccagaccctgctgctcttcctgtttgtggacttccacagcgccttccctgtgcagcagatggagatctggggcgtgtacaccctgctgaccacccacctgaatgccatcctggtggagagccacagcgtggtgcagggcagcatccagttcaccgtggacaaggtgctggagcagcaccaccaggccgccaaggcccagcagaagctgcaggccagcctgtctgtggccgtgaacagcatcatgagcatcctgaccggcagcaccaggagcagcttcaggaagatgtgcctgcagaccctgcaggccgctgacacccaggagttccgcaccaagctgcacaaggtgttccgggagatcacccagcaccagttcctgcaccactgcagctgtgaggtgaagcagctgaccctggagaagaaggacagcgcccagggcacagaagatgccccagacaacagcagcctggagctgctggccgacaccagcggccaggccgagaacaagaggctgaagaggggcagcccccgcatcgaggagatgagggccctgcggagcgcccgggcccccagccccagcgaggccgccccccggcggcctgaggccacagctgcccccctgaccccccggggccgggagcaccgggaggcccacggccgggccctggcccctggccgggccagcctgggcagccggctggaggatgtgctgtggctgcaggaggtgagcaacctgtctgagtggctgagccccagccctggcccctag

SEQ ID NO: 114121 - DNA, 1536 bp, Artificial Sequence
  derived and/or modified sequence
atggtgctgaagaagttcctgaaggagatccagagcatcctgcccggcatcagtgcaaagctcacctggacgtctgaggaggggtcttattcacaggacatgactggcgttacccctttccagatgattttcgaagtcgatgaaaagccaaggacacttatgactgactgcctggtgataaaacacttcctccggaaaattatcatggtgcaccctaaggtcagattccatttctcagtaaaggtcaatggcattttgtctaccgagattttcggtgttgagaatgagcctaccctgaacctggggaacggcattgccctgctagtggatagccagcattacgtgagtcggcctaattttgggacgatcgaatcccactgttcaagaattcatcctgtgttgggccacccagtgatgctttttattcccgaagatgtcgctggtatggatcttttaggggaactcattctgacccccgccgccgctctttgcccgagccccaaagtgtccagcaaccagctcaatcggatcagtagtgtgtctatctttttgtacgggccactgggcctgcctttaattcttagtacctgggagcagccaatgacgactttttttaaagatacatccagcctggtcgattggaagaaatatcacctgtgcatgattccaaatcttgatttaaacctggaccgcgacctcgtcctgcccgacgtgtcgtaccaggtggagtccagcgaggaggatcagagccagaccatggaccctcaggggcaaacccttttgctgtttctctttgtcgacttccattcggcattccctgtgcagcagatggaaatttggggggtctacacacttctcacaacacatttaaacgccatcctggttgagtctcacagcgtcgtccagggatccatccagttcacagtggacaaagtgctggagcagcaccaccaggctgctaaagcacagcagaaacttcaggcctctctgagcgtggctgtcaacagcataatgagtatcctgaccggctcaactcggagtagctttcgcaagatgtgtttgcagaccctacaagcagccgatacacaggagtttagaacaaaactacacaaagtattccgcgagattacacaacatcagtttctgcaccattgctcttgtgaggtcaagcagttgacccttgaaaagaaagacagcgctcagggaacagaggacgctcccgacaactcttccctggagctcctggcggatacatccggccaggcagagaacaagcggctcaaacgaggctcaccacggatagaagagatgagagctctccgtagcgcaagggccccaagccctagcgaggctgcacctcgccgccctgaagctactgccgcacccctgacacccagagggcgcgagcaccgggaggcacatggtagggccctggcgcccggccgggcctcattgggctccaggctggaggacgtgttatggcttcaagaagttagcaacttgagtgagtggctgtcgcctagcccgggaccttag

SEQ ID NO: 114122 - DNA, 1536 bp, Artificial Sequence
  derived and/or modified sequence
atggtcctcaagaagtttctaaaggagatccaaagcatcctccccggaattagcgctaagctgacatggacgtccgaggagggcagctattctcaggatatgaccggtgtgacgccttttcagatgatcttcgaagtagacgagaagcccaggactctgatgacagattgtctcgtcattaagcatttcctgcgaaaaattataatggtgcacccgaaggtgaggtttcatttctccgtaaaggtgaatggaatcctgagtacggaaatttttggcgtggagaacgaacccacgcttaacctgggcaacggcatcgcattattagtggattctcaacactacgtatcgcgccctaactttggtactatcgagtcccattgctctaggattcacccggtactagggcaccctgtcatgttgttcatacccgaagatgtcgccggaatggacctgctcggggaacttattctgacacctgctgctgcgctgtgcccaagccccaaggtgtctagtaatcagcttaatagaatctcttctgtgtcaatatttttgtatggaccgttggggctgccccttatcttgtccacttgggaacagcccatgacgacattcttcaaagacacctctagtctggtggactggaaaaaataccacttatgtatgatccctaacctggacctgaatctggacagagacctagtgcttccagacgtctcatatcaggtggagagctccgaagaagatcaatcccagactatggacccacaggggcagaccctgctgctattcctgttcgtcgacttccactctgccttcccagtccagcaaatggagatctggggtgtgtacacactcctgactacccacttaaatgctattttggtggagtctcactccgtcgtgcaaggcagcatacaattcactgtggataaggtcttagagcagcatcaccaggctgccaaggcccaacaaaagttgcaggcttctctctccgtagcagttaacagcataatgagcatcctgacgggcagtacaaggtcaagcttcagaaaaatgtgccttcagactcttcaagcagctgatacccaagaatttaggactaagctgcacaaagttttccgcgaaattactcagcaccagttcctccatcactgcagctgcgaggttaaacaactgactctggaaaagaaagacagcgcccaaggcacagaagatgcacctgataacagctccctggaactgctcgccgacacttctggacaagccgaaaacaaacgccttaagaggggctcacctaggatcgaggagatgagagccctaaggagcgcccgtgctccttccccctccgaggctgccccacggaggccagaagctacagccgctcctctgactcctcgcggaagggagcacagagaagcccacggcagggccctggccccagggagggcctcacttgggtcccgcctcgaagatgtactttggctacaggaagtgagcaatctaagtgaatggctcagcccttcccctggtccttag

SEQ ID NO: 114123 - protein, 30 aa, Artificial Sequence
  derived and/or modified sequence
ACYCRIPACLAGERRYGTCIYQGRLWAFCC

SEQ ID NO: 114124 - protein, 30 aa, Artificial Sequence
  derived and/or modified sequence
ACYCRIPACIAGERRYGTCIYQGRLWAFCC

SEQ ID NO: 114125 - protein, 30 aa, Artificial Sequence
  derived and/or modified sequence
ACYCRIPACLAGERRYGTCFYLGRVWAFCC

SEQ ID NO: 114126 - protein, 30 aa, Artificial Sequence
  derived and/or modified sequence
ACYCRIPACLAGERRYGTCFYMGRVWAFCC

SEQ ID NO: 114127 - protein, 30 aa, Artificial Sequence
  derived and/or modified sequence
ACYCRIPACLAGERRYGTCFYRRRVWAFCC

SEQ ID NO: 114128 - protein, 30 aa, Artificial Sequence
  derived and/or modified sequence
ACYCRIPACLAGERRYGTCFYLRRVWAFCC

SEQ ID NO: 114129 - protein, 141 aa, Artificial Sequence
  derived and/or modified sequence
VTPAMRTFTVLAAMLLVVALQAQAEPLRARADETAAQEQPGADDQEMAHAFTWDESAALPLSDSARGLRCICRRGVCRFLRHLGSCAFRGTLHRICCRACRIKKNKLRIYFESKKFVFLLYLALHFLFSSKINTLLQDFCL

SEQ ID NO: 114130 - protein, 141 aa, Artificial Sequence
  derived and/or modified sequence
VTPAMRTFTVLAAMLLVVALQAQAEPLRARADETAAQEQPGADDQEMAHAFTWDESAALPLSDSARGLRCICRRGVCRLLRHFGSCAFRGTLHRICCRACRIKKNKLRIYFESKKFLFLLYLALHFLFSSKINTLLQDFCL

SEQ ID NO: 114131 - protein, 140 aa, Artificial Sequence
  derived and/or modified sequence
VTPAMRTFALLTAMLLLVDLAQAEPLQARADEAAAQEQPGADDQEMAHAFTWDESAALPLSDSARGLRCICGRGICRLLRRFGSCAFRGTLHRICCRACRIKKNKLRIYFETKKFLLLLYLVLHFLFSSKINTLLQDFCL

SEQ ID NO: 114132 - protein, 141 aa, Artificial Sequence
  derived and/or modified sequence
VTPAMRTFALLTAMLLLVALAQAEPLQARADEAAAQEQPGADDQEMAHAFTWDESAALPLSDSARGLRCIGGRGICGLLQRRFGSCAFRGTLHRICCRACRIKKNKLRIYSESKKFLLLLYLVLHFLFSSKINTLLQDFSL

SEQ ID NO: 114133 - protein, 29 aa, Artificial Sequence
  derived and/or modified sequence
CYCRIPACIAGERRYGTCIYQGRLWAFCC

SEQ ID NO: 114134 - protein, 94 aa, Artificial Sequence
  derived and/or modified sequence
MRTLAILAAILLVALQAQAEPLQARADEVAAAPEQIAADIPEVVVSLAWDESLAPKHPGSRKNMACYCRIPACIAGERRYGTCIYQGRLWAFCC

SEQ ID NO: 114135 - DNA, 432 bp, Artificial Sequence
  derived and/or modified sequence
gccctctctggtcaccctgcctagctagaggatctgtgaccccagccatgaggaccctcgccatccttgctgccattctcctggtggccctgcaggcccaggctgagccactccaggcaagagctgatgaggttgctgcagccccggagcagattgcagcggacatcccagaagtggttgtttcccttgcatgggacgaaagcttggctccaaagcatccaggctcaaggaaaaacatggcctgctattgcagaataccagcgtgcattgcaggagaacgtcgctatggaacctgcatctaccagggaagactctgggcattctgctgctgagcttgcagaaaaagaaaaatgagctcaaaatttgctttgagagctacagggaattgctattactcctgtaccttctgctcaatttcctttcctcatccca

SEQ ID NO: 114136 - DNA, 491 bp, Artificial Sequence
  derived and/or modified sequence
ccttgctatagaagacctgggacagaggactgctgtctgccctctctggtcaccctgcctagctagaggatctgtgaccccagccatgaggaccctcgccatccttgctgccattctcctggtggccctgcaggcccaggctgagccactccaggcaagagctgatgaggttgctgcagccccggagcagattgcagcggacatcccagaagtggttgtttcccttgcatgggacgaaagcttggctccaaagcatccaggctcaaggaaaaacatggcctgctattgcagaataccagcgtgcattgcaggagaacgtcgctatggaacctgcatctaccagggaagactctgggcattctgctgctgagcttgcagaaaaagaaaaatgagctcaaaatttgctttgagagctacagggaattgctattactcctgtaccttctgctcaatttcctttcctcatcccaaataaatgccttgttacaaga

SEQ ID NO: 114137 - DNA, 485 bp, Artificial Sequence
  derived and/or modified sequence
ctatagaagacctgggacagaggactgctgtctgccctctctggtcaccctgcctagctagaggatctgtgaccccagccatgaggaccctcgccatccttgctgccattctcctggtggccctgcaggcccaggctgagccactccaggcaagagctgatgaggttgctgcagccccggagcagattgcagcggacatcccagaagtggttgtttcccttgcatgggacgaaagcttggctccaaagcatccaggctcaaggaaaaacatggcctgctattgcagaataccagcgtgcattgcaggagaacgtcgctatggaacctgcatctaccagggaagactctgggcattctgctgctgagcttgcagaaaaagaaaaatgagctcaaaatttgctttgagagctacagggaattgctattactcctgtaccttctgctcaatttcctttcctcatcccaaataaatgccttgttacaag

SEQ ID NO: 114138 - protein, 784 aa, Artificial Sequence
  derived and/or modified sequence
MASLDDPGEVREGFLCPLCLKDLQSFYQLHSHYEEEHSGEDRDVKGQIKSLVQKAKKAKDRLLKREGDDRAESGTQGYESFSYGGVDPYMWEPQELGAVRSHLSDFKKHRAARIDHYVVEVNKLIIRLEKLTAFDRTNTESAKIRAIEKSVVPWVNDQDVPFCPDCGNKFSIRNRRHHCRLCGSIMCKKCMELISLPLANKLTSASKESLSTHTSPSQSPNSVHGSRRGSISSMSSVSSVLDEKDDDRIRCCTHCKDTLLKREQQIDEKEHTPDIVKLYEKLRLCMEKVDQKAPEYIRMAASLNAGETTYSLEHASDLRVEVQKVYELIDALSKKILTLGLNQDPPPHPSNLRLQRMIRYSATLFVQEKLLGLMSLPTKEQFEELKKKRKEEMERKRAVERQAALESQRRLEERQSGLASRAANGEVASLRRGPAPLRKAEGWLPLSGGQGQSEDSDPLLQQIHNITSFIRQAKAAGRMDEVRTLQENLRQLQDEYDQQQTEKAIELSRRQAEEEDLQREQLQMLRERELEREREQFRVASLHTRTRSLDFREIGPFQLEPSREPRTHLAYALDLGSSPVPSSTAPKTPSLSSTQPTRVWSGPPAVGQERLPQSSMPQQHEGPSLNPFDEEDLSSPMEEATTGPPAAGVSLDPSARILKEYNPFEEEDEEEEAVAGNPFIQPDSPAPNPFSEEDEHPQQRLSSPLVPGNPFEEPTCINPFEMDSDSGPEAEEPIEEELLLQQIDNIKAYIFDAKQCGRLDEVEVLTENLRELKHTLAKQKGGTD

SEQ ID NO: 114139 - protein, 208 aa, Artificial Sequence
  derived and/or modified sequence
MASLDDPGEVREGFLCPLCLKDLQSFYQLHSHYEEEHSGEDRDVKGQIKSLVQKAKKAKDRLLKREGDDRAESGTQGYESFSYGGVDPYMWEPQELGAVRSHLSDFKKHRAARIDHYVVEVNKLIIRLEKLTAFDRTNTESAKIRAIEKSVVPWVNDQDVPFCPDCGNKFSIRNRRHHCRLCGSIMCKKCMELISLPLAKITTLHGES

SEQ ID NO: 114140 - protein, 41 aa, Artificial Sequence
  derived and/or modified sequence
MASLDDPGEVREGFLCPLCLKDLQSFYQLHSHYEEEHSGED

SEQ ID NO: 114141 - DNA, 2355 bp, Artificial Sequence
  derived and/or modified sequence
atggccagcctggacgaccccggcgaggtgagagagggcttcctgtgccccctgtgcctgaaggacctgcagagcttctaccagctgcacagccactacgaggaggagcacagcggcgaggacagagacgtgaagggccagatcaagagcctggtgcagaaggccaagaaggccaaggacagactgctgaagagagagggcgacgacagagccgagagcggcacccagggctacgagagcttcagctacggcggcgtggacccctacatgtgggagccccaggagctgggcgccgtgagaagccacctgagcgacttcaagaagcacagagccgccagaatcgaccactacgtggtggaggtgaacaagctgatcatcagactggagaagctgaccgccttcgacagaaccaacaccgagagcgccaagatcagagccatcgagaagagcgtggtgccctgggtgaacgaccaggacgtgcccttctgccccgactgcggcaacaagttcagcatcagaaacagaagacaccactgcagactgtgcggcagcatcatgtgcaagaagtgcatggagctgatcagcctgcccctggccaacaagctgaccagcgccagcaaggagagcctgagcacccacaccagccccagccagagccccaacagcgtgcacggcagcagaagaggcagcatcagcagcatgagcagcgtgagcagcgtgctggacgagaaggacgacgacagaatcagatgctgcacccactgcaaggacaccctgctgaagagagagcagcagatcgacgagaaggagcacacccccgacatcgtgaagctgtacgagaagctgagactgtgcatggagaaggtggaccagaaggcccccgagtacatcagaatggccgccagcctgaacgccggcgagaccacctacagcctggagcacgccagcgacctgagagtggaggtgcagaaggtgtacgagctgatcgacgccctgagcaagaagatcctgaccctgggcctgaaccaggacccccccccccaccccagcaacctgagactgcagagaatgatcagatacagcgccaccctgttcgtgcaggagaagctgctgggcctgatgagcctgcccaccaaggagcagttcgaggagctgaagaagaagagaaaggaggagatggagagaaagagagccgtggagagacaggccgccctggagagccagagaagactggaggagagacagagcggcctggccagcagagccgccaacggcgaggtggccagcctgagaagaggccccgcccccctgagaaaggccgagggctggctgcccctgagcggcggccagggccagagcgaggacagcgaccccctgctgcagcagatccacaacatcaccagcttcatcagacaggccaaggccgccggcagaatggacgaggtgagaaccctgcaggagaacctgagacagctgcaggacgagtacgaccagcagcagaccgagaaggccatcgagctgagcagaagacaggccgaggaggaggacctgcagagagagcagctgcagatgctgagagagagagagctggagagagagagagagcagttcagagtggccagcctgcacaccagaaccagaagcctggacttcagagagatcggccccttccagctggagcccagcagagagcccagaacccacctggcctacgccctggacctgggcagcagccccgtgcccagcagcaccgcccccaagacccccagcctgagcagcacccagcccaccagagtgtggagcggcccccccgccgtgggccaggagagactgccccagagcagcatgccccagcagcacgagggccccagcctgaaccccttcgacgaggaggacctgagcagccccatggaggaggccaccaccggcccccccgccgccggcgtgagcctggaccccagcgccagaatcctgaaggagtacaaccccttcgaggaggaggacgaggaggaggaggccgtggccggcaaccccttcatccagcccgacagccccgcccccaaccccttcagcgaggaggacgagcacccccagcagagactgagcagccccctggtgcccggcaaccccttcgaggagcccacctgcatcaaccccttcgagatggacagcgacagcggccccgaggccgaggagcccatcgaggaggagctgctgctgcagcagatcgacaacatcaaggcctacatcttcgacgccaagcagtgcggcagactggacgaggtggaggtgctgaccgagaacctgagagagctgaagcacaccctggccaagcagaagggcggcaccgactag

SEQ ID NO: 114142 - DNA, 627 bp, Artificial Sequence
  derived and/or modified sequence
atggccagcctggacgaccccggcgaggtgagagagggcttcctgtgccccctgtgcctgaaggacctgcagagcttctaccagctgcacagccactacgaggaggagcacagcggcgaggacagagacgtgaagggccagatcaagagcctggtgcagaaggccaagaaggccaaggacagactgctgaagagagagggcgacgacagagccgagagcggcacccagggctacgagagcttcagctacggcggcgtggacccctacatgtgggagccccaggagctgggcgccgtgagaagccacctgagcgacttcaagaagcacagagccgccagaatcgaccactacgtggtggaggtgaacaagctgatcatcagactggagaagctgaccgccttcgacagaaccaacaccgagagcgccaagatcagagccatcgagaagagcgtggtgccctgggtgaacgaccaggacgtgcccttctgccccgactgcggcaacaagttcagcatcagaaacagaagacaccactgcagactgtgcggcagcatcatgtgcaagaagtgcatggagctgatcagcctgcccctggccaagatcaccaccctgcacggcgagagctag

SEQ ID NO: 114143 - DNA, 126 bp, Artificial Sequence
  derived and/or modified sequence
atggccagcctggacgaccccggcgaggtgagagagggcttcctgtgccccctgtgcctgaaggacctgcagagcttctaccagctgcacagccactacgaggaggagcacagcggcgaggactag

SEQ ID NO: 114144 - DNA, 2355 bp, Artificial Sequence
  derived and/or modified sequence
atggcctccttagacgatcccggcgaggtgagggaagggtttctatgccccctgtgccttaaagacctgcagtcattttaccagctccacagccactacgaggaggagcatagtggtgaggatcgggacgttaagggacaaatcaagtccctggtccagaaggcaaaaaaagccaaggacagactgcttaaacgtgaaggcgacgaccgcgccgagagcggaacacagggctacgagagtttctcgtatggcggcgtggacccgtacatgtgggaaccccaggagctaggggctgtccgctctcacttgtccgattttaaaaagcatagagctgctcggattgaccactacgtagtagaagtcaacaaacttatcatacggctcgaaaaactgaccgcctttgaccgaacaaatacagaaagtgcaaaaatccgggctattgaaaagagcgtcgtaccatgggtaaacgaccaggatgtccctttctgtcctgactgcggtaacaagttttccatccgaaatcgtcgccaccactgtagactgtgtggttcgataatgtgcaaaaagtgtatggagctgatcagtcttcctctagctaataaacttacatcagcctcgaaagagagcctcagcacacacacttcaccgtctcaaagtccaaacagtgtgcacggctcccgaagaggttcaattagtagcatgtctagcgttagttccgtgcttgacgagaaggacgatgaccgaatccgatgttgcacccactgtaaggatacattgttgaagcgcgaacagcagatcgatgagaaagaacacacgcccgacattgtcaagctatacgaaaaacttcgcctgtgtatggagaaagtggatcagaaagcgccggagtatatacggatggctgctagcttaaacgctggggaaactacctacagcctcgagcacgcatcagacctcagggtggaagtacagaaagtgtatgagttgattgacgcgctgtcaaagaaaatcctgaccctgggcttgaatcaagaccctccgccacacccatctaacctgagacttcagcgcatgatccgatacagcgcgaccctttttgtacaagagaagctgttaggactgatgtcactgccaacgaaggagcaattcgaagaactaaaaaaaaaacgtaaggaggaaatggagcgcaagcgcgccgttgaaagacaagctgcgctcgagtcgcagcgccggttagaggaaaggcagtcagggcttgcatcccgagccgccaacggggaggtcgcttccctcagaagggggcccgcacctctgcggaaggctgagggatggttacctttgtcaggaggccaggggcaaagtgaggacagcgaccctctgctgcagcagattcacaacataacgtcctttatcaggcaggctaaggctgcgggtagaatggatgaagtgcggacactgcaggagaatcttcgccagttgcaggatgaatatgaccaacagcagacagaaaaggccatcgagctttcacggagacaagccgaagaagaggatctgcagagagaacagctacagatgcttcgagagcgggaattagaacgagagcgggagcagttcagggtggcatcactccacactaggacgcgtagtctagactttcgcgagatcgggccttttcaactcgagccaagccgggaaccacgtactcacctggcatatgcactcgatcttggcagttcacccgttccttcctcgacagccccaaaaaccccatctctttcatctacccagccaactagggtatggagcgggccaccagctgtcgggcaagagcggctcccccagtcctccatgccccagcagcatgaagggccaagtctaaacccctttgatgaggaggatctctcaagtccaatggaggaggcgaccaccggaccccctgccgctggcgtcagccttgatccctcagctaggattctgaaggaatacaatccctttgaggaggaggacgaggaggaagaggctgtggctggaaaccctttcattcagcctgacagccctgcgcctaatcctttcagcgaggaagacgagcatcctcagcagcggcttagttctcccctcgttccaggaaaccccttcgaggagcccacctgcattaacccattcgagatggatagcgattcaggcccggaagcggaagaaccaattgaggaggaactcctgcttcaacagatcgacaatatcaaggcctacatatttgacgccaagcagtgcggtaggctggatgaggtggaagtcctgactgagaatctcagagagcttaagcacactctcgccaaacagaagggcgggaccgattag

SEQ ID NO: 114145 - DNA, 627 bp, Artificial Sequence
  derived and/or modified sequence
atggcctctcttgatgatccaggggaggtgcgcgagggcttcctgtgcccgctgtgtctcaaagatctgcagagcttttaccaactgcattcacactatgaggaggagcattctggcgaggaccgcgatgtgaaaggacagataaagtccctcgtgcagaaagcgaaaaaggctaaggataggttactcaaacgagagggcgacgatcgcgcagagagcggaacacagggctatgagtccttcagttacggaggcgttgatccctacatgtgggagccccaggagctgggggcagtgaggagccaccttagtgatttcaagaaacaccgagctgcccggatagaccattacgtagttgaggtgaataaactgattatccgcttagaaaagcttacggcgttcgacagaactaacaccgagtctgctaaaattagggctatcgaaaagtccgtggttccttgggtcaatgatcaggatgttccattttgtcctgattgtggaaacaagttctccatacgcaacagacggcatcactgtcgtctttgcggctccattatgtgcaagaaatgcatggaactgatctctttgcccctggccaagattacgacgctccatggcgagagctag

SEQ ID NO: 114146 - DNA, 2355 bp, Artificial Sequence
  derived and/or modified sequence
atggccagtcttgacgatccgggtgaagtgcgggagggatttctgtgtcccctctgtttaaaggacctgcaatccttttatcagctgcatagccactacgaagaagaacacagtggtgaggacagagatgtcaaggggcagatcaagtctctggtgcagaaagcaaagaaagctaaggacagactgctgaaacgagaaggagacgacagagctgagagtggaacacaaggctatgaatccttttcctacgggggcgtggacccctacatgtgggaacctcaggagttaggggccgtgcggtcccatctctccgattttaagaaacatcgcgcagctaggatcgatcattacgtggtggaagtaaataagctgatcatacgactggaaaaattaactgcgtttgatagaacaaacacagaatcagccaagattcgagcgattgaaaagtctgtggtgccctgggttaacgatcaagacgtgcccttctgccccgactgcggcaacaaattcagtattcgcaaccgcaggcaccattgtagactttgcgggtctatcatgtgtaaaaaatgtatggagctgatctccctgccactagccaacaagctgacatccgcctctaaagagagtctgtccactcatacatcaccatcgcaaagccctaacagcgttcatggctcacggagaggcagtattagtagcatgtcaagcgtaagttcagtgttagatgaaaaggacgacgaccgcatccgctgctgtacacattgcaaggatacgctcctgaagcgcgagcagcaaatcgacgagaaagaacatacgcctgacattgtgaagctttacgaaaagctgcgactgtgcatggagaaggtggatcagaaagcccctgaatacattagaatggccgcttctctcaacgccggtgagacaacgtattcactcgagcacgcaagcgatctgcgagtcgaagttcagaaagtgtacgagctcatcgatgccctgtctaagaaaatattgacattaggcttgaaccaggaccccccaccccacccctcaaatttgcgtcttcaacgtatgatcaggtatagcgcgactttgttcgttcaggaaaaactgttggggctgatgagtttacctacaaaggagcaatttgaagaacttaaaaagaagaggaaggaggagatggagagaaagcgcgcagttgagagacaggccgcgctggagagccaaaggaggctggaggaaaggcaatcaggtctcgcttctagagccgccaacggtgaagttgcatccttgagaaggggcccggcccctctgagaaaggccgagggctggctcccccttagcggcggccagggccaatctgaagacagcgacccacttctgcaacagatccacaatataacaagcttcatccgccaggcgaaagctgctggccggatggatgaggtcaggacgttacaagagaacctgagacagttacaggacgagtatgaccaacagcaaactgagaaggccatcgagctatccaggcgacaagccgaagaggaggacttacaacgcgagcagctccagatgctgcgagaaagggagttggaaagggagcgggaacagttcagggtcgcatccctgcacactagaacaaggagtcttgattttcgggaaatcggcccattccagctggagccctctagagagcccagaacccatctggcatatgcgctcgatcttggatcttctcccgtgccctcttctaccgcaccaaagaccccctcattgagttctacccaaccaacgcgtgtttggtccgggccaccagccgtgggccaagagagactccctcaatccagcatgccacagcagcacgaaggcccctccctaaatccctttgacgaggaggacctcagctccccgatggaggaggcgaccaccggaccgccagccgccggggtgtctctcgaccccagcgcgcgtatattaaaggagtataaccctttcgaggaagaggatgaggaggaggaagcggtggcaggtaatccttttattcaacctgacagcccggccccgaatcctttctcggaagaggacgaacacccgcaacagagattgtctagcccgctcgtacctggaaatcccttcgaggagcctacttgcatcaatccatttgaaatggattcagactctggtcccgaagccgaggagcccatagaagaggagctcctcctgcagcaaatcgacaatattaaggcctatatattcgacgccaagcagtgtggccggctcgatgaggtagaagttcttaccgaaaacttgcgtgagttgaaacacacgttggcaaaacagaagggcggaaccgactag

SEQ ID NO: 114147 - DNA, 126 bp, Artificial Sequence
  derived and/or modified sequence
atggcttcactggatgaccctggcgaagttagagagggtttcctatgcccactgtgtctgaaggaccttcagagcttctaccagctgcattcccactatgaggaagagcactctggggaagattag

SEQ ID NO: 114148 - DNA, 2355 bp, Artificial Sequence
  derived and/or modified sequence
atggccagcctggatgatcctggagaggtgcgggagggcttcctgtgccccctgtgcctgaaggacctgcagagcttctaccagctgcacagccactatgaggaggagcacagcggggaggacagagatgtgaagggccagatcaagagcctggtgcagaaggccaagaaggccaaggaccggctgctgaagcgggagggagatgacagagctgagagcggcacccagggctatgagagcttctcctatggaggagtggacccctacatgtgggagccccaggagctgggcgctgtgcgcagccacctgagtgacttcaagaagcacagagctgccagaattgaccactacgtggtggaggtgaacaagctgatcatccggctggagaagctgacagcctttgacaggaccaacacagaaagtgccaagatccgggccatcgagaagtctgtggtgccctgggtgaatgaccaggatgtgcccttctgcccagactgtggcaacaagttcagcatccggaacagaagacaccactgccgcctgtgtggcagcatcatgtgcaagaagtgcatggagctgatcagcctgcccctggccaacaagctgaccagcgccagcaaggagagcctgagcacccacaccagccccagccagagccccaacagcgtgcacggcagcagaagaggcagcatcagctccatgagctctgtgtcctctgtgctggatgagaaggatgatgaccgcatccgctgctgcacccactgcaaggacaccctgctgaagcgggagcagcagattgatgagaaggagcacaccccagacatcgtgaagctgtatgagaagctgcggctgtgcatggagaaggtggaccagaaggcccctgagtacatccgcatggccgccagcctgaatgctggggagaccacctacagcctggagcacgccagtgacctgcgggtggaggtgcagaaggtgtatgagctgattgatgccctgagcaagaagatcctgaccctgggcctgaaccaggaccccccaccccaccccagcaacctgcggctgcagaggatgatccgctacagcgccaccctgtttgtgcaggagaagctgctgggcctgatgagcctgcccaccaaggagcagtttgaggagctgaagaagaagaggaaggaggagatggagaggaagagagctgtggagcggcaggccgccctggagagccagaggcggctggaggagcggcagagcggcctggccagccgggccgccaacggggaggtggccagcctgcggcggggccctgcccccctgaggaaggccgagggctggctgcccctgagcggcggccagggccagagcgaggacagcgaccccctgctgcagcagatccacaacatcaccagcttcatccggcaggccaaggccgccggccgcatggatgaggtgaggaccctgcaggagaacctgcggcagctgcaggatgaatatgaccagcagcagacagagaaggccatcgagctgagccggcggcaggccgaggaggaggacctgcagcgggagcagctgcagatgctgcgggagcgggagctggagcgggagcgggagcagttccgggtggccagcctgcacaccaggaccaggagcctggacttccgggagatcggccccttccagctggagcccagccgggagcccaggacccacctggcctatgccctggacctgggcagcagccctgtgcccagcagcacagcccccaagacccccagcctgagcagcacccagcccaccagggtgtggagcggccccccagctgtgggccaggagcggctgccccagagctccatgccccagcagcacgagggccccagcctgaacccctttgatgaggaggacctgagcagccccatggaggaggccaccaccggccccccagctgctggggtgtccctggaccccagcgcccgcatcctgaaggagtacaacccctttgaggaggaggatgaggaggaggaggccgtggccggcaaccccttcatccagcctgacagccctgcccccaaccccttctctgaagaagatgagcacccccagcagaggctgagcagccccctggtgcccggcaacccctttgaggagcccacctgcatcaacccctttgagatggacagcgacagcggccctgaggccgaggagcccatcgaggaggagctgctgctgcagcagattgacaacatcaaggcctacatctttgatgccaagcagtgtggccgcctggatgaggtggaggtgctgacagagaacctgcgggagctgaagcacaccctggccaagcagaagggcggcacagactag

SEQ ID NO: 114149 - DNA, 627 bp, Artificial Sequence
  derived and/or modified sequence
atggccagcctggatgatcctggagaggtgcgggagggcttcctgtgccccctgtgcctgaaggacctgcagagcttctaccagctgcacagccactatgaggaggagcacagcggggaggacagagatgtgaagggccagatcaagagcctggtgcagaaggccaagaaggccaaggaccggctgctgaagcgggagggagatgacagagctgagagcggcacccagggctatgagagcttctcctatggaggagtggacccctacatgtgggagccccaggagctgggcgctgtgcgcagccacctgagtgacttcaagaagcacagagctgccagaattgaccactacgtggtggaggtgaacaagctgatcatccggctggagaagctgacagcctttgacaggaccaacacagaaagtgccaagatccgggccatcgagaagtctgtggtgccctgggtgaatgaccaggatgtgcccttctgcccagactgtggcaacaagttcagcatccggaacagaagacaccactgccgcctgtgtggcagcatcatgtgcaagaagtgcatggagctgatcagcctgcccctggccaagatcaccaccctgcatggagagagctag

SEQ ID NO: 114150 - DNA, 126 bp, Artificial Sequence
  derived and/or modified sequence
atggccagcctggatgatcctggagaggtgcgggagggcttcctgtgccccctgtgcctgaaggacctgcagagcttctaccagctgcacagccactatgaggaggagcacagcggggaggactag

SEQ ID NO: 114151 - DNA, 2355 bp, Artificial Sequence
  derived and/or modified sequence
atggccagcctggacgaccccggcgaggtgcgggagggcttcctgtgcccactctgtctgaaggatctgcagagtttctaccaattgcactcccactatgaagaagaacattcaggggaagacagagatgtcaaaggacagattaagtccttggtccagaaggcgaaaaaggcaaaggatagacttctaaagagagaaggcgacgaccgcgccgagagcggcactcagggctatgagagctttagctacggcggcgtcgatccctacatgtgggaaccacaggagctaggggcagttaggtcccatctctccgatttcaagaagcacagggcagccagaatcgaccattatgtggtggaggttaacaagttaattattaggcttgagaaactgacagcctttgaccgtacaaatactgaatccgctaaaattagagctatcgaaaaatccgtggtcccatgggttaatgatcaggatgttcccttctgcccagactgcggcaacaaattttccattagaaatcggcgccaccattgccgcttgtgtggctctataatgtgtaagaaatgtatggaattgatttctctgccgttggctaacaaactgactagcgcttccaaagaatcactctccactcatacgtctccttctcagagcccaaattccgtgcacgggtctcggagagggtccatttcatcaatgtcttccgtgagctcggttctggatgaaaaggacgatgacagaatccgctgctgcacgcactgcaaagataccctgctcaaaagagagcagcagatcgatgagaaggaacataccccagacattgttaagctgtatgagaagctgcgactctgcatggaaaaggtggatcaaaaggctcccgagtatatcaggatggctgctagcctcaacgccggggagaccacttattccctagaacacgcttcagacttacgcgtggaggtgcagaaggtgtatgagctcatcgacgccctatctaagaaaatcctcacattgggcttaaaccaagatccacctccacaccctagtaatttgcgactacagcggatgatcaggtattccgccacactctttgtgcaagagaagcttctgggcttgatgagcctgcctactaaagagcagttcgaggaactgaaaaagaagaggaaggaagagatggagcgcaagcgggctgttgaacgccaagccgctttggagagccagcgaagattggaggagcggcagtctggcctggctagccgggcggccaacggagaagtagcctctctaagacgcggacccgcccctctgcgcaaagcagagggatggcttccactgtccggaggacagggacagtccgaggattctgacccgctgctccagcaaatccacaacattaccagttttatccgccaggccaaagcggccgggcggatggacgaagtgcgcactttgcaggagaacctccggcagctccaggacgaatatgaccagcagcagaccgagaaggccattgaactgtcccggcgccaagccgaagaagaggaccttcagagagagcaactgcaaatgttgagggagagggaactggaaagagaaagagagcaattcagagtcgcaagcctgcacacccgaaccaggtctctggacttccgcgagattggcccgttccaactagaaccaagcagggagccccgcacccatctcgcatacgcactggatcttgggtccagtccagtgccaagtagtactgcacctaaaaccccctcactatctagcacccagcctactagagtctggtcgggaccgcccgctgtggggcaggaacggctccctcagagcagtatgcctcaacaacatgagggaccatctctcaatccttttgacgaggaggacttaagcagccccatggaagaagctactaccggccctcccgccgccggggtgtcactggatccatctgctcggatcctcaaggagtacaacccattcgaagaagaagatgaggaagaagaggctgtagctgggaacccattcatccaacctgatagtcccgcccccaaccccttcagcgaggaggacgaacatcctcaacaacggctgtctagccctctggtgcctgggaacccttttgaggagcccacctgcatcaatccgttcgagatggatagtgattcaggccctgaagctgaggaacctatcgaggaggagttactgctgcagcaaattgataacattaaagcatatattttcgacgccaagcagtgtggtagactggacgaagtggaagtcctgacagagaatctgagagagctgaagcatactctagctaagcaaaagggggggactgactag

SEQ ID NO: 114152 - DNA, 627 bp, Artificial Sequence
  derived and/or modified sequence
atggccagcctggacgaccccggcgaggtgcgggagggcttcctgtgccctctctgtctgaaggacttgcaatcattttaccagcttcactcccattacgaagaggagcactctggtgaggaccgggatgtgaaaggccagattaagtcattggttcagaaagccaagaaagcgaaggaccgcctattgaagagggaaggggacgatcgagctgaatccggcacccagggatacgaaagtttctcctatggaggggtagacccctatatgtgggagccccaggaattaggcgctgttagatcccaccttagcgacttcaaaaaacatagggctgccagaattgatcattatgttgtggaggtgaacaaactgataatccggttggagaaactgaccgccttcgatcgcaccaataccgaatccgccaaaatccgagcaatcgagaaaagcgtggtcccttgggtcaacgatcaagatgtgccattctgtcctgactgtggcaacaagtttagtatacggaacaggaggcatcactgtaggttgtgcggaagcattatgtgcaagaagtgtatggaactgatctcccttcccctggccaagatcactacgctgcacggggagagctag

SEQ ID NO: 114153 - DNA, 2355 bp, Artificial Sequence
  derived and/or modified sequence
atggccagcctggacgaccccggcgaggtgcgggagggcttcctgtgtcccctctgcttgaaggacctgcagagtttttaccagttgcattctcattatgaggaagagcactcaggtgaggaccgtgatgttaaaggtcagataaaaagcctagttcagaaagccaaaaaagccaaggaccgccttctcaaacgggagggagacgatagggccgaaagcggcacacaaggctatgagtctttctcctatgggggcgtggatccttatatgtgggaaccccaagagcttggggccgtgagaagccatctttcagacttcaagaagcatagagcagctagaatcgatcattacgtcgtggaggtaaacaaactgattatccgactcgagaaattgacggcgtttgaccgaacaaatacagaaagcgctaagattcgtgccatcgagaagagcgttgtgccttgggtcaatgaccaggacgtcccgttttgccccgactgtggtaacaaattttccatacgcaacaggcgtcaccactgccgcctttgcggatcaataatgtgcaagaagtgcatggagctgattagtctgcctctcgctaataagctcacctccgcctccaaggagagcttatcaacccatacctccccatctcagagtcccaacagcgttcatgggtccaggaggggttctatatcatctatgtcttctgtgagctccgtattagacgagaaggacgacgatcgaattcgttgctgcacgcattgcaaagatactctgctcaaacgcgaacagcaaatcgacgagaaggaacacacacccgatattgtcaagctatacgaaaagctgagactgtgcatggagaaagtagatcagaaggctcctgaatacatcaggatggcggctagcttaaacgcaggggagacaacttatagtctggagcatgcgtccgatctcagggttgaagtgcagaaagtttatgaactgatcgatgccttgtctaaaaaaatattgacccttggcctgaaccaggatccccctcctcacccatcaaatcttaggttgcagcggatgatccgctactcagccactctgttcgtgcaggaaaaactcctggggctgatgtctctacctacaaaggagcagtttgaggagctgaaaaaaaaaaggaaagaggagatggagcgcaaacgggctgtagagcgccaagctgctttggagtctcaacgccgcctggaggagcgccagagcgggttagcgtctcgagctgctaacggcgaggtcgccagcttgaggagagggccagctcctcttcgcaaggcagaaggctggttacctctaagcggaggacagggacagtccgaggactcagatccccttttgcaacagatacataatatcaccagttttataaggcaggctaaggccgcaggtaggatggatgaagttagaacactccaggagaacttgcgtcagctgcaggacgagtatgaccaacaacaaaccgaaaaggccatcgagctgtctagaagacaggcggaggaggaggacctgcagagagagcagctgcagatgttgagagagcgagaacttgagcgtgaaagagagcagtttcgtgttgccagtctgcatacaaggacacgatccctcgacttcagggagatcggcccttttcagctcgagccatcccgcgaaccacggacccatctagcgtatgctctcgaccttggatcatcccccgttccaagcagcacggcacctaagacaccctctctgtctagcacacaacctactcgtgtgtggagtggacctcccgctgtggggcaagaaagactcccacaaagttcaatgccccagcagcacgagggtccctccctcaacccattcgacgaagaggatctcagttcccctatggaagaagccacaacaggaccacccgctgcaggcgtcagcctcgacccaagcgcccgaattctgaaagagtacaaccccttcgaggaggaagatgaagaggaggaagctgtggccggaaacccttttatccagccggacagtccagcaccaaacccgtttagcgaagaagatgagcatcctcagcagcgactgagcagtccgctcgtgcctgggaaccccttcgaggaacctacttgcataaacccattcgaaatggactccgatagcggacccgaggccgaagagccgatcgaagaagagctgctattacagcagattgataatatcaaggcctatatctttgatgccaaacagtgtggcaggttggacgaagtcgaggtcctgaccgaaaacctccgagagctaaaacatacactcgctaaacagaaaggtgggaccgattag

SEQ ID NO: 114154 - DNA, 126 bp, Artificial Sequence
  derived and/or modified sequence
atggccagcctggacgaccccggcgaggtgcgggagggcttcctgtgtcccctctgcctgaaagacctccagagtttctaccagcttcactctcactatgaggaggagcatagcggggaggattag

SEQ ID NO: 114155 - DNA, 2355 bp, Artificial Sequence
  derived and/or modified sequence
atggcaagtctggacgatcccggtgaggtgcgagagggtttcctatgccctttgtgcctgaaggatctgcagagcttctatcagctgcactctcattatgaggaggagcacagcggggaggatagagatgttaagggacagattaagtccttggtccagaaagccaaaaaggccaaggacaggctactgaaaagagagggagatgaccgcgctgaaagtggaactcagggttacgagtctttcagctacgggggagttgatccttacatgtgggagcctcaggaattaggcgcagtgcgcagccacctgtcagacttcaaaaagcacagggccgcaagaattgaccactacgtagtggaggttaacaaactcatcatcagactagagaaacttactgcctttgaccgtacaaatactgaatccgccaagataagagccatagagaaaagtgtggtaccgtgggtcaacgaccaagacgtcccattttgccccgactgcgggaataagttttcaatcagaaaccgacgacaccattgtaggctctgcggcagtatcatgtgtaagaagtgcatggagctgatttctctgccattggccaataagttaacatcggcctctaaagaaagcctttcaacccacacatcaccctcacagagtccgaactctgtgcacggaagcaggcggggatctatctcgtcaatgtcctctgtatcctctgtactggacgaaaaagacgatgatagaattcgctgctgtacccattgcaaagacaccctgctcaagagggaacagcagattgatgagaaggagcacacgcccgacattgtaaaactgtatgagaagctgaggctttgcatggaaaaagtagatcagaaagcacctgagtacatacgcatggcagcctcattgaatgctggcgagaccacatactccctggagcacgcatcggatctgcgagttgaagttcagaaggtttacgagctgatcgacgccctctctaagaagatcctgacactcggactcaaccaggaccctccccctcacccctctaacctgcgactgcagcgcatgatcagatattccgctactctttttgtgcaagagaagctgttgggtctgatgagccttccaacaaaagagcagttcgaagagctgaagaagaaacgcaaggaagagatggagaggaaacgggctgtcgaacggcaggcggctttggaatctcagcggaggcttgaagaaagacaatctggactagctagccgcgcagccaacggcgaggtggcaagcctgcgaagaggaccggcaccactgaggaaggctgaggggtggctgcctctgagtggtggacagggccaaagcgaagatagcgacccccttttgcagcagatccacaacatcacctctttcattcgccaagctaaggcggcagggagaatggatgaggtcagaaccctgcaggagaacctccgacagttgcaggatgaatatgaccagcagcagacagaaaaagccatagagctgagtaggagacaggccgaggaggaggacctacaaagagaacagctccagatgttgagagaacgcgagctggaaagggaaagagagcagttcagggtggccagccttcacactcgaaccaggagccttgattttagggaaataggcccatttcagctcgaaccttctcgcgaacctcgtacacacctcgcctatgcattggacctgggtagcagcccagtgcccagtagtaccgccccaaagacgccctcactatcatccacccagcccacaagggtgtggtctggtcccccagctgtgggtcaggagcgcctgccccaatccagtatgccccaacagcacgaaggcccaagtctcaatccatttgacgaagaggacctgtcctcccccatggaggaagctacaaccggaccccctgccgctggtgtgtccctcgatccgtccgcacgtatcctcaaagagtacaatcctttcgaggaagaagacgaggaggaagaggcagttgccggtaaccctttcatccagcctgattccccggcacctaaccctttttctgaggaagatgaacaccctcagcaacggctgtcgtcccctctggtccctggcaatccctttgaggagcccacctgcatcaacccctttgagatggatagcgacagcggcccagaggcagaggagccgatcgaggaggagttgttgctccagcagatcgacaacattaaggcctacatcttcgatgcaaagcagtgcggcaggttggacgaagttgaggtgttgactgaaaatttgcgggagctgaagcacaccctcgccaagcaaaaggggggaacagactag

SEQ ID NO: 114156 - DNA, 627 bp, Artificial Sequence
  derived and/or modified sequence
atggcgtccctcgatgatcccggtgaggtgagggagggtttcctgtgtccattatgcctgaaagatcttcagtccttttaccagcttcatagtcactacgaggaggagcactcaggcgaagatcgggatgtgaaaggccaaataaagagtcttgtgcaaaaggccaagaaagcgaaggatcgattgcttaagcgagagggagatgatcgggctgaatccggtacgcagggatatgaatcattcagctatgggggtgtcgacccttacatgtgggaaccccaggagttaggggctgtgcggagccaccttagcgattttaaaaagcacagagctgccaggatagaccactatgtcgtcgaggtgaataagttgattatccgtctggaaaaactgaccgcatttgaccggactaataccgagagtgccaaaattagggcaattgagaaaagcgtcgtcccatgggtgaacgatcaagacgtgccattttgtccggactgtggcaataagttcagcattcgaaatagacgacaccactgtcgcttgtgtggctccattatgtgcaaaaagtgcatggaacttataagccttccacttgctaagataacgacactgcatggcgagagctag

SEQ ID NO: 114157 - DNA, 2355 bp, Artificial Sequence
  derived and/or modified sequence
atggcctcattagacgatcccggagaagtgcgggaaggcttcctgtgcccactttgccttaaggatctacagagcttctaccagctgcacagccactatgaagaagaacattcaggtgaagacagggatgtcaaaggccagattaaaagcctcgtgcagaaggcgaaaaaagccaaagatcggctgctgaagcgcgaaggcgacgatcgtgccgagtcaggtacccagggttacgaatcgttctcctatggaggggtagacccttatatgtgggaaccccaggaattaggagcggtacgcagccacctctctgattttaagaagcatcgcgcagctaggattgatcactacgtcgttgaggttaataaactgattatcaggcttgagaaattaacagcattcgatagaaccaacacagaaagcgccaagattcgggctattgagaagtctgttgtcccctgggtgaacgaccaggatgtgcccttctgtccagattgtggaaacaagttcagcatccggaaccgaagacaccactgtcggctgtgtggaagcatcatgtgcaagaaatgtatggagctgatcagcttacctctggccaataagctcactagcgcctccaaggagtcgttgtctactcatacatctccttctcagagtcctaattctgtgcacggtagtcgtagaggttcaatttcttccatgtcctccgtcagcagcgtgttggacgaaaaagatgacgataggatccgctgttgcactcattgcaaggacacgcttcttaaacgcgagcaacagatagacgaaaaagaacacacaccagacattgtgaagctgtatgagaaactgcggctttgcatggagaaggttgaccagaaggcccctgagtacatccgtatggcagctagtttaaatgctggcgaaacaacgtactccctcgaacacgcatccgacctgcgcgtggaagtccagaaagtatatgaactgattgacgccctctctaaaaagatcttgacccttggtttgaaccaggatccccctccacatccctcaaaccttcgactgcaacgtatgatccgatatagcgccaccttgtttgtccaggaaaagctgctcgggctaatgtctttacccaccaaagaacagtttgaggagttgaaaaaaaagagaaaggaggaaatggaacggaagagagccgttgagcgccaggccgcacttgaatctcagaggcgcttagaggagaggcagagcggcctggcttccagagccgctaacggtgaggtcgcttcactaagaagaggcccagcgcctctgcgcaaggcggagggctggctcccactgtcaggaggtcaaggccaaagtgaggacagcgatccgcttctgcagcagatccacaatattacatcattcatacgccaagccaaagccgcaggtcgcatggacgaagtgcgcacactgcaggagaacctgaggcagctgcaggatgaatacgaccagcagcagacagagaaagctattgaattgagccgcagacaggccgaggaggaggatttgcagcgagagcagctacagatgctgcgcgagcgcgagctagaacgggaacgtgagcagttccgggtggcaagtcttcatactaggacaagatccttagattttagggagataggcccatttcaactggagccctctcgggaacccagaacccacctggcatacgccctggacctggggtccagccccgtgccatcttcgaccgcgcctaaaacgccaagccttagcagcacgcagcccaccagggtttggagcggcccaccagccgtggggcaggagcgcttaccacagagctccatgccccaacaacatgaagggccaagcctcaatcctttcgacgaggaggacctttcatcaccaatggaggaggctaccacaggacctcccgctgccggagtcagcttagaccctagcgccagaattctcaaagagtacaacccttttgaagaagaggacgaggaagaggaagctgttgctggcaatccattcatacagcctgatagccccgcacctaatcccttctctgaagaagacgaacacccccagcagcggcttagcagcccccttgtgccaggcaatccattcgaggagccaacgtgtatcaatcctttcgagatggactcagactccgggcctgaagccgaggagccaattgaagaagaactgctgctccagcagatcgacaacatcaaggcctatattttcgacgccaaacaatgtgggaggctagatgaggtagaagtcttgacagagaacttaagggaactgaaacatacactggcgaagcagaaaggagggacagattag

SEQ ID NO: 114158 - DNA, 126 bp, Artificial Sequence
  derived and/or modified sequence
atggcttcactagacgatccaggcgaggttagggagggatttctctgccctctgtgcctcaaggatcttcagagtttttaccaattgcacagccactacgaagaagaacatagtggggaggattag

SEQ ID NO: 114159 - DNA, 6678 bp, Artificial Sequence
  derived and/or modified sequence
gagttccgagcgaccgatggagatggcggctgcggctgagtgacggacggtggaggcccagagcccgggcctgaagggggggacaaacctgggtgcccgcaggagcccggcagggtactgtgctaaaccctggggagacggcgaagtggaaaacatatagagtctgtgccctcccagattttacagtcttacttggtcacttcacgtatgtacctgcggttataaattgagatgagtgctgtgaaggagaagtccattctgatgctctgagtgtcttacaagtatcaagaacttactatatgtggttgaataaacaatcaaggtaaagagcatcaagtaaaaacttctgcttgttgataagtacttcagacattcccccagtggctgaagtggcatatgaattatgaagttggatcatttggaatgaatgtaagagaattgccaagggctcctcctactccagagaggaaacctcatccagggccatgaagccacttcctcaccatctgtgtgctgcttaagctaatgctgcgggaaccatggttccttgggaggaatcaagctgactcttggcatgagattcctgccttcctagggttgagagcggcactgccatggcttctctggacgacccaggggaagtgagggagggcttcctctgccctctgtgcctgaaggatctgcagtctttctatcagcttcactcacattacgaggaagaacactcaggggaagaccgtgatgtcaaagggcaaattaaaagtcttgtccagaaggctaaaaaagcaaaggacaggttgttgaaacgagaaggggatgatcgagcagagtcagggacccaaggatatgagtctttcagctatggaggggttgatccttacatgtgggaaccccaggagcttggtgctgtgagaagccatctttccgacttcaaaaaacaccgagctgctagaattgaccactatgttgtggaagtcaataaactaataatcaggttagagaagctcactgcatttgacagaacaaatactgagtctgcaaagattcgagcaatagaaaagtctgtggtgccttgggtcaacgaccaggatgtccctttctgtccagactgtgggaataagttcagcatccggaaccgccgccaccactgccgcctctgcgggtctattatgtgcaagaagtgtatggagctcatcagccttcccttggcaaacaagctcaccagtgccagcaaggagtccctgagcacccacaccagccccagccagtcacccaacagtgtccatggctcccgccgaggcagcatcagcagcatgagcagtgtcagctcggtcctggatgagaaggacgatgaccggatccgctgctgtacacactgcaaggacacgctgctcaagagagagcagcagattgatgagaaggagcacacacctgacatcgtgaagctctacgagaaattacgactttgcatggagaaagttgaccagaaagctccagaatacatcaggatggcagcatcattaaatgctggggagacaacctacagtctggaacatgccagtgaccttcgagtggaagtgcagaaagtgtatgagctgatagacgctttaagtaagaagatcttaaccttgggcttgaaccaggaccctccaccacatccaagcaatttgcggctgcagagaatgatcagatactcagctacactttttgtgcaggaaaagttgcttggtttgatgtcactgccaaccaaagaacagtttgaggaactgaaaaagaaaaggaaggaggaaatggagaggaagagggccgtggagagacaagctgccctggagtcccagcgaaggcttgaggaaaggcagagtggcctggcttctcgagcggccaacggggaggtggcatctctccgcaggggccctgcccccttgagaaaggctgagggctggctcccactgtcaggaggtcaggggcagagtgaggactcagacccgctcctccagcagatccacaacatcacatcattcatcaggcaggccaaggccgcgggccgcatggatgaagtgcgcactctgcaggagaacctgcggcagctgcaggacgagtatgaccagcagcagacagagaaggccatcgagctgtcccggaggcaggctgaggaggaggacctgcagcgggaacagctgcagatgttgcgtgaacgggagttggaacgagaaagggagcagtttcgggtggcatccctgcacacacggactcggtccctggacttcagagaaatcggcccttttcagctggagcccagcagagagcctcgcacccaccttgcttatgctttggatctaggctcttccccagttccaagcagcacagctcccaagaccccttcacttagctcaactcaacccaccagagtgtggtctgggcccccagccgttggccaggagcgcttaccccagagcagcatgccacagcaacatgaggggccctccttaaacccctttgatgaggaagacctctccagccccatggaagaggccactactggtcctcctgctgcaggggtttccttagacccttcagcccgcatcctgaaagagtacaatcctttcgaggaagaggacgaggaggaggaagcagtggcagggaatccattcattcagccagacagcccagctcctaaccccttcagtgaggaagacgaacatccccagcagaggctctcaagccctctggttcctggtaacccctttgaggaacccacctgtatcaacccctttgagatggacagtgacagtgggccagaggctgaggagcccatagaggaagagctcctcctgcagcagatcgataacatcaaggcatacatctttgatgccaagcagtgcggccgcctggatgaggtagaggtgctgacagagaatctgcgggagctgaagcacaccctggccaagcagaaggggggcactgactgaccagcagtggagagggcacctttgggcccaggggtctggcaggagccagtggagcaggacagagggcaggcaggatggatggggaaggtggcagggtgagaactcagatgcacacaggtgaggggcaggaatctgctgttttgtgttgcgcactttgaggtatttccactacagttgaataataaaatagaaactagaacagggagaatcagcattcagttgctgcttttcctgtttattattactatcttttgtaatcggaggtttaccccttttgaagggactttacatttttactaccgagatataactaaatgcagctctgttgggcccagggcagaaatggctgctgtgtacctcttgggtccatttgctactgcctagtcttggttccttatgcagtattatagggcagcctttttagagcccttcctttagccaagacagagaagatagattccactgagctctattctgctctgacagaagtccatccctagtaggctgtgagttccatttcacctggggccgcctctcccctgctctgcacttcctgtctgtacaatagaagggggaggtgctgctatgaaggggagagtttagacccaggagagcccagcacctctttttaaggtggggtgatgggaatatttcaccagggtctattttctcagtttaagttcttttttgtctctttcaggaagttaagctcccagtgcagggtatcaatgtgaatctggtcctgagctttttagaaaataagagtggtggccgggcgcgctggctcacgcctgtaatcgcaacactttgggaggccgaggcaggcagatcacaaggtcaggagatcgagaccaccctggctaacacagtgaaatcccgtctctactaaaaatacaaaaaattagccaggcgtggtggtgggtgcctgtagtcccagctactttggaggctgaggcaggagaatgctgtgaacccgggaggcagagcttgcagtgagccgagatcgcaccactgcactccagcctgggcagtgagagtgagactccgtctcaaaaaaaaataagagtggttaactttttggttgatattagtattatttgtgagaagagtttccccacccttcttctgatagaacaattgtctgtcactggagaaatctccctccagagctttggcaaagttactctgatctgggtctgtttaaaaggccgggtctctaatttaggaatcggtgatttggaagcttttgcagaacatcaccagaagaagggaagcttcccagagtcagaagctaaattaaaataatttccaaggctatttgatcagccttcttcctttttggttcattgtgtcctgacttggggcactgatgagattttttattttttttgagacagagtttcactttgttgcccaggctggagtgtagtggcatgatctcagctcactgcaacctccacctccctggttcaagtgatatttgtgcctcagccccctgaatagctaggattacaggcgtgggccaccacgcctggttaatctctgtatttttagtagaggtagagtttcaccattttggccaggctggtttcgaactcctggcctcaagtgatctgccaccttggcctcccaaagtgctgggaatacaggcgtgagccactgtgcccgccctgatgagatattttattaccaatgttagtattgagaaactgaaatgtttgaagaagcacaacccaggatcgtgctggtagcaccacagtacttaaactgttggtcaattaaggccagaaagggaaattgttaatttagctctggtgctttggtttacaggaacataactcttaactgacatctgacatcatgatagccatatgtgctcagctctgggtagagtttctgcagttactcatctgaactaatgaacaataactgaccactagtcactttatgccgtgtaactagctctaggccatactttcactggttactggtgtgaaagctgaaattcattttgttacattctggtgaagacccctcttgataatgggaatgttttaactctcttgatgaaaaaataatctgtatttgtgttgatgttcacatttctgtagcacatttcttatccttttggttgaatgaaaagatcttgtataggggtgtggagatggggagtgggtagaagtgtgtgaaggacgctttgcatttgggatctgttcacaaacagccatatgagtgtgttaatgaatgtcagccagttaccaaccctgctggttgttatgggttgttttgagaagttggcaaccaggcatctaagatgttgcctggtacaggcctcttttcttccctgaggcccatgacatttctctgttactctagagggtttctcagatggccagtaggctcctccctgcttagggtctcatttctctgaaaagaggatgaactgaaaagcaggtagttccagaagctaattgctgctttccatcataattatttttcttgtgagaacatttctcttttaattagctagtgattttgattaagactaattcactaaacatacccttccctcaaatcacctcaggtagcaatctgtaagtaactaaaagcattgaaaaacacacaagaaacatttttaaaaactatttttaaaggcctggccgggtgcagtggctcactcctgtaatcccagcactttgggaggccgagacgggtggatcacctgaggtcaggaatttgagactagcatggccaacatggtgaaaccccgtgtctactaaaaatacaaaaattagctgggcgtggtggcagacgcctgtaatcccagctactcagggaggctgaggcacgagaatcgcttgaacctgggaggcggaggttgcagtgagccaagattgcgccactgcactccaacctgggtgacaagagcaagactccgtctcacaaaaaacaaacaaaactgactgattgaatatactaaaccaaactaaaatcatattcttttgattaagtttatccatggctgtattcttctatgaattcttccatttaattcttccacgattatcttctcctgtaaatacatcacaggagttagaattctctacccatcagctgtaccatgtcgcagaattcatgcaggcacaaagttggagttacagagatgggttgacagcaggcaaacttggcctatgtattataaccacaacttcaagttcttacctcatgtgaatattcaccctttctttagtcttccaaggcaaacagccccgtctcatcaccagatgagcaaggtcttgatatggcatagcagatctccctagacacagatcatgagaaaagatggaagagacttagggattcaggcatcagatgaagttggcttttcccttttatgccttgtttgtatttaccctgtctaatacactaaggatacttactcattgtacttgcagctcaatatgtctttgctgttcagatactaaaatgtacctctgagtcattgtgagctgtgtggtaggttggacattggcatagttggtgatgggactcaaaatgaaaaggtggtctctttaccaggtcacagactgtagcagattgtgcttgttatctgacaatgactgtcactttgagggtcgttgatttgcatgcactactctggggccttgtattggagccttttttaaaaaaaataaaatctgagatagag

SEQ ID NO: 114160 - DNA, 1915 bp, Artificial Sequence
  derived and/or modified sequence
gcggctgagtgacggacggtggaggcccagagcccgggcctgaagggggggacaaacctgggtgcccgcaggagcccggcagggtactgtgctaaaccctggggagacggcgaagtggaaaacatatagagtctgtgccctcccagattttacagtcttacttggtcacttcacgtatgtacctgcggttataaattgagatgagtgctgtgaaggagaagtccattctgatgctctgagtgtcttacaagtatcaagaacttactatatgtggttgaataaacaatcaaggtaaagagcatcaagtaaaaacttctgcttgttgataagtacttcagacattcccccagtggctgaagtggcatatgaattatgaagttggatcatttggaatgaatgtaagagaattgccaagggctcctcctactccagagaggaaacctcatccagggccatgaagccacttcctcaccatctgtgtgctgcttaagctaatgctgcgggaaccatggttccttgggaggaatcaagctgactcttggcatgagattcctgccttcctagggttgagagcggcactgccatggcttctctggacgacccaggggaagtgagggagggcttcctctgccctctgtgcctgaaggatctgcagtctttctatcagcttcactcacattacgaggaagaacactcaggggaagaccgtgatgtcaaagggcaaattaaaagtcttgtccagaaggctaaaaaagcaaaggacaggttgttgaaacgagaaggggatgatcgagcagagtcagggacccaaggatatgagtctttcagctatggaggggttgatccttacatgtgggaaccccaggagcttggtgctgtgagaagccatctttccgacttcaaaaaacaccgagctgctagaattgaccactatgttgtggaagtcaataaactaataatcaggttagagaagctcactgcatttgacagaacaaatactgagtctgcaaagattcgagcaatagaaaagtctgtggtgccttgggtcaacgaccaggatgtccctttctgtccagactgtgggaataagttcagcatccggaaccgccgccaccactgccgcctctgcgggtctattatgtgcaagaagtgtatggagctcatcagccttcccttggcaaacaagctcaccagtgccagcaaggagtccctgagcacccacaccagccccagccagtcacccaacagtgtccatggctcccgccgaggcagcatcagcagcatgagcagtgtcagctcggtcctggatgagaaggacgatgaccggatccgctgctgtacacactgcaaggacacgctgctcaagagagagcagcagattgatgagaaggagcacacacctgacatcgtgaagctctacgagaaattacgactttgcatggagaaagttgaccagaaagctccagaatacatcaggatggcagcatcattaaatgctggggagacaacctacagtctggaacatgccagtgaccttcgagtggaagtgcagaaagtgtatgagctgatagacgctttaagtaagaagatcttaaccttgggcttgaaccaggaccctccaccacatccaagcaatttgcggctgcagagaatgatcagatactcagctacactttttgtgcaggaaaagttgcttggtttgatgtcactgccaaccaaagaacagtttgaggaactgaaaaagaaaaggaaggaggaaatggagaggaagagggccgtggagagacaagctgccctggagtcccagcgaaggcttgaggaaaggcagagagcctcgcacccaccttgcttatgctttggatctaggctcttccccagttccaagcagcacagctcccaagaccccttcacttag

SEQ ID NO: 114161 - DNA, 1127 bp, Artificial Sequence
  derived and/or modified sequence
gagttccgagcgaccgatggagatggcggctgcggctgagtgacggacggtggaggcccagagcccgggcctgaagggggggacaaacctgggtgcccgcaggagcccggcagggtgtcttacaagtatcaagaacttactatatgtggttgaataaacaatcaaggtaaagagcatcaagtaaaaacttctgcttgttgataagtacttcagacattcccccagtggctgaagtggcatatgaattatgaagttggatcatttggaatgaatgtaagagaattgccaagggctcctcctactccagagaggaaacctcatccagggccatgaagccacttcctcaccatctgtgtgctgcttaagctaatgctgcgggaaccatggttccttgggaggaatcaagctgactcttggcatgagattcctgccttcctagggttgagagcggcactgccatggcttctctggacgacccaggggaagtgagggagggcttcctctgccctctgtgcctgaaggatctgcagtctttctatcagcttcactcacattacgaggaagaacactcaggggaagaccgtgatgtcaaagggcaaattaaaagtcttgtccagaaggctaaaaaagcaaaggacaggttgttgaaacgagaaggggatgatcgagcagagtcagggacccaaggatatgagtctttcagctatggaggggttgatccttacatgtgggaaccccaggagcttggtgctgtgagaagccatctttccgacttcaaaaaacaccgagctgctagaattgaccactatgttgtggaagtcaataaactaataatcaggttagagaagctcactgcatttgacagaacaaatactgagtctgcaaagattcgagcaatagaaaagtctgtggtgccttgggtcaacgaccaggatgtccctttctgtccagactgtgggaataagttcagcatccggaaccgccgccaccactgccgcctctgcgggtctattatgtgcaagaagtgtatggagctcatcagccttcccttggcaaaaattacgactttgcatggagaaagttgaccagaaagctccagaatacatcaggatggcagcatcattaaa

SEQ ID NO: 114162 - DNA, 3005 bp, Artificial Sequence
  derived and/or modified sequence
gcaggcgcacctgccgagttccgagcgaccgatggagatggcggctgcggctgagtgacggacggtggaggcccagagcccgggcctgaagggggggacaaacctgggtgcccgcaggagcccggcagggtgtcttacaagtatcaagaacttactatatgtggttgaataaacaatcaaggtaaagagcatcaagtaaaaacttctgcttgttgataagtacttcagacattcccccagtggctgaagtggcatatgaattatgaagttggatcatttggaatgaatgtaagagaattgccaagggctcctcctactccagagaggaaacctcatccagggccatgaagccacttcctcaccatctgtgtgctgcttaagctaatgctgcgggaaccatggttccttgggaggaatcaagctgactcttggcatgagattcctgccttcctagggttgagagcggcactgccatggcttctctggacgacccaggggaagtgagggagggcttcctctgccctctgtgcctgaaggatctgcagtctttctatcagcttcactcacattacgaggaagaacactcaggggaagaccgtgatgtcaaagggcaaattaaaagtcttgtccagaaggctaaaaaagcaaaggacaggttgttgaaacgagaaggggatgatcgagcagagtcagggacccaaggatatgagtctttcagctatggaggggttgatccttacatgtgggaaccccaggagcttggtgctgtgagaagccatctttccgacttcaaaaaacaccgagctgctagaattgaccactatgttgtggaagtcaataaactaataatcaggttagagaagctcactgcatttgacagaacaaatactgagtctgcaaagattcgagcaatagaaaagtctgtggtgccttgggtcaacgaccaggatgtccctttctgtccagactgtgggaataagttcagcatccggaaccgccgccaccactgccgcctctgcgggtctattatgtgcaagaagtgtatggagctcatcagccttcccttggcaaacaagctcaccagtgccagcaaggagtccctgagcacccacaccagccccagccagtcacccaacagtgtccatggctcccgccgaggcagcatcagcagcatgagcagtgtcagctcggtcctggatgagaaggacgatgaccggatccgctgctgtacacactgcaaggacacgctgctcaagagagagcagcagattgatgagaaggagcacacacctgacatcgtgaagctctacgagaaattacgactttgcatggagaaagttgaccagaaagctccagaatacatcaggatggcagcatcattaaatgctggggagacaacctacagtctggaacatgccagtgaccttcgagtggaagtgcagaaagtgtatgagctgatagacgctttaagtaagaagatcttaaccttgggcttgaaccaggaccctccaccacatccaagcaatttgcggctgcagagaatgatcagatactcagctacactttttgtgcaggaaaagttgcttggtttgatgtcactgccaaccaaagaacagtttgaggaactgaaaaagaaaaggaaggaggaaatggagaggaagagggccgtggagagacaagctgccctggagtcccagcgaaggcttgaggaaaggcagagtggcctggcttctcgagcggccaacggggaggtggcatctctccgcaggggccctgcccccttgagaaaggctgagggctggctcccactgtcaggaggtcaggggcagagtgaggactcagacccgctcctccagcagatccacaacatcacatcattcatcaggcaggccaaggccgcgggccgcatggatgaagtgcgcactctgcaggagaacctgcggcagctgcaggacgagtatgaccagcagcagacagagaaggccatcgagctgtcccggaggcaggctgaggaggaggacctgcagcgggaacagctgcagatgttgcgtgaacgggagttggaacgagaaagggagcagtttcgggtggcatccctgcacacacggactcggtccctggacttcagagaaatcggcccttttcagctggagcccagcagagagcctcgcacccaccttgcttatgctttggatctaggctcttccccagttccaagcagcacagctcccaagaccccttcacttagctcaactcaacccaccagagtgtggtctgggcccccagccgttggccaggagcgcttaccccagagcagcatgccacagcaacatgaggggccctccttaaacccctttgatgaggaagacctctccagccccatggaagaggccactactggtcctcctgctgcaggggtttccttagacccttcagcccgcatcctgaaagagtacaatcctttcgaggaagaggacgaggaggaggaagcagtggcagggaatccattcattcagccagacagcccagctcctaaccccttcagtgaggaagacgaacatccccagcagaggctctcaagccctctggttcctggtaacccctttgaggaacccacctgtatcaacccctttgagatggacagtgacagtgggccagaggctgaggagcccatagaggaagagctcctcctgcagcagatcgataacatcaaggcatacatctttgatgccaagcagtgcggccgcctggatgaggtagaggtgctgacagagaatctgcgggagctgaagcacaccctggccaagcagaaggggggcactgactgaccagcagtggagagggcacctttgggcccaggggtctggcaggagccagtggagcaggacagagggcaggcaggatggatggggaaggtggcagggtgagaactcagatgcacacaggtgaggggcaggaatctgctgttttgtgttgcgcactttgaggtatttccactacagttg

SEQ ID NO: 114163 - DNA, 582 bp, Artificial Sequence
  derived and/or modified sequence
accgatggagatggcggctgcggctgagtgacggacggtggaggcccagagcccgggcctgaagggggggacaaacctgggtgcccgcaggagcccggcagggtacatacagagggtgtcttacaagtatcaagaacttactatatgtggttgaataaacaatcaaggtaaagagcatcaagtaaaaacttctgcttgttgataagtacttcagacattcccccagtggctgaagtggcatatgaattatgaagttggatcatttggaatgaatgtaagagaattgccaagggctcctcctactccagagaggaaacctcatccagggccatgaagccacttcctcaccatctgtgtgctgcttaagctaatgctgcgggaaccatggttccttgggaggaatcaagctgactcttggcatgagattcctgccttcctagggttgagagcggcactgccatggcttctctggacgacccaggggaagtgagggagggcttcctctgccctctgtgcctgaaggatctgcagtctttctatcagcttcactcacattacgaggaagaacactcaggggaagac

SEQ ID NO: 114164 - protein, 541 aa, Artificial Sequence
  derived and/or modified sequence
MHPPVAPCKKLRCPPTRSFTPTRGRSKEGDRKAFFESSQWNIKKNQETISQLRKETKALELKLLDLLKGDEKVVQAVIREWKWEKPYLKNRTGQALEHLDHRLREKVKQQNALRHQVVLRQRRLEELQLQHSLRLLEMAEAQNRHTEVAKTMRNLENRLEKAQMKAQEAEHITSVYLQLKAYLMDESLNLENRLDSMEAEVVRTKHELEALHVVNQEALNARDIAKNQLQYLEETLVRERKKRERYISECKKRAEEKKLENERMERKTHREHLLLQSDDTIQDSLHAKEEELRQRWSMYQMEVIFGKVKDATGTDETHSLVRRFLAQGDTFAQLETLKSENEQTLVRLKQEKQQLQRELEDLKYSGEATLVSQQKLQAEAQERLKKEERRHAEAKDQLERALRAMQVAKDSLEHLASKLIHITVEDGRFAGKELDPQADNYVPNLLGLVEEKLLKLQAQLQGHDVQEMLCHIANREFLASLEGRLPEYNTRIALPLATSKDKFFDEESEEEDNEVVTRASLKIRSQKLIESHKKHRRSRRS

SEQ ID NO: 114165 - DNA, 1626 bp, Artificial Sequence
  derived and/or modified sequence
atgcacccccccgtggccccctgcaagaagctgagatgcccccccaccagaagcttcacccccaccagaggcagaagcaaggagggcgacagaaaggccttcttcgagagcagccagtggaacatcaagaagaaccaggagaccatcagccagctgagaaaggagaccaaggccctggagctgaagctgctggacctgctgaagggcgacgagaaggtggtgcaggccgtgatcagagagtggaagtgggagaagccctacctgaagaacagaaccggccaggccctggagcacctggaccacagactgagagagaaggtgaagcagcagaacgccctgagacaccaggtggtgctgagacagagaagactggaggagctgcagctgcagcacagcctgagactgctggagatggccgaggcccagaacagacacaccgaggtggccaagaccatgagaaacctggagaacagactggagaaggcccagatgaaggcccaggaggccgagcacatcaccagcgtgtacctgcagctgaaggcctacctgatggacgagagcctgaacctggagaacagactggacagcatggaggccgaggtggtgagaaccaagcacgagctggaggccctgcacgtggtgaaccaggaggccctgaacgccagagacatcgccaagaaccagctgcagtacctggaggagaccctggtgagagagagaaagaagagagagagatacatcagcgagtgcaagaagagagccgaggagaagaagctggagaacgagagaatggagagaaagacccacagagagcacctgctgctgcagagcgacgacaccatccaggacagcctgcacgccaaggaggaggagctgagacagagatggagcatgtaccagatggaggtgatcttcggcaaggtgaaggacgccaccggcaccgacgagacccacagcctggtgagaagattcctggcccagggcgacaccttcgcccagctggagaccctgaagagcgagaacgagcagaccctggtgagactgaagcaggagaagcagcagctgcagagagagctggaggacctgaagtacagcggcgaggccaccctggtgagccagcagaagctgcaggccgaggcccaggagagactgaagaaggaggagagaagacacgccgaggccaaggaccagctggagagagccctgagagccatgcaggtggccaaggacagcctggagcacctggccagcaagctgatccacatcaccgtggaggacggcagattcgccggcaaggagctggacccccaggccgacaactacgtgcccaacctgctgggcctggtggaggagaagctgctgaagctgcaggcccagctgcagggccacgacgtgcaggagatgctgtgccacatcgccaacagagagttcctggccagcctggagggcagactgcccgagtacaacaccagaatcgccctgcccctggccaccagcaaggacaagttcttcgacgaggagagcgaggaggaggacaacgaggtggtgaccagagccagcctgaagatcagaagccagaagctgatcgagagccacaagaagcacagaagaagcagaagaagctag

SEQ ID NO: 114166 - DNA, 1867 bp, Artificial Sequence
  derived and/or modified sequence
cacacccacacatgcaccctccggttgccccctgtaagaaactgaggtgccctcccacccgctcgttcacacctacacgaggccggagcaaagagggtgaccggaaggctttttttgagagctctcagtggaacatcaagaagaaccaggagaccatcagtcagctccgcaaggagactaaggcactggaactaaagctgctggacctgctcaagggagatgagaaagtggtccaggcagtgattcgcgaatggaagtgggagaagccatacctgaagaacaggacaggacaggccctggagcacctagaccaccggctgagggagaaggtgaagcagcagaacgccctgcggcaccaggtggtgttgcggcagaggcggctggaggagctccagctgcagcacagcctgcgccttctggagatggcggaggcgcaaaacagacacacggaggtggccaagaccatgcggaacctggagaaccgcctggagaaggcccagatgaaggcgcaggaggccgagcacattaccagcgtgtacctgcagctcaaggcctatctaatggacgagagcctcaacttggagaaccggctggactccatggaggctgaggtggtgaggaccaaacatgagctggaggcactgcacgtggtgaaccaagaggccctcaatgcccgggacattgccaagaaccagctgcagtacctagaggagaccttggttcgagagcgcaagaagcgggaacgctacataagtgagtgcaagaagcgcgccgaggagaagaaactggagaacgagcgcatggagcgcaagacccaccgcgagcacctgctgctacagtccgacgacaccatccaggacagcctgcatgccaaggaggaggagctgcggcagcgctggagcatgtaccagatggaggtgatctttggcaaggtcaaggacgccactggcactgacgagacgcactcgttggtgcggcggttcctggcccagggcgacaccttcgcgcagttggagacgctcaagagcgagaacgagcagacgttggtgaggctgaagcaggagaagcaacaactgcagcgggagctggaagacctcaagtactcgggggaggccacgctggtgagccagcagaaactgcaagccgaggcgcaggagcgtctcaagaaggaggagcggcggcacgccgaggccaaggaccagctggagcgcgccttgcgggcgatgcaagtggccaaggacagcctggagcacctggccagcaagctgatccacatcactgtggaggacggccgcttcgcgggaaaggagctggatccccaggcagataactatgtgccaaacctgctgggcctcgtggaggaaaagctgctgaaactgcaggcgcagctccagggccacgacgtgcaggagatgctgtgccacatcgctaaccgcgagttcctcgccagcttagagggaaggctgcccgaatacaacacccgcatcgccctgccccttgccacttccaaggacaagttttttgacgaagagagtgaggaggaggacaacgaggtagtgacccgcgcatcactcaagatccgttcccagaaattaatcgaaagtcacaagaagcaccgtcgctctcggaggtcctagactcgtcctgacacccaccaggcggcccccttcggagcccccgatccctccgggtctagcgcaggccccacggggccccttcaggggctgaacgcggcccggaccgggaacggaggcggccagcggcgcccggaggggaggaaggggccgggccagacgttcccacagtaaatctccccagctgggtccgccccggcctcagagttgcgcaataaatgttaccgaccatg

SEQ ID NO: 114167 - DNA, 1626 bp, Artificial Sequence
  derived and/or modified sequence
atgcacccacccgtggcaccttgcaagaaactgcgctgcccgcctacgagaagctttaccccaaccagagggcggagtaaggaaggcgaccggaaggcatttttcgagagctcccagtggaatattaaaaagaatcaggaaaccatctcccagttgcgtaaagagaccaaagctcttgaattaaaactgctcgacttgcttaaaggcgatgaaaaggtggtacaggcagttatcagagagtggaagtgggaaaagccgtacttaaaaaacaggaccggtcaggctctcgaacatttggatcatcggctgagagagaaagttaaacagcagaatgccttacgccaccaggtcgtgctgcgtcagcgtaggctagaggaactccagttacagcactcgctgcggctactggaaatggctgaagcccagaaccggcataccgaggtggcaaagaccatgagaaatcttgaaaatcgactggagaaggcccaaatgaaggcccaagaggcggagcatattactagtgtttatctacagctgaaggcctacctcatggacgagtccctgaatttagaaaaccgactggactccatggaggccgaggtcgttcgcacaaaacatgaattggaagctctgcacgtagtaaaccaggaggctcttaacgctcgggacatagccaagaatcagctccagtacctcgaagagacactggttagggagcgcaagaaaagggagcgttatatatccgaatgcaagaagagagctgaggagaagaagttagaaaacgaacgcatggaaaggaagacacatcgtgagcatctacttttgcagagtgacgacaccattcaggactccctccacgcaaaggaggaggaattgcgccagcggtggtccatgtatcaaatggaagtgatctttgggaaagtgaaggatgcaactggcaccgatgaaacccactctctcgtccgcaggtttctcgcccagggggatacttttgctcagctagagacactgaagagtgagaacgaacaaacgttggtgcggcttaaacaggagaaacagcaactacagcgtgaattggaggatcttaagtactcaggagaggctactctcgtgtcccagcaaaaattgcaggctgaagcacaggagaggcttaagaaagaggagcggcggcacgcagaagccaaggatcagcttgagcgcgccttgagggccatgcaggtggcgaaagattccttggagcacctggctagtaaactgatccacatcaccgtggaggacgggcggttcgcaggcaaggagctggatccccaggcagacaactacgtgccaaatctgctgggcctggtggaagagaagttgctgaagctgcaggcccaactccagggacacgacgttcaggagatgctatgccacatagctaaccgggaatttttagccagcctagagggccgcttacctgagtacaatacccgcattgctctccccctcgccacttcgaaagacaagttcttcgatgaagaatccgaagaggaagacaacgaggtggttactagggctagcctgaaaatcagatcgcagaaactgattgagagtcacaaaaaacatcgcagatctcgtcgatcctag

SEQ ID NO: 114168 - DNA, 1626 bp, Artificial Sequence
  derived and/or modified sequence
atgcacccccctgtggccccctgcaagaagctgcgctgcccccccaccaggagcttcacccccacccggggccgcagcaaggagggggacaggaaggccttctttgagagcagccagtggaacatcaagaagaaccaggagaccatcagccagctgaggaaggagaccaaggccctggagctgaagctgctggacctgctgaagggagatgagaaggtggtgcaggccgtcatccgggagtggaagtgggagaagccctacctgaagaacagaacaggccaggccctggagcacctggaccaccggctgcgggagaaggtgaagcagcagaatgccctgcggcaccaggtggtgctgcggcagaggcggctggaggagctgcagctgcagcacagcctgcggctgctggagatggccgaggcccagaacagacacacagaggtggccaagaccatgaggaacctggagaaccggctggagaaggcccagatgaaggcccaggaggccgagcacatcacctctgtgtacctgcagctgaaggcctacctgatggatgagagcctgaacctggagaaccggctggacagcatggaggccgaggtggtgaggaccaagcatgagctggaggccctgcacgtggtgaaccaggaggccctgaatgcccgggacatcgccaagaaccagctgcagtacctggaggagaccctggtgcgggagaggaagaagcgggagcgctacatcagcgagtgcaagaagagagctgaggagaagaagctggagaatgaaagaatggagaggaagacccaccgggagcacctgctgctgcagagtgatgacaccatccaggacagcctgcacgccaaggaggaggagctgcggcagcgctggagcatgtaccagatggaggtgatctttgggaaggtgaaggatgccaccggcacagatgagacccacagcctggtgcggcgcttcctggcccagggcgacacctttgcccagctggagaccctgaagtcagaaaatgagcagaccctggtgcggctgaagcaggagaagcagcagctgcagcgggagctggaggacctgaagtacagcggggaggccaccctggtgtcccagcagaagctgcaggccgaggcccaggagcggctgaagaaggaggagaggagacatgctgaggccaaggaccagctggagcgggccctgcgggccatgcaggtggccaaggacagcctggagcacctggccagcaagctgatccacatcaccgtggaggatggccgctttgctgggaaggagctggacccccaggccgacaactacgtgcccaacctgctgggcctggtggaggagaagctgctgaagctgcaggcccagctgcagggccatgatgtgcaggagatgctgtgccacatcgccaaccgggagttcctggccagcctggagggccgcctgcctgagtacaacacccgcatcgccctgcccctggccaccagcaaggacaagttctttgatgaggagagcgaggaggaggacaatgaggtggtgacccgggccagcctgaagatccgcagccagaagctgattgagagccacaagaagcaccggcgcagcagaagaagctag

SEQ ID NO: 114169 - DNA, 1626 bp, Artificial Sequence
  derived and/or modified sequence
atgcacccccccgtggccccctgcaagaagctgcggtgcccccccacacggagttttacgccaacacgcggccgatccaaggaaggggatcggaaggccttcttcgagagtagtcagtggaatatcaaaaagaaccaggagaccatatcccagcttagaaaggagactaaagctctggagctgaaactgctcgacctgctgaagggcgacgagaaggtggtgcaagccgttattcgggagtggaaatgggagaagccctatcttaaaaacagaaccggccaagccctcgagcatctggaccataggctaagagaaaaagttaaacagcagaatgctctcagacatcaggtggttcttaggcagcgaaggctggaggagctccagctacaacacagtctgcgcttgctcgagatggctgaagctcagaatcggcacacggaagttgctaagacgatgaggaacctcgaaaatcgactggagaaggcacagatgaaggcccaagaggcggagcacatcacctctgtgtatctgcaactgaaggcttacctgatggacgagtccttgaacctcgaaaatcgtttggacagcatggaggccgaagtggttaggaccaaacatgagctggaagccctccacgtggtgaatcaggaggcattgaatgctagggacatcgccaagaatcagcttcagtacctggaagaaacattggttagagagaggaagaagcgcgagcggtacatcagtgagtgtaagaaacgagcggaagagaagaaattggaaaacgagcgcatggagagaaagacccacagggaacatcttctactgcagtcggacgacaccatccaggactcactccatgccaaagaggaggaactgcgccagcgctggtctatgtatcagatggaggtgatcttcggtaaggtcaaggacgctacagggaccgacgaaacacacagcctggtcagaaggttcctggcccagggggacacctttgcgcagcttgagactctgaaatcggaaaacgaacagaccctggtccggttgaagcaggaaaaacagcagcttcagcgggaattggaggacctcaaatacagcggggaagctactttggtgagtcaacagaaactccaagcggaggctcaagaacgcctgaaaaaggaggagaggagacatgctgaggctaaagaccagctggaacgggccctgagggccatgcaggtggcgaaagactcacttgaacacctggcaagtaagctgatccacattaccgtggaagatggccgcttcgcaggaaaggagttggacccccaggccgacaactacgtcccaaatctgcttggcctggtggaagagaaactgcttaaattgcaagcccagcttcagggtcacgacgttcaggagatgctgtgccacattgcaaaccgagagttcctagccagcctggaaggcagattgcccgaatataacacaagaatcgctctccctctggcaactagtaaggacaaattcttcgatgaggagtcagaagaggaggacaacgaagtggtcacaagggcaagccttaaaatacggtctcagaaacttatcgagagtcataaaaagcaccgccggagccgccgctcatag

SEQ ID NO: 114170 - DNA, 1626 bp, Artificial Sequence
  derived and/or modified sequence
atgcatccccctgtagccccatgcaaaaagctcagatgtccacccaccagaagctttacccctacaagaggcaggagcaaagagggagacaggaaggcattttttgagagcagccagtggaacatcaagaagaatcaggagacaatttctcagctgcgcaaggagaccaaagccctggagctgaaattgttggatctcctgaagggagatgaaaaagttgtccaggctgtgatccgtgagtggaagtgggaaaagccttacctgaagaaccgcaccgggcaggccttggagcatcttgatcaccggctgagggagaaggtcaagcagcagaatgccttgagacaccaagtggttttgcgccaaagaagacttgaggagctgcagctgcagcacagtctccggcttctggaaatggcagaagcccagaatcgacataccgaggtcgcgaagaccatgaggaacttagagaaccggttagagaaagctcaaatgaaggcccaggaggcagagcacatcactagtgtttacctccagttgaaggcgtatcttatggatgaaagtctgaacttggaaaatcggctggatagcatggaggcagaagttgttcgaactaaacacgaactggaagcactgcatgtggtcaatcaggaggctttgaatgcacgcgatatagccaagaaccaactccaataccttgaggagaccctagtgagagagagaaaaaagcgggagagatatatctccgagtgcaagaagagagcggaagagaaaaagctggaaaatgagcgaatggagaggaagacacatagggaacatctgctgcttcagtctgatgatactatccaagacagcctgcatgctaaggaagaagagctccggcagcggtggtctatgtatcagatggaggtgatcttcggaaaggttaaagacgctactggaaccgatgaaacacacagcctcgtgaggagattcctggcccagggagataccttcgcccagttggagactctgaaaagcgagaatgagcaaacattagttcgcctcaaacaggagaagcagcagctccagcgcgagcttgaagatcttaagtatagcggcgaagcaacactggtgtcccagcaaaaactgcaggccgaggcccaggaacggctcaaaaaagaggagcgtcgacatgccgaggccaaagaccagctggagagagcactgcgcgctatgcaggtggcgaaagattccctggaacacctggcgagcaaactgattcatattaccgtcgaggatggacgctttgcgggtaaggaacttgacccgcaggctgacaactatgtccctaatttattaggtcttgtggaagagaagttgctcaagctgcaggctcaactgcaggggcatgatgtacaggagatgttgtgccatatagccaaccgagagttcctggcgtcgctggaggggagactccccgagtacaataccagaatcgccctacccctggccacaagtaaagataagttctttgatgaagagagcgaagaggaggacaacgaagtggtaacgagagctagtcttaagattcgctctcagaaactaattgagtctcataagaagcacaggcgttctcgcagatcctag

SEQ ID NO: 114171 - protein, 192 aa, Artificial Sequence
  derived and/or modified sequence
MEPGLWLLFGLTVTSAAGFVPCSQSGDAGRRGVSQAPTAARSEGDCEETVAGPGEETVAGPGEGTVAPTALQGPSPGSPGQEQAAEGAPEHHRSRRCTCFTYKDKECVYYCHLDIIWINTPEQTVPYGLSNYRGSFRGKRSAGPLPGNLQLSHRPHLRCACVGRYDKACLHFCTQTLDVSRLKSRTNKASRL

SEQ ID NO: 114172 - DNA, 579 bp, Artificial Sequence
  derived and/or modified sequence
atggagccaggactttggctgctgttcggactgacagtgacatcggcggctggcttcgtgccttgtagccagtcaggagacgccgggaggagaggggtgagccaggcaccaaccgccgcccgaagcgagggagactgcgaggagacagtagctggcccgggggaagaaacagtggccggccccggcgaggggaccgtcgcccctaccgctttgcagggcccctcccctggctcgccaggtcaggagcaggctgccgagggcgctccggagcatcatcggagtcgtcgatgcacatgcttcacttacaaagataaggagtgcgtgtactactgccacttggatattatctggatcaacacccctgagcagacggtgccctatggtctgtccaattaccggggatctttccgaggtaagagaagcgccggtccacttccaggcaacctgcagttatcccacagaccccatctgcggtgtgcttgtgtaggccggtatgataaagcttgcttacatttttgtactcaaactctggatgtgagccggcttaaaagccggactaacaaagcctctaggctatag

SEQ ID NO: 114173 - DNA, 579 bp, Artificial Sequence
  derived and/or modified sequence
atggagcccggcctgtggctgctgtttggcctgactgtgaccagcgctgctggctttgtgccctgcagccagagcggagatgctggccggcggggcgtgtcccaggcccccacagctgcccggtctgagggggactgtgaggagaccgtggccggccctggagaggagaccgtggccggccctggagagggcaccgtggcccccacagccctgcagggccccagccctggcagccctggccaggagcaggccgctgagggcgcccctgagcaccacaggagccgccgctgcacctgcttcacctacaaggacaaggaatgtgtgtactactgccacctggacatcatctggatcaacaccccagagcagacagtgccctacggcctgagcaactaccggggcagcttccggggcaagaggtctgctggccccctgcccggcaacctgcagctgagccaccggccccacctgcgctgtgcctgtgtgggccgctatgacaaggcctgcctgcacttctgcacccagaccctggatgtgtcccggctgaagagcaggaccaacaaggccagccggctgtag

SEQ ID NO: 114174 - DNA, 579 bp, Artificial Sequence
  derived and/or modified sequence
atggagcccggcctgtggctgctgttcggcctgaccgtgaccagcgccgccgggtttgtcccttgtagtcagtccggggatgccggccgcaggggcgttagtcaggccccgaccgccgctcgctctgaaggcgattgtgaggaaactgttgccggacctggtgaggaaactgtagccggcccaggagaaggtaccgttgctcccaccgcattacagggtccctcccccgggtcacctggtcaggaacaggccgcagagggagcgccagagcatcacaggagccggaggtgcacatgtttcacttacaaagacaaagagtgcgtctactattgtcatctggacattatctggattaacacacctgagcagaccgttccttacggattgagcaattacagagggagcttcagaggtaaaaggtcagccggccctcttccaggtaacttgcaactgtctcaccggcctcatctacggtgcgcatgcgttgggcggtatgataaggcctgccttcacttctgtacccagactctcgatgtttcacggctgaagagtcggaccaataaggcatctaggctatag

SEQ ID NO: 114175 - DNA, 579 bp, Artificial Sequence
  derived and/or modified sequence
atggaacccggactgtggctgctgtttggactcacagtaacgagcgccgctggctttgtgccttgcagtcagagtggggacgcaggcaggcgaggcgtaagtcaggcccctacagccgctcggtccgaaggtgactgcgaggaaacagtggcagggcctggtgaagagacagtggcaggcccaggagagggaacggtggctccaacggctctgcagggcccttcacccggaagtcctgggcaggagcaggccgctgagggcgcacccgagcatcatagaagtaggagatgtacttgtttcacatacaaagataaggagtgcgtgtactattgtcatctcgacatcatttggatcaacactccagagcagaccgtaccgtacggcttatctaactaccgaggaagtttccgtgggaagcgtagtgccggtccgctgcctgggaatctccaacttagtcatcggccacacctaagatgtgcttgcgtcgggagatacgacaaggcctgcctgcacttctgcacccagaccttggacgtgtcacggctaaagagcagaactaacaaggcatctcggctgtag

SEQ ID NO: 114176 - DNA, 579 bp, Artificial Sequence
  derived and/or modified sequence
atggagcccggcctgtggctgctgttcggcctgaccgtgaccagcgccgccggcttcgtgccctgcagccagagcggcgacgccggcagaagaggcgtgagccaggcccccaccgccgccagaagcgagggcgactgcgaggagaccgtggccggccccggcgaggagaccgtggccggccccggcgagggcaccgtggcccccaccgccctgcagggccccagccccggcagccccggccaggagcaggccgccgagggcgcccccgagcaccacagaagcagaagatgcacctgcttcacctacaaggacaaggagtgcgtgtactactgccacctggacatcatctggatcaacacccccgagcagaccgtgccctacggcctgagcaactacagaggcagcttcagaggcaagagaagcgccggccccctgcccggcaacctgcagctgagccacagaccccacctgagatgcgcctgcgtgggcagatacgacaaggcctgcctgcacttctgcacccagaccctggacgtgagcagactgaagagcagaaccaacaaggccagcagactgtag

SEQ ID NO: 114177 - DNA, 1153 bp, Artificial Sequence
  derived and/or modified sequence
gatgggcagcgcgctctgaaagtttatgaccgccgcagccaactcctggccggagctggagacgcagcgagcgatcggccggcctcgaacccccacagctggagggcgaggccagctgtacccggccccagtgccctttcgcggccacaagcggccgtcctcctggtccggtgctccggcgcctgatctaggttcatggagccggggctgtggctccttttcgggctcacagtgacctccgccgcaggattcgtgccttgctcccagtctggggatgctggcaggcgcggcgtgtcccaggcccccactgcagccagatctgagggggactgtgaagagactgtggctggccctggcgaggagactgtggctggccctggcgaggggactgtggccccgacagcactgcagggtccaagccctggaagccctgggcaggagcaggcggccgagggggcccctgagcaccaccgatccaggcgctgcacgtgcttcacctacaaggacaaggagtgtgtctactattgccacctggacatcatttggatcaacactcccgaacagacggtgccctatggactgtccaactacagaggaagcttccggggcaagaggtctgcggggccacttccagggaatctgcagctctcacatcggccacacttgcgctgcgcttgtgtggggagatatgacaaggcctgcctgcacttttgcacccaaactctggacgtcagcaggttgaagtcaaggaccaacaaagcaagcaggctttagacctccaccatccaaagctcatgcccggcagtggactcgccctcgctccatctacctgcccccgctgcctctttcaggaaggagccccttaggaggacaggcctgcagcatcctggtctcgggaggcttctgtcattgctcacacacagttcagatttccacctctttatagacaagaagtgaatttgcctggggcagaacacccacccaaagagtccccacttaacaataccccccccccacggcaagaatgcccaaatccgaatgaccccagttttcctaatgagtaaaatgatcccagatgtgccccagagcatgacgcctgcagctccggtttcatgcaggaaattggttttggagagttttggcaagttggaaa

SEQ ID NO: 114178 - protein, 510 aa, Artificial Sequence
  derived and/or modified sequence
MARGYGATVSLVLLGLGLALAVIVLAVVLSRHQAPCGPQAFAHAAVAADSKVCSDIGRGPVDRGARGAPWLCRGPPPPWPPALGAAVPAHHRAAPRGACGGPCPQPFPAQQHPAAFLAGVNPALFFNGTEPLRPQDPLPWPALATTLETVATEGVEVFYTGRLGQMLVEDIAKEGSQLTLQDLAKFQPEVVDALEVPLGDYTLYSPPPPAGGAILSFILNVLRGFNFSTESMARPEGRVNVYHHLVETLKFAKGQRWRLGDPRSHPKLQNASRDLLGETLAQLIRQQIDGRGDHQLSHYSLAEAWGHGTGTSHVSVLGEDGSAVAATSTINTPFGAMVYSPRTGIILNNELLDLCERCPRGSGTTPSPAVSGDRVGGAPGRCWPPVPGERSPSSMVPSILINKAQGSKLVIGGAGGELIISAVAQAIMSKLWLGFDLRAAIAAPILHVNSKGCVEYEPNFSQEVQRGLQDRGQNQTQRPFFLNVVQAVSQEGACVYAVSDLRKSGEAAGY

SEQ ID NO: 114179 - DNA, 1533 bp, Artificial Sequence
  derived and/or modified sequence
atggccaggggatatggcgctacagtgtcattggttctccttggcttaggtctcgcacttgctgtcattgtccttgcagtggtactgtcgagacaccaggcaccatgtggtccccaggccttcgctcatgccgccgtcgcggctgatagcaaagtatgcagcgacattggccgcggaccagttgacagaggcgcgcgcggcgctccatggctctgtcgcgggccaccccctccttggccccctgccctcggggccgctgtgcctgcccatcatcgcgcggcgccccggggagcgtgcggtggaccctgcccacagcccttcccagcccaacagcatccagcggcatttctggccggcgtgaaccctgccctgtttttcaacgggactgagcctctgcgaccgcaggatccacttccctggcccgcactagctaccaccctggagaccgtggcaacagagggagtggaagtgttctacaccgggagactgggccagatgcttgtcgaggatattgcaaaggaggggtctcagctaacgctgcaggatctcgccaagtttcagcccgaggtcgttgacgccctggaggtgccactgggcgattataccctgtactccccgccaccaccggcgggcggcgccattctaagttttattctcaatgtgttgcgcggcttcaactttagcacagagtctatggccagacccgaaggtagggtcaatgtctatcaccacctggtcgaaaccctcaagtttgccaagggccagagatggagactaggggatccgcgtagtcacccaaagttacagaacgcctcgcgcgatctgctgggcgaaaccttggcacagctcatcaggcagcaaatcgatgggagaggggaccaccagctgtcacactattcactggccgaggcttggggacacggaaccggtacaagccacgtgtcagtgctgggggaggacggctccgctgtggccgcaaccagcaccatcaacactcctttcggggcaatggtgtatagccctaggactgggataattctgaataatgagctgttagatctctgcgagcggtgccccaggggcagcgggacaacaccttcacctgccgtgtcaggagaccgtgtcggcggcgcccccggaaggtgttggccacctgtccctggcgagaggtccccatcctctatggtacccagcattttgatcaataaggcgcagggctctaaactggtcataggcggggcgggcggcgagctgatcatttcagctgtagcacaagcgatcatgtctaaactttggcttgggttcgacctgcgggctgccatcgccgcacctattcttcacgtgaactccaaaggttgtgttgagtacgaaccaaatttttcccaggaagtgcaacgaggtctccaggatagggggcagaaccaaacccagaggcccttcttcctgaatgtggtgcaggcagtgtcgcaggagggcgcttgtgtatacgcggtcagcgacctaaggaagtcgggcgaggcagccggatactag

SEQ ID NO: 114180 - DNA, 2120 bp, Artificial Sequence
  derived and/or modified sequence
ggccactccgtagtgtgcacttggtgagggcagcagctcgccacagctgccagccatctgtccattcacccatctgtccatctggcagcccgctgttcagacctgtctgtctgtccgcccatctgtaagcccatctctgtcccattgtctatctgaccatctttctcttactgtcctctttgtctagctatctggcctatctgtcgatccatcttcgtgtctgtcttcagcccccacctgtttgtccatctgtccaattacctgtgactctgtgcatcttcttgtccattcatctgcccacccatccgtccctccgtctgcccaccagccgcccctctcctcctgggctgcagagccatggcccggggctacggggccacggtcagcctagtcctgctgggtctggggctggcgctggctgtcattgtgctggctgtggtcctctctcgacaccaggccccatgtggcccccaggcctttgcccacgctgctgttgccgccgactccaaggtctgctcggatattggacggggcccagtggatcggggtgcccggggagctccgtggctatgccgaggcccaccgccgccatggccgcctgccctgggcgcagctgttccagcccaccatcgcgctgctccgaggggggcatgtggtggcccctgtcctcagccgtttcctgcacaacagcatcctgcggccttccttgcaggcgtcaaccctgcgctcttcttcaacgggacagaacccctgaggcctcaggacccactcccatggcctgcactggccaccaccctggagaccgtggccacagagggcgtggaggtcttctacacggggaggctgggccagatgctggtggaggacattgccaaggaagggagccagctgacgctgcaggacctggccaagttccagcccgaggtggtggatgccctggaggtgcccctgggggactataccctgtactcaccaccgccgcctgcagggggtgccattctcagctttatcctcaacgtgctaagagggttcaacttctcaacagagtctatggccaggcctgaagggagggtgaacgtgtaccaccaccttgtagagacgctcaagtttgccaaggggcagaggtggaggctgggggaccctcgaagccacccgaagctccagaatgcctcccgggacctgctgggggagaccctggcccagctcatccgccaacagatcgatggccggggggaccaccagctcagccactacagcttggccgaggcctggggccacgggacaggcacgtcccatgtgtctgtgctgggggaggatggcagcgccgtggctgccaccagcaccatcaacacaccctttggagcgatggtgtattcaccacggacaggcatcatcctcaacaacgagctcctggacttatgcgagcgatgcccccggggttccggcaccaccccctcacctgcagtgagtggagacagggtgggtggagctcccggaaggtgctggcccccagttccaggcgagcgttccccatcctccatggtgccctccatcttgatcaacaaagcccaggggtcgaagctagtgattggcggggctggcggggagctcatcatctctgctgtggcccaggccatcatgagcaagctgtggcttggctttgacctgagagcggccattgcagcccccatcctgcatgtcaacagcaagggctgtgtggagtacgagcccaacttcagccaggaggtgcagaggggactccaagaccgtggccagaaccagacccagaggcccttcttcctgaacgtggtccaggctgtgtcccaggagggggcctgtgtgtacgccgtctcggacctgaggaagagtggggaggccgcaggctactaagacactgctctgcccagagctgaagtctggccccaccatgagtcctgtgtccaggccggacatggctgggggaccaactactctggcaggatctggacccctggcaggggagtccagctgagagtggaagaggtggcggggaccagctgggcagatgagaggctgagcctcatccctaaccccctttcccagagcccctggtggtcctgaaccggcccctctatccctcc

SEQ ID NO: 114181 - DNA, 1533 bp, Artificial Sequence
  derived and/or modified sequence
atggcccggggctatggagccaccgtgtccctggtgctgctgggcctgggcctggccctggccgtgattgtgctggccgtggtgctgagccgccaccaggccccctgtggcccccaggcctttgcccacgccgctgtggccgctgacagcaaggtgtgcagcgacatcggccggggccctgtggacagaggagcccggggggccccctggctgtgccggggccccccaccaccctggcccccagccctgggcgctgctgtgcctgcccaccacagagctgcccccaggggggcctgtggcggcccctgcccccagcccttccctgcccagcagcaccctgctgccttcctggccggcgtgaacccagccctcttcttcaatggaacagagcccctgcggccccaggaccccctgccctggccagccctggccaccaccctggagaccgtggccacagagggcgtggaggtgttctacacaggccgcctgggccagatgctggtggaggacatcgccaaggagggcagccagctgaccctgcaggacctggccaagttccagcctgaggtggtggatgccctggaggtgcccctgggggactacaccctgtacagccccccacctcctgctgggggcgccatcctgtccttcatcctgaatgtgctgcggggcttcaacttcagcacagagagcatggcccggcctgagggccgggtgaatgtgtaccaccacctggtggagaccctgaagtttgccaagggccagcgctggaggctgggggaccccaggagccaccccaagctgcagaatgccagccgggacctgctgggggagaccctggcccagctgatccggcagcagattgatggccgcggggaccaccagctgagccactacagcctggccgaggcctggggccatggaacaggcaccagccacgtgtctgtgctgggagaagatggcagcgctgtggccgccaccagcaccatcaacaccccatttggagccatggtgtacagccccaggacaggcatcatcctgaacaatgagctgctggacctgtgtgagcgctgcccccggggcagcggcaccacccccagccctgctgtgtctggggacagagtgggcggggcccctggccgctgctggccccctgtgcctggagagaggagccccagctccatggtgcccagcatcctgatcaacaaggcccagggcagcaagctggtgattggaggagctggaggagagctgatcatctctgctgtggcccaggccatcatgagcaagctgtggctgggctttgacctgcgggccgccatcgccgcccccatcctgcacgtgaacagcaagggctgtgtggagtatgagcccaacttcagccaggaggtgcagaggggcctgcaggaccggggccagaaccagacccagaggcccttcttcctgaatgtggtgcaggccgtgtcccaggagggcgcctgtgtgtatgctgtgtctgacctgaggaagagcggggaggccgccggctactag

SEQ ID NO: 114182 - DNA, 1533 bp, Artificial Sequence
  derived and/or modified sequence
atggcccggggctacggcgccaccgtgagcctggtgctgctgggcctgggtctggccctggccgtgattgtgctggccgtggtgcttagcagacaccaagccccctgcgggccccaggctttcgcccacgccgccgtcgcagcagatagcaaagtctgtagcgacataggcagaggaccagtggaccgaggagctagaggcgcgccttggctgtgccggggaccccctcccccatggccgcccgccctaggtgccgctgtaccggctcatcacagagctgcccctaggggagcctgcggggggccgtgtccccagccttttccagcacagcaacacccggccgcattccttgctggggttaaccccgcccttttttttaacggcacagaaccactgcgtccccaagatccattaccttggcccgcccttgcaactacattggagactgttgcaaccgaaggggttgaggttttttataccggcaggctgggccagatgttggtggaggacattgcaaaagagggctcgcagctgactctgcaggatctggctaagttccagccagaagtagtcgatgctttggaggtcccgctgggcgactacactttgtactcccctccacctcctgcaggaggagccattctttccttcatcctgaacgtgctgcgcggtttcaactttagcacggagtccatggccagacctgagggtagagtgaatgtttatcatcacttagtggagactctcaaattcgcgaagggccagaggtggcggctcggagatcctcggtcccacccgaaattacaaaatgcaagcagggatcttctcggcgaaacattggctcaacttattaggcagcagatcgacggtaggggtgaccaccaattatcacattattcgctggctgaagcctgggggcacggcaccgggacatcacacgtcagtgtcctcggagaagacggatccgctgtagccgcgacttccactattaatactccgttcggcgcaatggtgtatagtccgaggaccggcattattctgaataacgagttgctcgatttatgcgagcgctgccccaggggttccggaacaacgccaagcccagccgtcagcggtgacagggttgggggggcccctgggagatgctggccccccgtgcctggagaacgctcgccctccagcatggtgccctcaatcctgattaataaggcccaagggtcaaagctcgtgattggtggggccggcggtgagttgattattagcgctgtcgcacaggccatcatgagcaagctgtggctgggatttgatttaagggccgccatagccgctcccatccttcatgttaatagcaaaggctgcgtggagtacgaaccaaacttttcccaggaagttcaaagaggcctgcaagatagaggacagaaccagacccagcgccctttttttctgaacgtcgtgcaagccgtgagtcaggaaggtgcttgcgtgtacgccgttagcgatctaaggaagtcaggagaagcggccgggtattag

SEQ ID NO: 114183 - DNA, 1533 bp, Artificial Sequence
  derived and/or modified sequence
atggccaggggatatggcgctactgtaagtcttgtgttgctggggcttgggttggctctcgctgtaattgtcctcgcagttgtactcagtcgtcatcaggccccttgtgggccacaggcatttgcgcatgcggcagtggcagccgattctaaagtgtgctctgatattggaagaggaccagtagaccggggagctcgcggagccccatggttgtgtagaggaccaccacccccttggccacctgccctcggggctgcagtccccgctcaccacagggctgcacctcggggagcttgcggcggtccgtgtcctcagcccttcccagcccagcagcatcccgcagcttttcttgctggggttaaccctgctctcttttttaacggcaccgagcctctacgccctcaggacccactcccctggcccgctttggccactacattagagaccgtggccacagagggggtcgaggtgttctacaccggccgtctgggccagatgttagtggaagacatcgccaaggaggggagtcagctgaccctccaggatctggcaaaatttcaacccgaggtggtggatgctctggaggtgcctctcggcgattatacattgtactcaccccctcctcctgcgggtggtgccattctttcattcatcctgaatgtcctgagaggcttcaacttcagcactgaaagcatggcacgacctgaaggcagggtcaatgtgtatcatcacttggttgagacactcaagttcgccaaggggcagcggtggcggctgggtgacccacgcagccaccccaagttgcagaacgcttccagagacttgcttggagaaaccctggcccaactaatcagacaacagatcgacgggaggggcgaccatcaactgagccattacagcctggcggaagcgtggggacatggtacaggtacaagccatgtctctgtgcttggggaggacggatcagccgttgccgcaactagcacgattaatactccctttggagccatggtatacagcccccgaacaggaatcatcctgaacaatgagttgctggatctctgcgagcgctgccccagaggtagcgggacgactcccagtcccgcagtcagtggggacagggtcgggggtgcacccggaaggtgttggccccctgtccccggagagcgcagcccttctagcatggtgcctagcatcctgataaataaggctcaaggcagtaagcttgtgatcggcggagctggaggagaactcatcatatctgccgttgcgcaggccataatgtccaagctgtggctgggcttcgacttgcgcgctgctatcgcggcacctatcttgcatgtgaacagcaaaggatgtgtagagtacgagccaaatttttcgcaggaagtacagcgaggactgcaggataggggtcagaaccagactcagcggcctttcttcctcaacgtagtgcaggcagtgagtcaggaaggcgcatgtgtgtatgcagtgtctgacttgcggaaatctggcgaagccgctggatactag

SEQ ID NO: 114184 - DNA, 1533 bp, Artificial Sequence
  derived and/or modified sequence
atggccagaggctacggcgccaccgtgagcctggtgctgctgggcctgggcctggccctggccgtgatcgtgctggccgtggtgctgagcagacaccaggccccctgcggcccccaggccttcgcccacgccgccgtggccgccgacagcaaggtgtgcagcgacatcggcagaggccccgtggacagaggcgccagaggcgccccctggctgtgcagaggccccccccccccctggccccccgccctgggcgccgccgtgcccgcccaccacagagccgcccccagaggcgcctgcggcggcccctgcccccagcccttccccgcccagcagcaccccgccgccttcctggccggcgtgaaccccgccctgttcttcaacggcaccgagcccctgagaccccaggaccccctgccctggcccgccctggccaccaccctggagaccgtggccaccgagggcgtggaggtgttctacaccggcagactgggccagatgctggtggaggacatcgccaaggagggcagccagctgaccctgcaggacctggccaagttccagcccgaggtggtggacgccctggaggtgcccctgggcgactacaccctgtacagcccccccccccccgccggcggcgccatcctgagcttcatcctgaacgtgctgagaggcttcaacttcagcaccgagagcatggccagacccgagggcagagtgaacgtgtaccaccacctggtggagaccctgaagttcgccaagggccagagatggagactgggcgaccccagaagccaccccaagctgcagaacgccagcagagacctgctgggcgagaccctggcccagctgatcagacagcagatcgacggcagaggcgaccaccagctgagccactacagcctggccgaggcctggggccacggcaccggcaccagccacgtgagcgtgctgggcgaggacggcagcgccgtggccgccaccagcaccatcaacacccccttcggcgccatggtgtacagccccagaaccggcatcatcctgaacaacgagctgctggacctgtgcgagagatgccccagaggcagcggcaccacccccagccccgccgtgagcggcgacagagtgggcggcgcccccggcagatgctggccccccgtgcccggcgagagaagccccagcagcatggtgcccagcatcctgatcaacaaggcccagggcagcaagctggtgatcggcggcgccggcggcgagctgatcatcagcgccgtggcccaggccatcatgagcaagctgtggctgggcttcgacctgagagccgccatcgccgcccccatcctgcacgtgaacagcaagggctgcgtggagtacgagcccaacttcagccaggaggtgcagagaggcctgcaggacagaggccagaaccagacccagagacccttcttcctgaacgtggtgcaggccgtgagccaggagggcgcctgcgtgtacgccgtgagcgacctgagaaagagcggcgaggccgccggctactag

SEQ ID NO: 114185 - protein, 391 aa, Artificial Sequence
  derived and/or modified sequence
MAGKRSGWSRAALLQLLLGVNLVVMPPTRARSLRFVTLEGMLQHWELGQALRQRYHGFLNTSYHRQEVYVRSTDFDRTLMSAEANLAGLFPPNGMQRFNPNISWQPIPVHTVPITEDRLLKFPLGPCPRYEQLQNETRQTPEYQNESSRNAQFLDMVANETGLTDLTLETVWNVYDTLFCEQTHGLRLPPWASPQTMQRLSRLKDFSFRFLFGIYQQAEKARLQGGVLLAQIRKNLTLMATTSQLPKLLVYSAHDTTLVALQMALDVYNGEQAPYASCHIFELYQEDSGNFSVEMYFRNESDKAPWPLSLPGCPHRCPLQDFLRLTEPVVPKDWQQECQLASGPADTEVIVALAVCGSILFLLIVLLLTVLFRMQAQPPGYRHVADGEDHA

SEQ ID NO: 114186 - DNA, 1176 bp, Artificial Sequence
  derived and/or modified sequence
atggctggaaagcgctcgggatggtcgagagccgcactgttgcagctgttactcggcgtgaatctggtggtgatgccccccacccgggcaaggagccttagattcgtaacccttgagggcatgctgcagcactgggaactgggccaagccctgaggcagcgatatcacggttttctcaacacgtcctatcataggcaagaagtgtacgtacgatccacagattttgatcggactctgatgtctgccgaagccaacttggcaggcctttttcctcctaacggcatgcagaggttcaaccccaatatcagctggcaaccaatccccgtacacacagtgcccatcacagaggaccggcttttgaagttccccctgggcccctgcccgcgatatgagcaactgcaaaacgagaccagacaaacccctgaatatcagaatgagagctcaaggaatgctcagttcctcgatatggtggccaacgagacgggcctgactgacttgacccttgagacggtgtggaatgtgtacgatacgctgttttgtgaacagacacatggattaaggttaccaccctgggcctccccacagaccatgcagagattgtcacgcctcaaagacttcagcttcaggtttctcttcggcatctatcagcaggctgaaaaggctcggctgcagggaggcgtgctcctggctcagattagaaaaaatttgacgttaatggccacaactagccagctgcctaagttgcttgtgtattctgcccatgacaccaccctggtggccctgcagatggcactggacgtctacaacggggaacaggctccttatgcttcttgtcatatctttgaattgtatcaggaagatagtgggaatttctcagtggaaatgtactttaggaatgagtcagataaagccccctggcctttgtcccttccaggttgtcctcaccgctgtccgctccaggactttttgcggttgaccgaacccgtcgtaccgaaagactggcagcaggaatgtcagctggcatcgggccccgctgatactgaggttattgtggctctggccgtgtgtgggagtatactcttcctgttgattgtgcttcttcttaccgtcttatttcgcatgcaagcccaaccacccggctatcgccacgtggcagatggagaagatcatgcctag

SEQ ID NO: 114187 - DNA, 1176 bp, Artificial Sequence
  derived and/or modified sequence
atggccggcaagaggagcggctggagcagagctgccctgctgcagctgctgctgggcgtgaacctggtggtgatgccacccacccgggcccggagcctgcgctttgtgaccctggagggcatgctgcagcactgggagctgggccaggccctgcggcagcgctaccacggcttcctgaacaccagctaccaccggcaggaggtgtatgtgcgcagcacagactttgacaggaccctgatgtctgctgaggccaacctggccggcctcttccccccaaatggcatgcagcgcttcaaccccaacatctcctggcagcccatccctgtgcacacagtgcccatcacagaggaccggctgctgaagttccccctgggcccctgccccaggtatgagcagctgcagaatgagacccggcagaccccagagtaccagaatgaaagcagcagaaatgcccagttcctggacatggtggccaatgaaacaggcctgacagacctgaccctggagaccgtgtggaatgtgtatgacaccctcttctgtgagcagacccacggcctgcggctgcccccctgggccagcccccagaccatgcagaggctgagccggctgaaggacttctccttccgcttcctgtttggcatctaccagcaggccgagaaggcccggctgcagggcggcgtgctgctggcccagatcaggaagaacctgaccctgatggccaccaccagccagctgcccaagctgctggtgtacagcgcccatgacaccaccctggtggccctgcagatggccctggatgtgtacaatggagagcaggccccctatgccagctgccacatctttgagctgtaccaggaggacagcggcaacttctctgtggagatgtacttcagaaatgaaagtgacaaggccccctggcccctgagcctgcccggctgcccccaccgctgccccctgcaggacttcctgcggctgacagagcctgtggtgcccaaggactggcagcaggagtgccagctggccagcggccctgctgacacagaggtgattgtggccctggccgtgtgtggcagcatcctcttcctgctgattgtgctgctgctgactgtgctcttcaggatgcaggcccagcccccaggctacagacatgtggctgatggagaggaccacgcctag

SEQ ID NO: 114188 - DNA, 1176 bp, Artificial Sequence
  derived and/or modified sequence
atggccggcaagcggagcggctggagccgggccgccctgctgcagttgctgctcggcgtgaatttggtcgtgatgccacccacgcgcgctcgctccctcagattcgttacgctggaaggcatgctgcaacactgggagctcggccaggcactgagacagaggtaccacggttttttaaacactagctatcacaggcaagaagtttatgtgcggtccacggattttgatagaacccttatgagtgcagaggccaacctcgccggcctgtttcctcccaatggtatgcaaagattcaatccgaatatctcctggcagccaattccagtgcacacagttcccattaccgaggacagattattaaaattcccactggggccatgtccgcgttatgaacagctccagaacgagaccaggcaaacacccgaatatcagaacgagtcatctcgaaacgcccagttccttgacatggtagccaacgagactggcctcactgacctgaccttagagactgtgtggaatgtgtacgacacattattttgcgagcagacgcacggattgcggcttccaccgtgggcgtccccacagacaatgcagcggctcagtaggcttaaagattttagtttccgcttcctgtttggcatttaccagcaagcggaaaaagctcggctccaggggggagtgctcctggcgcagatcagaaagaacctgacacttatggccactacaagccaactccccaagcttctggtctacagcgcacacgatacaactcttgtagcactccagatggccctggacgtctataatggcgaacaggccccctacgcgtcttgccacatttttgagctgtaccaggaggattctggaaacttctctgtcgagatgtattttagaaacgagagtgacaaggcaccttggccactgagtctccccggttgcccccaccggtgtcctcttcaggacttcctgaggctcaccgaacccgttgtccctaaggactggcagcaggagtgccaactggcctcagggcctgcagacaccgaggtcatcgttgctttggccgtgtgtgggagcatattgttcctgttaattgtcctcctgttaaccgtcttgttccgtatgcaagcacagccccccggataccgccacgtggcagatggagaggatcatgcttag

SEQ ID NO: 114189 - DNA, 1176 bp, Artificial Sequence
  derived and/or modified sequence
atggccggaaagaggagcgggtggtctcgcgcagcactcctccagctgctcctgggagtgaaccttgtagtcatgccacccacccgcgctcggagtttgagattcgtcacccttgagggaatgctgcagcattgggaactcgggcaggctctacggcagcgctatcacggcttccttaacacttcttatcaccggcaagaagtttacgttcgttccactgatttcgaccgcactctcatgtccgccgaagctaacctcgctggtttgttcccccctaacgggatgcaacggtttaacccgaacattagttggcagcctatacccgtgcatacagtacctatcacggaagaccgcttactcaagtttccgcttggcccatgtcctcggtacgaacaactccagaacgagactaggcagaccccagagtatcaaaacgaatcaagcagaaacgcccagtttcttgacatggtggctaatgaaacaggactgacagatctgactttggagactgtgtggaatgtgtatgacacacttttctgcgaacagacccacggacttcgcttacctccgtgggctagccctcagactatgcagaggctaagccgactgaaagatttttcattccgctttttatttggaatctaccagcaggccgagaaagccagattacaaggaggcgtgctgctggctcaaatccggaaaaatcttacgttgatggccacaacatcccagcttcctaaattgctcgtatacagtgcacatgataccacactggttgctttgcagatggctcttgatgtctacaatggcgagcaggcaccatatgcctcctgtcatatctttgagctttatcaggaagacagcggtaacttctctgtggaaatgtacttccgtaatgagtccgacaaggctccctggccactaagcctacccggttgtccccaccgttgtccgctgcaggacttcctgcgcctgaccgaacccgtagtaccaaaggactggcagcaggaatgccagcttgccagcggacccgcagacacagaggtgatcgtggctctggccgtgtgtggctccatcctctttctccttattgtcttactcctcaccgtgctgttcaggatgcaggcacaaccaccaggttaccgacacgtggcagatggcgaggatcacgcctag

SEQ ID NO: 114190 - DNA, 1499 bp, Artificial Sequence
  derived and/or modified sequence
agcttgtttgctgcatagattacaacggtgatggcgggcaagcggtccggctggagccgggcggctctcctccagctccttctcggcgtgaacctggtggtgatgccgcccacccgggcccggagtctgcgcttcgttaccttggaggggatgctacagcactgggaactgggccaggccctgcggcagcgctatcacggcttcctaaacacctcttatcaccggcaagaggtttatgtgcgaagcacagactttgaccggactctcatgagtgctgaggccaacctggctggactcttccctcccaacgggatgcagcgcttcaacccgaacatctcgtggcagcctattcctgtgcacactgtgcccatcactgaggacaggctgctgaagttcccgttgggcccatgtccccgttatgagcagctgcagaacgagacccggcagacaccagagtatcagaatgagagttctcggaatgcacaatttctggacatggtggccaacgagacagggcttacagacctgacactggagaccgtctggaatgtctatgacacactcttctgtgagcaaacgcacgggctgcgcctgccgccctgggcctcaccccaaaccatgcagcgtctcagccggctaaaggacttcagcttccgcttcctcttcggaatctaccagcaggcggagaaggcccggcttcaggggggagtcctgctggctcagataaggaagaacctgaccctaatggcgaccacctcccagctccccaagctgctggtttactctgcgcacgacactaccctggttgccctgcaaatggcactggatgtctacaatggtgaacaagccccctacgcctcctgccacatatttgaactgtaccaggaagattctgggaatttctcagtggagatgtactttcggaacgagagtgacaaggccccctggccgctcagcctgcctggctgccctcaccgctgcccactgcaggacttccttcgcctcacagagcccgtcgtgcccaaggattggcagcaggagtgccagctggcaagcggtcctgcagacacagaggtgattgtggccttggctgtatgtggctccatcctcttcctcctcatagtgctgctcctcaccgtcctcttccggatgcaggcccagcctcctggctaccgccacgtcgcagatggggaggaccacgcctgacaaccactcagcccccttccctccacctcctaggggaggtgggctgggccctcgctcctgactgttgctgctccccagcccatggacaggagatcctgggttgggcctccctctgatgaccccagccagatgagcgagtggggctcagcgtggcccatggtgcctgtcactcagcattcccatgcctgatgtttaccaagtgctgtgttggacactggctttctccaaacaggatttgcctcctccacgctccctacacacctgagatgtaaactggcagtcagtgttcactc

SEQ ID NO: 114191 - DNA, 1176 bp, Artificial Sequence
  derived and/or modified sequence
atggccggcaagagaagcggctggagcagagccgccctgctgcagctgctgctgggcgtgaacctggtggtgatgccccccaccagagccagaagcctgagattcgtgaccctggagggcatgctgcagcactgggagctgggccaggccctgagacagagataccacggcttcctgaacaccagctaccacagacaggaggtgtacgtgagaagcaccgacttcgacagaaccctgatgagcgccgaggccaacctggccggcctgttcccccccaacggcatgcagagattcaaccccaacatcagctggcagcccatccccgtgcacaccgtgcccatcaccgaggacagactgctgaagttccccctgggcccctgccccagatacgagcagctgcagaacgagaccagacagacccccgagtaccagaacgagagcagcagaaacgcccagttcctggacatggtggccaacgagaccggcctgaccgacctgaccctggagaccgtgtggaacgtgtacgacaccctgttctgcgagcagacccacggcctgagactgcccccctgggccagcccccagaccatgcagagactgagcagactgaaggacttcagcttcagattcctgttcggcatctaccagcaggccgagaaggccagactgcagggcggcgtgctgctggcccagatcagaaagaacctgaccctgatggccaccaccagccagctgcccaagctgctggtgtacagcgcccacgacaccaccctggtggccctgcagatggccctggacgtgtacaacggcgagcaggccccctacgccagctgccacatcttcgagctgtaccaggaggacagcggcaacttcagcgtggagatgtacttcagaaacgagagcgacaaggccccctggcccctgagcctgcccggctgcccccacagatgccccctgcaggacttcctgagactgaccgagcccgtggtgcccaaggactggcagcaggagtgccagctggccagcggccccgccgacaccgaggtgatcgtggccctggccgtgtgcggcagcatcctgttcctgctgatcgtgctgctgctgaccgtgctgttcagaatgcaggcccagccccccggctacagacacgtggccgacggcgaggaccacgcctag

SEQ ID NO: 114192 - DNA, 477 bp, Artificial Sequence
  derived and/or modified sequence
atggaccttgcttccgaaatcacttctgccacacagacttccagcctatgtagctccggaagaggccacgctgggtaccctgcacctggtatcgtagcccatgggtttgagacacatgggaccgccagggttgcccagggccatcttctacctccctgccttcttccacctccccaaatgcccgtccttgcagccctcagggatcttagcaggaggggaagcacttcaagcagccgttcaccctcacgccccgtctctacttctgcctctaaaccgtgtcttcctgcctcttgcctgggcgagacatggtcaatttccatcaatctcgtgggatcatctggccaccttcaatctcccggagcacagagagacgcacaaagggagactggctgcctgggcccaagctggctccctcaccatcagggacgcgatgaagaactttccctcagtcacagtgcccaaggcgaagaattctag

SEQ ID NO: 114193 - DNA, 483 bp, Artificial Sequence
  derived and/or modified sequence
atggcaggcaaacgaagcggctggtctcgggccgccttgctccagctcttgctcggagtaaacctcgtcgttatgcccccaaccagagcaaggagcctgcgcttcgtcaccttgctgtacaggcacggcgacaggtctcctgtcaaaacgtatccaaaagatccatatcaagaggaggagtggcctcagggctttggccagctgaccaaggagggcatgctgcagcactgggagctcggtcaggcacttagacagaggtaccacggctttctaaatactagctatcataggcaggaggtttatgtgaggtcaactgattttgaccgcactctcatgtcagcggaggctaacctggctgggctttttcctcccaacggaatgcagcgttttaaccccaacatcagctggcagcctattcccgtccatactgtgcctataacggaggacagggtccgcgttgccagcccgtccctgggatggtag

SEQ ID NO: 114194 - DNA, 483 bp, Artificial Sequence
  derived and/or modified sequence
atggccggcaagaggagcggctggagcagagctgccctgctgcagctgctgctgggcgtgaacctggtggtgatgccacccacccgggcccggagcctgcgctttgtgaccctgctgtaccgccacggggacaggagccctgtgaagacctaccccaaggacccctaccaggaggaggagtggccccagggcttcggccagctgaccaaggagggcatgctgcagcactgggagctgggccaggccctgcggcagcgctaccacggcttcctgaacaccagctaccaccggcaggaggtgtatgtgcgcagcacagactttgacaggaccctgatgtctgctgaggccaacctggccggcctcttccccccaaatggcatgcagcgcttcaaccccaacatctcctggcagcccatccctgtgcacacagtgcccatcacagaggacagagtgcgggtggccagccccagcctgggctggtag

SEQ ID NO: 114195 - DNA, 483 bp, Artificial Sequence
  derived and/or modified sequence
atggccggcaagcggagcggctggagccgggccgccctgctgcagctcctactgggcgtcaacctggtggtgatgcctccaactagagcccggagcctcagatttgtgacactgctgtacaggcatggagatcggtcccctgtaaaaacatatccaaaggacccgtaccaagaagaagagtggcctcaagggtttggacaacttacaaaagaaggcatgctgcagcattgggagttagggcaagccctgcgccagagataccacggcttccttaatacttcttaccaccggcaggaggtgtacgtccgaagtacggattttgaccggacgctcatgagcgctgaagctaacctggctggtctatttccaccaaacggaatgcagcggttcaaccccaatattagctggcagcctattccagttcacacagtgccgattaccgaggatcgagtacgggtcgcgagtccctcattgggatggtag

SEQ ID NO: 114196 - DNA, 483 bp, Artificial Sequence
  derived and/or modified sequence
atggcagggaaaaggagtggttggagccgcgctgcgttgctacaactgctcctgggtgttaatctggttgtcatgcccccaacccgagccaggagcctgcgatttgtcactctattgtatcggcatggtgatagatcccctgtaaaaacctacccgaaggacccatatcaggaggaggaatggccccaagggtttggccaactgactaaggaggggatgctgcaacactgggaactgggccaggcgctgcgccagagataccatggatttttgaacacctcgtaccatcgccaggaggtgtacgtccggtcaaccgacttcgataggacgctgatgagcgccgaggcgaatttagccggactgttccctccaaacggaatgcagcggttcaatccaaatatctcctggcaacctatccctgttcataccgtgcctataacagaggaccgggtgcgcgtggctagccccagcctgggatggtag

SEQ ID NO: 114197 - DNA, 593 bp, Artificial Sequence
  derived and/or modified sequence
ttgtttgctgcatagattacaacggtgatggcgggcaagcggtccggctggagccgggcggctctcctccagctccttctcggcgtgaacctggtggtgatgccgcccacccgggcccggagtctgcgcttcgttaccttgctgtaccgccatggagaccgttcaccagtgaagacatatcccaaggacccctatcaggaagaagaatggccccaggggtttggtcagttaaccaaggaggggatgctacagcactgggaactgggccaggccctgcggcagcgctatcacggcttcctaaacacctcttatcaccggcaagaggtttatgtgcgaagcacagactttgaccggactctcatgagtgctgaggccaacctggctggactcttccctcccaacgggatgcagcgcttcaacccgaacatctcgtggcagcctattcctgtgcacactgtgcccatcactgaggacagggtaagagtggccagcccttccctggggtggtgaggggacagctctggccgtaggcctgctgatgccaggctccttttcccgctgcctgtttccccgcttcgctctacagctgctga

SEQ ID NO: 114198 - DNA, 483 bp, Artificial Sequence
  derived and/or modified sequence
atggccggcaagagaagcggctggagcagagccgccctgctgcagctgctgctgggcgtgaacctggtggtgatgccccccaccagagccagaagcctgagattcgtgaccctgctgtacagacacggcgacagaagccccgtgaagacctaccccaaggacccctaccaggaggaggagtggccccagggcttcggccagctgaccaaggagggcatgctgcagcactgggagctgggccaggccctgagacagagataccacggcttcctgaacaccagctaccacagacaggaggtgtacgtgagaagcaccgacttcgacagaaccctgatgagcgccgaggccaacctggccggcctgttcccccccaacggcatgcagagattcaaccccaacatcagctggcagcccatccccgtgcacaccgtgcccatcaccgaggacagagtgagagtggccagccccagcctgggctggtag

SEQ ID NO: 114199 - protein, 236 aa, Artificial Sequence
  derived and/or modified sequence
MVANETGLTDLTLETVWNVYDTLFCEQTHGLRLPPWASPQTMQRLSRLKDFSFRFLFGIYQQAEKARLQGGVLLAQIRKNLTLMATTSQLPKLLVYSAHDTTLVALQMALDVYNGEQAPYASCHIFELYQEDSGNFSVEMYFRNESDKAPWPLSLPGCPHRCPLQDFLRLTEPVVPKDWQQECQLASGPADTEVIVALAVCGSILFLLIVLLLTVLFRMQAQPPGYRHVADGEDHA

SEQ ID NO: 114200 - DNA, 711 bp, Artificial Sequence
  derived and/or modified sequence
atggtggccaacgaaacaggcctaacggatctgacgttggagacagtttggaatgtttacgataccctcttctgtgagcagacacacggcttaaggctgcccccctgggcttctccccagactatgcagcgtctatcccgtctcaaagatttcagttttcgcttccttttcgggatctatcagcaagccgaaaaagccaggttacaaggcggtgtcctgttagcccagataaggaaaaacctgaccctgatggccacaacctcccagctgcccaagctccttgtctactcagcccatgataccaccctcgtggcactgcagatggccctggatgtatacaacggcgagcaggctccttacgcgtcatgtcatatctttgagctctaccaggaagatagcggcaatttctctgtcgagatgtatttcagaaatgagtcggataaggccccgtggccactcagtctgccgggatgcccccatcggtgtccccttcaggacttcctgcggttaacagagcccgttgtgccaaaggactggcaacaggagtgtcagctcgcctctgggccagctgatacagaggtgatcgtggctctagcggtgtgtgggagtattctcttcctactgatagtactcctgctgaccgtcctgtttcgaatgcaggcccagcccccagggtatcggcatgttgctgatggggaggaccacgcttag

SEQ ID NO: 114201 - DNA, 711 bp, Artificial Sequence
  derived and/or modified sequence
atggtggccaatgagaccggcctgacagacctgaccctggagaccgtgtggaatgtgtatgacaccctcttctgtgagcagacccacggcctgcggctgcccccctgggccagcccccagaccatgcagaggctgagccggctgaaggacttctccttccgcttcctgtttggcatctaccagcaggccgagaaggcccggctgcagggcggcgtgctgctggcccagatcaggaagaacctgaccctgatggccaccaccagccagctgcccaagctgctggtgtacagcgcccatgacaccaccctggtggccctgcagatggccctggatgtgtacaacggggagcaggccccctatgccagctgccacatctttgagctgtaccaggaggacagcggcaacttctctgtggagatgtacttcagaaatgaaagtgacaaggccccctggcccctgagcctgcccggctgcccccaccgctgccccctgcaggacttcctgcggctgacagagcctgtggtgcccaaggactggcagcaggagtgccagctggccagcggccctgctgacacagaggtgattgtggccctggccgtgtgtggcagcatcctcttcctgctgattgtgctgctgctgactgtgctcttcaggatgcaggcccagcccccaggctaccgccacgtggctgatggagaagatcatgcctag

SEQ ID NO: 114202 - DNA, 711 bp, Artificial Sequence
  derived and/or modified sequence
atggtggccaacgagaccggcctgaccgacctgaccctggagaccgtttggaacgtctatgatactctgttctgcgagcaaacccacgggttgcggctgccgccatgggcttcaccgcagactatgcagaggctgagtagattgaaggattttagctttaggtttctgttcggtatctatcagcaggcagagaaggcgcgcctacagggtggtgtgcttttggcacagattcgcaaaaatttgacactgatggctacaacaagccagttaccaaaactgcttgtttactccgcccacgacactaccctcgttgctctgcaaatggcgttagatgtgtacaacggggagcaggctccctacgcctcttgccacatatttgaactctatcaagaggactcaggcaattttagcgtcgaaatgtacttcaggaacgaaagcgataaagcgccttggccactgtcattgcccgggtgtccccatcggtgccctctgcaggacttcctgcgccttaccgagccagtggtccctaaagattggcaacaggaatgccagctcgctagcggccccgctgacacagaggtcatagtagcactagcagtatgtggcagtattctctttttattgattgtactgctgttaactgttctctttcggatgcaggctcagcctcccggctacagacacgtagcggacggggaagaccacgcatag

SEQ ID NO: 114203 - DNA, 711 bp, Artificial Sequence
  derived and/or modified sequence
atggtggcaaacgagacgggcctaaccgacctaacattagaaacagtctggaatgtgtacgataccctgttttgcgagcagactcatggccttaggttgcccccatgggcctcaccccagacaatgcagaggctttcaaggctgaaggactttagttttcggttcctgttcggaatctatcagcaggccgagaaagcacgtctgcagggtggcgtgcttctagcacagatacggaagaacctaacacttatggcaactacctctcagctgcctaagctcctggtgtattccgcacatgacacaacactggtagcgcttcaaatggcgttggatgtctacaatggtgagcaggctccttacgcttcatgccacatctttgagttataccaggaagacagcggcaacttctccgtggagatgtacttccgcaatgaatcagacaaagccccttggccattgtcactgccaggatgcccccatagatgtccgctccaggacttcctgcgcttaacagaacccgtggttcccaaggattggcagcaggagtgtcagctcgcttcaggtccagccgatacagaggtcatcgtggcacttgcagtatgtggtagtatcctgttcctgttgattgtcctactcctcactgtgctcttccggatgcaggctcaacctccaggctatagacacgttgctgacggggaggaccacgcctag

SEQ ID NO: 114204 - DNA, 711 bp, Artificial Sequence
  derived and/or modified sequence
atggtggccaacgagaccggcctgaccgacctgaccctggagaccgtgtggaacgtgtacgacaccctgttctgcgagcagacccacggcctgagactgcccccctgggccagcccccagaccatgcagagactgagcagactgaaggacttcagcttcagattcctgttcggcatctaccagcaggccgagaaggccagactgcagggcggcgtgctgctggcccagatcagaaagaacctgaccctgatggccaccaccagccagctgcccaagctgctggtgtacagcgcccacgacaccaccctggtggccctgcagatggccctggacgtgtacaacggcgagcaggccccctacgccagctgccacatcttcgagctgtaccaggaggacagcggcaacttcagcgtggagatgtacttcagaaacgagagcgacaaggccccctggcccctgagcctgcccggctgcccccacagatgccccctgcaggacttcctgagactgaccgagcccgtggtgcccaaggactggcagcaggagtgccagctggccagcggccccgccgacaccgaggtgatcgtggccctggccgtgtgcggcagcatcctgttcctgctgatcgtgctgctgctgaccgtgctgttcagaatgcaggcccagccccccggctacagacacgtggccgacggcgaggaccacgcctag

SEQ ID NO: 114205 - protein, 359 aa, Artificial Sequence
  derived and/or modified sequence
MNFIKDNSRALIQRMGMTVIKQITDDLFVWNVLNREEVNIICCEKVEQDAARGIIHMILKKGSESCNLFLKSLKEWNYPLFQDLNGQSGLTDSLGNLKNLTKLIMDNIKMNEEDAIKLAEGLKNLKKMCLFHLTHLSDIGEGMDYIVKSLSSEPCDLEEIQLVSCCLSANAVKILAQNLHNLVKLSILDLSENYLEKDGNEALHELIDRMNVLEQLTALMLPWGCDVQGSLSSLLKHLEEVPQLVKLGLKNWRLTDTEIRILGAFFGKNPLKNFQQLNLAGNRVSSDGWLAFMGVFENLKQLVFFDFSTKEFLPDPALVRKLSQVLSKLTFLQEARLVGWQFDDDDLSVITGAFKLVTA

SEQ ID NO: 114206 - DNA, 1080 bp, Artificial Sequence
  derived and/or modified sequence
atgaacttcatcaaggacaacagcagagccctgatccagagaatgggcatgaccgtgatcaagcagatcaccgacgacctgttcgtgtggaacgtgctgaacagagaggaggtgaacatcatctgctgcgagaaggtggagcaggacgccgccagaggcatcatccacatgatcctgaagaagggcagcgagagctgcaacctgttcctgaagagcctgaaggagtggaactaccccctgttccaggacctgaacggccagagcggcctgaccgacagcctgggcaacctgaagaacctgaccaagctgatcatggacaacatcaagatgaacgaggaggacgccatcaagctggccgagggcctgaagaacctgaagaagatgtgcctgttccacctgacccacctgagcgacatcggcgagggcatggactacatcgtgaagagcctgagcagcgagccctgcgacctggaggagatccagctggtgagctgctgcctgagcgccaacgccgtgaagatcctggcccagaacctgcacaacctggtgaagctgagcatcctggacctgagcgagaactacctggagaaggacggcaacgaggccctgcacgagctgatcgacagaatgaacgtgctggagcagctgaccgccctgatgctgccctggggctgcgacgtgcagggcagcctgagcagcctgctgaagcacctggaggaggtgccccagctggtgaagctgggcctgaagaactggagactgaccgacaccgagatcagaatcctgggcgccttcttcggcaagaaccccctgaagaacttccagcagctgaacctggccggcaacagagtgagcagcgacggctggctggccttcatgggcgtgttcgagaacctgaagcagctggtgttcttcgacttcagcaccaaggagttcctgcccgaccccgccctggtgagaaagctgagccaggtgctgagcaagctgaccttcctgcaggaggccagactggtgggctggcagttcgacgacgacgacctgagcgtgatcaccggcgccttcaagctggtgaccgcctag

SEQ ID NO: 114207 - DNA, 1080 bp, Artificial Sequence
  derived and/or modified sequence
atgaattttatcaaagacaattccagggctctcatacaacggatgggtatgaccgttattaaacaaatcaccgacgacctgtttgtttggaacgttctgaatcgcgaggaggtaaacatcatctgttgcgaaaaggttgaacaggacgctgctagaggtatcattcacatgattctcaagaagggctctgaatcctgtaatttgtttcttaagagcctgaaagagtggaattacccgctttttcaagatcttaacggccaatctgggctgaccgactctctggggaacctcaagaatctaacaaaattgatcatggataacataaagatgaacgaagaagatgccatcaaactcgcagaagggctgaaaaaccttaagaaaatgtgtctcttccacctgacacatcttagcgacattggagaaggaatggactatattgttaaaagcctctcaagcgaaccatgtgacctggaggaaattcagcttgttagctgttgtctctccgccaacgcagtcaagatactggctcagaacctacacaatctggtcaagctgtccatccttgacctctcagagaattacctggaaaaggatggcaatgaggcactgcacgaactgattgaccgaatgaacgtgttggagcagctgactgctctgatgctgccttggggctgtgacgtgcaagggtccctgtcatcactcctgaaacatctggaagaggtgccccagctggtgaagctcggactgaaaaactggcgactgacagatacagaaatacgcattctgggcgcattctttggcaagaaccctctgaagaatttccagcagctgaacttggccggaaacagagtatcatctgacgggtggctcgcattcatgggcgtgttcgaaaatctgaagcagttagtgttttttgatttcagcactaaggagttcctgcccgaccctgctttggtgcgcaaattatcccaggtcctctccaagctgactttcctgcaggaggctaggttggtaggctggcaatttgacgatgacgatctctctgtgatcaccggcgccttcaagttggtgaccgcatag

SEQ ID NO: 114208 - DNA, 1080 bp, Artificial Sequence
  derived and/or modified sequence
atgaacttcatcaaggacaacagccgggccctgatccagaggatgggcatgaccgtcatcaagcagatcacagatgacctgtttgtgtggaatgtgctgaaccgggaggaggtgaacatcatctgctgtgagaaggtggagcaggatgctgcccggggcatcatccacatgatcctgaagaagggcagcgagagctgcaacctcttcctgaagagcctgaaggagtggaactaccccctcttccaggacctgaatggccagagcggcctgacagacagcctgggcaacctgaagaacctgaccaagctgatcatggacaacatcaagatgaatgaagaagatgccatcaagctggccgagggcctgaagaacctgaagaagatgtgcctcttccacctgacccacctgagtgacattggagagggcatggactacatcgtgaagagcctgagcagcgagccctgtgacctggaggagatccagctggtgtcctgctgcctgagcgccaatgctgtgaagatcctggcccagaacctgcacaacctggtgaagctgagcatcctggacctgtctgagaactacctggagaaggatggaaatgaggccctgcacgagctgattgacaggatgaatgtgctggagcagctgacagccctgatgctgccctggggctgtgatgtgcagggcagcctgagcagcctgctgaagcacctggaggaggtgccccagctggtgaagctgggcctgaagaactggaggctgacagacacagagatccgcatcctgggcgccttcttcggcaagaaccccctgaagaacttccagcagctgaacctggccggcaacagagtgtccagtgatggctggctggccttcatgggcgtgtttgagaacctgaagcagctggtgttctttgacttcagcaccaaggagttcctgcctgaccctgccctggtgaggaagctgagccaggtgctgagcaagctgaccttcctgcaggaggcccggctggtgggctggcagtttgatgatgatgacctgagcgtcatcactggagccttcaagctggtgacagcctag

SEQ ID NO: 114209 - DNA, 1080 bp, Artificial Sequence
  derived and/or modified sequence
atgaacttcatcaaggacaacagccgggccctgatccagcggatggggatgactgtgattaagcagatcacagatgacctcttcgtctggaatgttcttaatagggaggaggtgaacatcatttgctgcgaaaaagtggaacaggatgcggctcgcggcattatacacatgatactcaagaagggttccgagagctgcaatctttttctcaaatccttaaaagagtggaactatcctctcttccaagacttaaatggacaatctggcctgaccgactcgctcggcaacctcaagaacctgacgaagctgatcatggataatatcaagatgaatgaagaagatgctatcaaactggcggaaggcttgaaaaacctgaagaagatgtgccttttccacctcacacacctaagcgatattggcgaaggcatggactacattgtcaagtcactgagctctgaaccttgcgacctcgaggaaattcagctagtgagttgctgtctctcagcgaatgccgtgaagattttagcacagaatctacataacctcgttaagctgtctattctcgacctcagcgaaaattatctggaaaaggacggaaacgaagcccttcatgaacttatagaccggatgaacgtgctagagcagctgactgccctgatgctgccatggggatgcgacgttcagggatccctgagttccttgctaaaacacctcgaagaagtgccacagctggtgaaacttggactaaaaaattggcggttgacagatactgagattagaatactgggcgctttctttggaaaaaatccattaaaaaactttcagcagttaaacctggctggtaaccgggtctcttctgatggctggctggctttcatgggtgtgtttgagaacctgaaacagctagtgttctttgatttcagcaccaaagagttcttgcccgacccagcactggtgaggaagctgtctcaggtgctgtctaagttgacatttctgcaggaggcccgcctggtcggatggcagttcgacgacgatgatctgagtgttatcacgggggcatttaagttggttaccgcatag

SEQ ID NO: 114210 - DNA, 1362 bp, Artificial Sequence
  derived and/or modified sequence
tgtttatactccggagggtgtccccgtgcgtcatcggtggagtggaccaaaactggtgatctgtttgccctgtgtgaccttgcccagaaccctgctgactgagagaacacatctgctggaagtcctctgggattcaaggtacagggaatgaagagtagttttacagaaaaaagaggacaatattgggatcacctttgacctttccatttggaaataatattttctattgtgttatagaaaggtgggaagctttcatccagaacaatgaatttcataaaggacaatagccgagcccttattcaaagaatgggaatgactgttataaagcaaatcacagatgacctatttgtatggaatgttctgaatcgcgaagaagtaaacatcatttgctgcgagaaggtggagcaggatgctgctagagggatcattcacatgattttgaaaaagggttcagagtcctgtaacctctttcttaaatcccttaaggagtggaactatcctctatttcaggacttgaatggacaaagtggtctgactgacagcttgggtaacttgaagaaccttacaaagctcataatggataacataaagatgaatgaagaagatgctataaaactagctgaaggcctgaaaaacctgaagaagatgtgtttatttcatttgacccacttgtctgacattggagagggaatggattacatagtcaagtctctgtcaagtgaaccctgtgaccttgaagaaattcaattagtctcctgctgcttgtctgcaaatgcagtgaaaatcctagctcagaatcttcacaatttggtcaaactgagcattcttgatttatcagaaaattacctggaaaaagatggaaatgaagctcttcatgaactgatcgacaggatgaacgtgctagaacagctcaccgcactgatgctgccctggggctgtgacgtgcaaggcagcctgagcagcctgttgaaacatttggaggaggtcccacaactcgtcaagcttgggttgaaaaactggagactcacagatacagagattagaattttaggtgcattttttggaaagaaccctctgaaaaacttccagcagttgaatttggcgggaaatcgtgtgagcagtgatggatggcttgccttcatgggtgtatttgagaatcttaagcaattagtgttttttgactttagtactaaagaatttctacctgatccagcattagtcagaaaacttagccaagtgttatccaagttaacttttctgcaagaagctaggcttgttgggtggcaatttgatgatgatgatctcagtgttattacaggtgcttttaaactagtaactgcttaaataaagtgtactcgaagc

SEQ ID NO: 114211 - DNA, 1080 bp, Artificial Sequence
  derived and/or modified sequence
atgaacttcattaaagacaatagtcgagcccttatccagagaatggggatgaccgtgattaagcagattaccgacgacctgtttgtgtggaacgttttaaaccgcgaagaggtcaatataatctgttgtgagaaggtggaacaggacgcagctcggggaatcattcatatgatactcaaaaaaggctctgaatcctgtaatctgttcctgaaatcattgaaagagtggaactatcccctcttccaggatcttaacggccagtcagggttgactgatagcctcggaaatcttaaaaacttaacaaagttgatcatggataatataaaaatgaatgaggaagatgccattaagcttgcagaaggcttaaaaaacttaaagaagatgtgcctcttccatttaactcatctgagtgacattggagagggcatggactacatcgtaaaaagtctgtcgtccgagccttgtgacttggaagagattcagctagtctcctgctgcctgagtgcgaacgccgtcaaaattttggctcaaaacctgcacaatttagtgaagctgtccatcctcgatctgagcgaaaactaccttgaaaaagatggaaacgaggccttgcacgagttaattgataggatgaacgtattggaacagctgactgctcttatgctaccttgggggtgcgacgtgcagggcagcctatctagtctgctgaaacacctggaggaggtcccccagctggtgaagttgggattgaaaaactggagactgacggacaccgaaatccgcatactgggagctttcttcgggaagaaccctctgaagaacttccagcagctcaatctggctggtaaccgcgtgtcgagtgacggatggctggcctttatgggcgtgtttgagaacctgaaacagttagtcttcttcgatttcagcaccaaagaatttttacctgaccccgcactggtcaggaagctatcccaggtgctgtccaaactcactttcctgcaggaagcccgtctggttggctggcagttcgacgatgatgatctatctgtgattactggcgcattcaagctggtcacggcctag

SEQ ID NO: 114212 - DNA, 1755 bp, Artificial Sequence
  derived and/or modified sequence
atgcagaagttcttcggcctgccccagaccggcgacctggaccagaacaccatcgagaccatgagaaagcccagatgcggcaaccccgacgtggccaactacaacttcttccccagaaagcccaagtgggacaagaaccagatcacctacagaatcatcggctacacccccgacctggaccccgagaccgtggacgacgccttcgccagagccttccaggtgtggagcgacgtgacccccctgagattcagcagaatccacgacggcgaggccgacatcatgatcaacttcggcagatgggagcacggcgacggctaccccttcgacggcaaggacggcctgctggcccacgccttcgcccccggcaccggcgtgggcggcgacagccacttcgacgacgacgagctgtggaccctgggcgagggccaggtggtgagagtgaagtacggcaacgccgacggcgagtactgcaagttccccttcctgttcaacggcaaggagtacaacagctgcaccgacaccggcagaagcgacggcttcctgtggtgcagcaccacctacaacttcgagaaggacggcaagtacggcttctgcccccacgaggccctgttcaccatgggcggcaacgccgagggccagccctgcaagttccccttcagattccagggcaccagctacgacagctgcaccaccgagggcagaaccgacggctacagatggtgcggcaccaccgaggactacgacagagacaagaagtacggcttctgccccgagaccgccatgagcaccgtgggcggcaacagcgagggcgccccctgcgtgttccccttcaccttcctgggcaacaagtacgagagctgcaccagcgccggcagaagcgacggcaagatgtggtgcgccaccaccgccaactacgacgacgacagaaagtggggcttctgccccgaccagggctacagcctgttcctggtggccgcccacgagttcggccacgccatgggcctggagcacagccaggaccccggcgccctgatggcccccatctacacctacaccaagaacttcagactgagccaggacgacatcaagggcatccaggagctgtacggcgccagccccgacatcgacctgggcaccggccccacccccaccctgggccccgtgacccccgagatctgcaagcaggacatcgtgttcgacggcatcgcccagatcagaggcgagatcttcttcttcaaggacagattcatctggagaaccgtgacccccagagacaagcccatgggccccctgctggtggccaccttctggcccgagctgcccgagaagatcgacgccgtgtacgaggccccccaggaggagaaggccgtgttcttcgccggcaacgagtactggatctacagcgccagcaccctggagagaggctaccccaagcccctgaccagcctgggcctgccccccgacgtgcagagagtggacgccgccttcaactggagcaagaacaagaagacctacatcttcgccggcgacaagttctggagatacaacgaggtgaagaagaagatggaccccggcttccccaagctgatcgccgacgcctggaacgccatccccgacaacctggacgccgtggtggacctgcagggcggcggccacagctacttcttcaagggcgcctactacctgaagctggagaaccagagcctgaagagcgtgaagttcggcagcatcaagagcgactggctgggctgctag

SEQ ID NO: 114213 - DNA, 1755 bp, Artificial Sequence
  derived and/or modified sequence
atgcagaaatttttcggcctgccacagaccggcgaccttgatcagaatactatagagaccatgaggaagccgcggtgcgggaatcccgacgtcgctaactataatttctttcctcggaagccaaaatgggacaaaaatcagataacatatcggatcatcgggtatactccagacttggacccagaaaccgtggacgatgctttcgctcgtgcctttcaagtctggagcgacgtgaccccactgagattctccaggatccacgacggggaggctgatatcatgattaactttggacgctgggaacatggcgatgggtacccctttgacgggaaggatgggctcctcgcgcatgcattcgcccccggcactggggtcggcggagacagccacttcgatgatgacgaactctggaccctcggtgaggggcaggtggtacgcgtcaagtacggaaatgccgacggcgagtactgcaagttcccatttctgtttaacggtaaagagtataattcctgcacggacaccgggagatccgacggctttctatggtgctccaccacctacaattttgaaaaagatggaaagtacggcttctgccctcatgaagctctctttacaatgggtggaaatgctgaggggcagccatgtaagtttccatttcgattccagggcacatcatatgacagctgtacaactgagggaaggactgacggctataggtggtgtggaaccacggaagactatgatagagataagaaatacggattttgcccagaaaccgccatgagcaccgtgggtggaaacagcgagggggcaccgtgcgtgttccccttcacctttctgggaaacaaatatgaatcttgcaccagtgcagggaggtcagatggcaagatgtggtgtgctaccacggcaaactacgacgatgatagaaagtggggattctgccctgatcagggttactctttattcttggttgcggcacacgaattcggccatgccatggggctggaacactcccaggacccaggtgctctgatggcaccaatctacacgtacactaaaaacttccggctgtcccaggatgatattaagggaatccaggaactgtatggggcttctcctgatatcgacttgggcacagggcccactcctacactgggtccagtgactcccgagatttgtaagcaggacatcgtctttgatggaattgcgcagataagaggggagattttcttctttaaggacagattcatctggaggacagtgactccacgagataagcccatgggcccactccttgtggctaccttttggcccgagttgccagaaaaaattgacgctgtgtacgaggcaccacaggaagagaaagcagtgttttttgctgggaacgagtattggatttattctgcgtctactcttgagaggggttaccccaagcccctgacaagtctgggcctacccccagacgttcagcgggtagatgccgcctttaactggagcaagaataagaaaacatacattttcgccggtgataagttttggagatataacgaggtaaagaagaaaatggatccaggcttcccaaagctgatcgccgatgcatggaacgcaattcccgataatctggatgctgtggtggacttgcaagggggaggacacagctatttttttaagggcgcatattacctgaagttagagaaccagagcctgaaatctgtcaaattcggaagcattaagtccgattggctcgggtgctag

SEQ ID NO: 114214 - DNA, 1755 bp, Artificial Sequence
  derived and/or modified sequence
atgcagaagttcttcggcctgccccagacaggagacctggaccagaacaccatcgagaccatgaggaagccccgctgtggcaacccagatgtggccaactacaacttcttccccaggaagcccaagtgggacaagaaccagatcacctaccgcatcatcggctacaccccagacctggaccctgagaccgtggatgatgcctttgcccgggccttccaggtgtggagcgatgtgacccccctgcgcttcagccgcatccatgatggagaggccgacatcatgatcaactttggccgctgggagcacggagatggctacccctttgatggcaaggatggcctgctggcccacgcctttgcccctggcactggagtgggcggggacagccactttgatgatgatgagctgtggaccctgggggagggccaggtggtgcgggtgaagtatggaaatgctgatggagagtactgcaagttccccttcctgttcaacgggaaggagtacaacagctgcacagacaccggccgcagtgatggcttcctgtggtgcagcaccacctacaactttgagaaggatggcaagtatggcttctgcccccatgaggccctcttcaccatgggcggcaatgctgagggccagccctgcaagttccccttccgcttccagggcaccagctatgacagctgcaccacagagggccgcacagatggctaccgctggtgtggcaccacagaagattatgaccgggacaagaagtatggcttctgcccagagacagccatgagcacagtgggcggcaacagcgagggcgccccctgtgtgttccccttcaccttcctgggcaacaagtatgagagctgcaccagcgctggccgcagtgatggcaagatgtggtgtgccaccacagccaactatgatgatgacaggaagtggggcttctgcccagaccagggctacagcctcttcctggtggccgcccatgaatttggacatgccatgggcctggagcacagccaggaccccggggccctgatggcccccatctacacctacaccaagaacttccggctgagccaggatgacatcaagggcatccaggagctgtatggagccagcccagacatcgacctgggcaccggccccacccccaccctgggccctgtgaccccagagatctgcaagcaggacatcgtgtttgatggcatcgcccagatccggggggagatcttcttcttcaaggaccgcttcatctggaggacagtgaccccccgggacaagcccatgggccccctgctggtggccaccttctggccagagctgcctgagaagattgatgctgtgtatgaggccccccaggaggagaaggctgtgttctttgctggaaatgagtactggatctacagcgccagcaccctggagcggggctaccccaagcccctgaccagcctgggcctgcccccagatgtgcagagggtggatgctgccttcaactggagcaagaacaagaagacctacatctttgctggggacaagttctggagatacaatgaggtgaagaagaagatggaccccggcttccccaagctgattgctgatgcctggaatgccatcccagacaacctggatgctgtggtggacctgcagggcggcggccacagctacttcttcaagggggcctactacctgaagctggagaaccagagcctgaagtctgtgaagtttggcagcatcaagagtgactggctgggctgctag

SEQ ID NO: 114215 - DNA, 1755 bp, Artificial Sequence
  derived and/or modified sequence
atgcagaagttcttcggcctgccccagaccggcgacctggaccagaacacaatcgaaacaatgagaaaaccaaggtgcgggaacccagatgtggctaattacaacttcttccctaggaagcctaaatgggacaaaaatcaaattacctatcgaatcatcggctatactccagacctggacccggaaaccgtcgacgatgcatttgccagggctttccaggtgtggagcgatgtgacaccactgagattctccaggatacacgatggggaggccgatatcatgatcaattttgggcggtgggaacacggcgatggctatcccttcgacgggaaagacggcctgttagcccatgctttcgcccctggcacgggtgttggtggtgactcccacttcgacgatgacgagttatggaccctcggggaaggccaagtcgtgagggtcaaatacgggaacgctgatggtgagtactgcaagtttccctttcttttcaacgggaaggagtacaattcttgcaccgatacgggtagatcagatggctttctgtggtgtagcaccacttacaattttgaaaaagatggcaagtacggattctgcccccatgaggcgctgttcactatgggggggaatgcagagggacagccatgcaaattccccttccggttccagggtacatcctatgacagttgtacaacagagggccgcaccgatggctataggtggtgcggcacgacagaggactacgatagagacaaaaagtacggcttttgtcccgagacagctatgagcacagtgggtggaaatagcgagggggctccctgtgtgttcccatttactttcctggggaataagtacgaatcctgtacgtccgcagggcgcagcgatggcaaaatgtggtgtgcaaccacagcgaattacgatgacgaccgcaagtgggggttctgtccggaccagggatactccttgtttctagttgctgcccatgaattcggccacgctatgggattggaacacagccaagaccctggtgccctgatggctccaatctacacatacacaaagaacttccgattgtctcaggatgacatcaaaggtatacaggagttatacggggccagtccagatatcgaccttggcaccgggcccacaccaaccctaggaccagtcactccagagatatgcaagcaggacatcgtctttgacgggatcgctcaaatacgcggcgaaatcttttttttcaaagatcgcttcatctggcggacagtaactccccgcgataaaccaatgggcccactgctggtcgcaaccttctggcctgaactgcctgaaaaaatcgacgccgtctatgaagcaccccaagaggagaaggccgtattctttgctggtaacgagtactggatttactccgccagcacactggaacgggggtaccctaaacccctcaccagtctaggtttaccaccggacgtgcagagagtggacgccgcttttaattggtctaaaaataaaaaaacgtacatttttgcgggcgataagttctggaggtataacgaagtgaagaagaagatggaccctggatttcctaagttgatagctgacgcatggaatgctatcccagataatctggacgccgtcgttgatctgcaagggggcggacattcctacttttttaaaggcgcttattacctcaagctcgaaaatcaatctctgaaaagcgtgaaattcggatccatcaagtctgactggttgggttgctag

SEQ ID NO: 114216 - DNA, 1755 bp, Artificial Sequence
  derived and/or modified sequence
atgcaaaaatttttcggactcccccaaactggcgacctggaccagaatactattgaaacaatgaggaaaccgagatgtggcaaccctgacgtcgctaactacaacttctttcccagaaagcccaagtgggataagaaccaaattacttacagaatcattggatacacaccggacttagacccagagactgttgacgacgcctttgccagggccttccaggtctggagtgacgttactccattacgcttctccagaatccatgatggcgaggccgatataatgattaactttggcaggtgggagcacggcgatgggtatccctttgatggtaaggacggattattggcacacgcatttgctcccggaaccggtgtgggcggagactcccactttgatgatgatgaactgtggacgctaggcgaaggccaagtggtaagagtgaagtacggaaacgccgacggagagtattgtaagttcccctttttgtttaacggcaaagaatataactcgtgcaccgacacaggcagatcagacgggtttctgtggtgctccaccacgtacaacttcgaaaaagatgggaaatatggtttctgcccacatgaggccctattcactatgggcggtaatgcagagggacagccgtgtaagttcccattccgtttccaaggcacctcctatgattcctgtactactgaaggacgtacagatgggtaccgctggtgtggcaccaccgaggattacgatagagataaaaagtacgggttctgtcctgaaactgcgatgtcaaccgtcggaggcaatagtgagggcgcaccttgcgtgttccccttcacctttctggggaataagtacgagtcttgtacttcggccggtaggtctgatggaaaaatgtggtgcgctacaactgcaaactatgatgacgatagaaagtggggcttctgtcctgatcagggatactccctgttcctcgttgccgctcatgaatttggccacgctatgggtttagagcactcacaagatccgggtgcgctgatggccccaatctacacttatacaaagaactttcgactcagtcaggatgacatcaagggcatccaggagctatatggtgcgagccccgacattgacttgggtactggacccactcctacactgggccctgtgacccccgagatctgtaagcaggacatcgtgttcgatggcattgcccagatccgaggtgaaatcttcttcttcaaagaccggttcatctggcgcacagttaccccacgtgacaagccaatgggacctcttctcgtggcgaccttttggcccgaactcccagaaaagatcgatgctgtgtatgaggcccctcaggaggaaaaggcagtgttctttgccggtaatgagtattggatttattcggcttccactctggagaggggctaccctaagccactaacctccctggggctcccccctgacgttcagcgggtcgacgccgctttcaactggtccaagaacaaaaagacctatatctttgctggagacaagttctggcggtataatgaggttaaaaaaaagatggatccaggctttcctaaactaattgcagatgcatggaatgctataccagataatcttgatgcagtggttgacttgcagggtgggggacatagctatttcttcaaaggcgcttattacctgaagttagagaaccagtccctgaaatctgttaaattcggaagtattaaatccgattggctcggctgttag

SEQ ID NO: 114217 - protein, 250 aa, Artificial Sequence
  derived and/or modified sequence
MEIGRPRKDTWKLANLDLNSEKQSGGASTASKGRYIPPHLRNREASKGFHDKDSSGWSCSKDKDAYSSFGSRDSRGKPGYFSERGSGSRGRFDDRGRSDYDGIGNRERPGFGRFERSGHSRWCDKSVEDDWSKPLPPSERLEQELFSGGNTGINFEKYDDIPVEATGSNCPPHIENFSDIDMGEIIMGNIELTRYTRPTPVQKHAIPIIKGKRDLMACAQTGSGKTAAFLLPILSQIYTDGPGEALKAVK

SEQ ID NO: 114218 - protein, 657 aa, Artificial Sequence
  derived and/or modified sequence
MEIGRPRKDTWKLANLDLNSEKQSGGASTASKGRYIPPHLRNREASKGFHDKDSSGWSCSKDKDAYSSFGSRDSRGKPGYFSERGSGSRGRFDDRGRSDYDGIGNRERPGFGRFERSGHSRWCDKSVEDDWSKPLPPSERLEQELFSGGNTGINFEKYDDIPVEATGSNCPPHIENFSDIDMGEIIMGNIELTRYTRPTPVQKHAIPIIKGKRDLMACAQTGSGKTAAFLLPILSQIYTDGPGEALKAVKENGRYGRRKQYPISLVLAPTRELAVQIYEEARKFSYRSRVRPCVVYGGADIGQQIRDLERGCHLLVATPGRLVDMMERGKIGLDFCKYLVLDEADRMLDMGFEPQIRRIVEQDTMPPKGVRHTMMFSATFPKEIQMLARDFLDEYIFLAVGRVGSTSENITQKVVWVEDLDKRSFLLDILGATGSDSLTLVFVETKKGADSLEDFLYHEGYACTSIHGDRSQRDREEALHQFRSGKSPILVATAVAARGLDISNVRHVINFDLPSDIEEYVHRIGRTGRVGNLGLATSFFNEKNMNITKDLLDLLVEAKQEVPSWLENMAYEHHYKGGSRGRSKSNRFSGGFGARDYRQSSGSSSSGFGASRGSSSRSGGGGYGNSRGFGGGGYGGFYNSDGYGGNYNSQGVDWWGN

SEQ ID NO: 114219 - DNA, 753 bp, Artificial Sequence
  derived and/or modified sequence
atggagatcggtcgcccgcggaaggatacttggaagctcgcgaacctggacttgaatagtgaaaagcagtccggtggtgcttccaccgctagtaagggtcgctacatcccgccgcatctgcgtaaccgggaagcctctaaaggcttccatgacaaggattctagcgggtggagttgtagcaaggataaggacgcatattcatcctttggttccagagattcccgcggaaagcccggctacttcagcgagagagggagtggaagccgcggccgcttcgatgaccgtgggcgcagcgattacgacgggattggcaaccgcgagcgccccggctttggcagatttgagagatcaggacacagccgctggtgtgataaatctgttgaagacgattggtcaaagccactcccacccagcgaacggctcgagcaggagctcttttctggaggcaatacaggcatcaacttcgagaaatacgacgatatcccagtcgaagctactgggtcaaattgcccaccacacatagagaatttctccgatatcgatatgggagagatcattatgggtaatatagaactgacccgctacactaggcctacaccagtgcagaagcacgccatccccattattaagggcaagagagatttaatggcatgtgcacaaaccggcagcgggaagacggcagcctttctcctccctatcttaagtcagatctataccgacgggccaggagaggccctcaaggcagtgaaatag

SEQ ID NO: 114220 - DNA, 1974 bp, Artificial Sequence
  derived and/or modified sequence
atggagatagggaggccacgcaaagatacatggaaacttgctaacctggatctgaatagtgagaagcagagtggcggggcaagcaccgctagtaaggggcgatacatccctccacatctccggaacagagaggcctcaaaggggttccatgacaaagattcttccggctggtcatgtagtaaggacaaagacgcttactcaagctttgggtcaagggacagcagagggaaacccggttacttcagtgagagggggagcgggtctcgcggccggttcgatgacagaggccgttccgattacgatggtataggcaacagggagcggcctggatttggccgatttgagcgcagtggccacagtcgatggtgcgacaagagcgtcgaagacgactggagcaaaccgctacccccttccgagcggctcgaacaggaattattctcaggtggaaatacagggattaattttgagaaatatgatgacataccggtggaggcaactgggagcaactgcccccctcacatagaaaacttctcggatattgatatgggggaaataattatggggaacatagagcttaccagatacacccgtcctactcccgtgcagaagcacgcaatcccaataatcaagggaaagagggatctgatggcatgcgctcagacgggcagtgggaagaccgccgccttcctactgcctatcctgtcccagatctatacggatgggcccggcgaagccctgaaagccgtgaaggaaaatgggcgttatggacgcagaaagcaataccccataagtcttgtcctcgcccccacaagggagctggctgtacaaatttacgaggaagcgcggaagttttcttacaggagtcgtgtacgcccttgtgtggtctatggtggtgccgatattggccagcaaatccgtgatctcgaacggggatgccatctgctggtggcaacgccaggacgtctcgttgatatgatggagcggggtaagatcgggcttgatttctgtaagtatctggtactggacgaggctgaccggatgctcgacatgggctttgagcctcagataaggcgcatcgtggaacaagacacaatgccccctaagggggtgcgtcataccatgatgttttctgctacatttccgaaggagattcagatgcttgccagagatttccttgacgagtacatcttcctggcagtgggacgggtgggatccacaagtgaaaacataacacagaaagttgtgtgggtggaggacctggacaaacggagctttctgcttgacatccttggggctaccgggagcgactcactaacgcttgtgtttgtggaaacaaagaagggcgccgatagcttagaagatttcctctatcacgaaggttacgcctgtacaagcatccacggagataggagtcagcgagatcgagaggaggccctgcatcagttccgttcaggcaagtcgcctattctcgtggccacggctgtggctgcgcgcggcctggacatcagcaatgtccgtcatgtgatcaactttgatctcccctcggacatcgaagagtacgtccatcggatcggccgcaccggccgagtcggcaacctcggcctggccacgtcatttttcaatgagaagaacatgaacatcaccaaggacctcctagacctcttagtcgaagctaaacaggaagtcccatcatggttggagaatatggcctacgagcaccactacaagggaggctctagagggcgaagtaaaagcaaccgtttctccgggggtttcggagccagagactatcggcagtcctctggatcatcttccagcgggttcggcgcatctcgcgggtcctctagccggtcaggcggcgggggttatggaaatagccgtggcttcggtggagggggctatggaggcttctataattcagacgggtatggtggaaactacaattcacagggggtggactggtggggtaattag

SEQ ID NO: 114221 - DNA, 753 bp, Artificial Sequence
  derived and/or modified sequence
atggagatcggccggcccaggaaggacacctggaagctggccaacctggacctgaacagcgagaagcagagcggcggggccagcacagccagcaagggccgctacatccccccccacctgaggaaccgggaggccagcaagggcttccatgacaaggacagcagcggctggagctgcagcaaggacaaggatgcctacagcagctttggcagccgggacagccggggcaagccaggctacttcagcgagcggggcagcggcagccggggccgctttgatgaccggggccgcagtgactatgatggcatcggcaaccgggagaggcctggcttcggccgctttgagaggagcggccacagccgctggtgtgacaagtctgtggaggatgactggagcaagcccctgccccccagcgagcggctggagcaggagctgttcagcggcggcaacacaggcatcaactttgagaagtatgatgacatccctgtggaggccaccggcagcaactgccccccccacatcgagaacttcagtgacatcgacatgggagagatcatcatgggcaacatcgagctgacccgctacacccggcccacccctgtgcagaagcacgccatccccatcatcaagggcaagagggacctgatggcctgtgcccagacaggcagcggcaagacagctgccttcctgctgcccatcctgagccagatctacacagatggccctggagaggccctgaaggctgtgaagtag

SEQ ID NO: 114222 - DNA, 1974 bp, Artificial Sequence
  derived and/or modified sequence
atggagatcggccggcccaggaaggacacctggaagctggccaacctggacctgaacagcgagaagcagagcggcggggccagcacagccagcaagggccgctacatccccccccacctgaggaaccgggaggccagcaagggcttccatgacaaggacagcagcggctggagctgcagcaaggacaaggatgcctacagcagctttggcagccgggacagccggggcaagccaggctacttcagcgagcggggcagcggcagccggggccgctttgatgaccggggccgcagtgactatgatggcatcggcaaccgggagaggcctggcttcggccgctttgagaggagcggccacagccgctggtgtgacaagtctgtggaggatgactggagcaagcccctgccccccagcgagcggctggagcaggagctgttcagcggcggcaacacaggcatcaactttgagaagtatgatgacatccctgtggaggccaccggcagcaactgccccccccacatcgagaacttcagtgacatcgacatgggagagatcatcatgggcaacatcgagctgacccgctacacccggcccacccctgtgcagaagcacgccatccccatcatcaagggcaagagggacctgatggcctgtgcccagacaggcagcggcaagacagctgccttcctgctgcccatcctgagccagatctacacagatggccctggagaggccctgaaggctgtgaaggaaaatggccgctatggaagaaggaagcagtaccccatcagcctggtgctggcccccacccgggagctggccgtgcagatctatgaggaggccaggaagttctcctaccgcagccgggtgcggccctgtgtggtgtatggaggagctgacatcggccagcagatccgggacctggagcggggctgccacctgctggtggccaccccaggccgcctggtggacatgatggagcggggcaagattggcctggacttctgcaagtacctggtgctggatgaggccgacaggatgctggacatgggctttgagccccagatcagaagaattgtggagcaggacaccatgccacccaagggcgtgcgccacaccatgatgttttctgccaccttccccaaggagatccagatgctggcccgggacttcctggatgagtacatcttcctggccgtgggccgggtgggcagcaccagcgagaacatcacccagaaggtggtgtgggtggaggacctggacaagaggagcttcctgctggacatcctgggcgccactggaagtgacagcctgaccctggtgtttgtggagaccaagaagggagctgacagcctggaggacttcctgtaccacgagggctacgcctgcaccagcatccatggagacaggagccagagggaccgggaggaggccctgcaccagttccgcagcggcaagagccccatcctggtggccacagctgtggccgcccggggcctggacatcagcaatgtgagacatgtgatcaactttgacctgcccagcgacatcgaggagtatgtgcaccgcatcggccgcacaggccgggtgggcaacctgggcctggccaccagcttcttcaatgagaagaacatgaacatcaccaaggacctgctggacctgctggtggaggccaagcaggaggtgcccagctggctggagaacatggcctatgagcaccactacaagggcggcagccggggccgcagcaagagcaaccgcttcagcggcggctttggagcccgggactaccggcagagcagcggcagcagcagcagcggctttggagccagccggggcagcagcagccgcagcggcggcggcggctacggcaacagccggggctttggaggcggcggctacggcggcttctacaacagtgatggctatggaggcaactacaacagccagggcgtggactggtggggcaactag

SEQ ID NO: 114223 - DNA, 753 bp, Artificial Sequence
  derived and/or modified sequence
atggagatcggccggccccggaaggacacctggaagctggccaacctggatcttaatagcgagaagcagtctggtggagcgtccaccgctagtaagggacgatacatccctccacatttaagaaacagggaagcctcaaaggggttccatgacaaggacagcagtggctggtcatgttccaaagataaagatgcctatagtagttttgggagcagggacagcagagggaagccaggttactttagcgagagaggcagtggctctcgggggcgtttcgacgatagaggaagatctgattacgacggtataggcaatcgagaacgacccggctttggaaggttcgagcgcagtggacatagccggtggtgcgacaaatccgtagaagatgactggtccaagcctctcccaccctcagaacgtttggaacaggagcttttcagtggtggaaatactgggatcaactttgagaaatacgacgatattcccgtcgaagcaacggggtcaaattgccctcctcacattgaaaacttctctgacattgatatgggggagatcatcatggggaatatcgagttaacccggtacactcggcccacacctgtccagaaacatgccatacccatcattaaaggtaagcgcgatctaatggcgtgcgcgcagacaggtagcgggaaaaccgctgcttttctgctccccatactaagtcagatatacacagacggtcctggtgaggccctgaaggcagtgaaatag

SEQ ID NO: 114224 - DNA, 1974 bp, Artificial Sequence
  derived and/or modified sequence
atggagatcggccggccccggaaggacacctggaagctggccaacctggatctaaatagcgagaaacagagcggaggggcgtccaccgctagtaaagggaggtacatccccccccatctcagaaatcgcgaggcaagtaagggatttcatgataaagactccagcggctggtcctgtagtaaggacaaggacgcgtacagcagctttgggtcccgggatagtaggggcaagcctggctacttcagtgagcgcggcagcgggagtaggggaagatttgacgaccgcgggaggtcagactacgacgggataggcaatcgggagcggcctggatttggcaggttcgaaaggtccggtcatagccggtggtgcgataagtctgttgaggatgactggtcgaagccccttccaccctccgaaaggctggaacaggagctcttttctggagggaacaccggtattaatttcgagaaatacgatgacattccggttgaggctactgggtctaactgcccaccacacattgagaacttctccgatatcgatatgggggaaatcattatgggcaacatcgaactgacaagatatactagacctactcccgttcagaaacacgccatccccataatcaagggcaagagggacctgatggcctgcgctcagacagggtccggaaaaacagctgcatttttgctccctatactcagtcagatttataccgatgggccaggagaagccctgaaggcagtaaaggagaatggaagatacggcagaagaaaacaataccctataagtctcgtcctggctcccacacgtgaactggccgtgcagatttatgaggaggcaaggaaattcagctatcgatcccgagtgaggccctgcgtggtgtacggaggtgctgatataggacagcagatcagagatctcgaaaggggatgtcaccttcttgttgctaccccgggtcgtttggtggatatgatggagaggggaaagatcggcctcgatttctgcaagtacctggtgctcgacgaagcggacagaatgttggacatgggcttcgagccacagataaggcgcatcgtggagcaggacactatgccaccaaaaggggtcaggcataccatgatgttcagcgccactttccccaaggagattcaaatgctggcccgcgattttctggacgagtatattttcctcgccgtaggaagggttggctctaccagcgaaaatattacccagaaggtggtttgggtggaagatcttgacaagcggagctttctgctcgatatcctgggtgcaaccgggtctgacagcttaaccctggttttcgtggagacaaagaaaggggctgacagtctggaggactttctttaccacgaaggctacgcatgcacgtccatccacggtgacaggtcccagcgggatagggaagaggccctgcaccagtttaggagcggaaaaagcccgatattggtggctacagcagtggcggcgcgtgggttagacatttccaatgttagacatgttataaacttcgacctgccttcggatatcgaagagtacgtccatagaatcggtaggactggacgcgttgggaatctcggcctcgcgacatctttcttcaacgaaaagaatatgaacataacgaaggacctgctggatctgctagtcgaggcaaagcaagaagttccctcttggctggaaaacatggcctacgaacatcattataagggtggatccagaggaaggagcaagagcaaccgattctctggtggctttggagccagagactatagacagtcaagcggctcttccagtagtgggttcggggccagccggggcagctctagcagatccggaggcggcggctacgggaactccagagggtttgggggcggcgggtatggcgggttctataactcagacgggtatggaggcaactacaacagccagggagtcgactggtggggcaactag

SEQ ID NO: 114225 - DNA, 753 bp, Artificial Sequence
  derived and/or modified sequence
atggagataggccgacctcggaaagacacatggaagctcgccaacctcgatctgaactccgaaaagcagagtgggggagcgtccactgcatctaagggcagatacatccctccccatctgcgcaaccgcgaggcctctaaagggttccatgataaagactccagtggctggtcttgcagcaaagacaaagatgcatactcctcattcgggagccgcgatagccgtggtaagcctggatactttagcgaacggggttccggcagcaggggtcggttcgatgatcgcggtcggtccgattatgatgggattggcaaccgggaacggccaggcttcggacggttcgaacggagtggccattcccgctggtgtgacaaatccgtcgaggacgattggtctaaaccgctcccaccatcagaaaggctggaacaagagctgttttctgggggtaacactgggatcaacttcgaaaagtacgacgacattcctgtggaggccaccgggagcaattgtcctcctcatatagagaatttttccgatatcgacatgggagaaatcatcatgggaaacatagagctaactcggtacacacgacctaccccggttcagaagcacgccattccaatcattaaggggaaaagggatctgatggcatgtgcgcagaccggaagtgggaagactgctgcattcctgctgcccattctctctcagatttacaccgatggaccaggcgaggccctaaaggctgtgaaatag

SEQ ID NO: 114226 - DNA, 1974 bp, Artificial Sequence
  derived and/or modified sequence
atggagattgggaggcccagaaaagacacatggaagcttgcaaatctggacctgaattccgagaagcaatctggcggtgccagcaccgcatccaaggggaggtatatccctcctcatttgcggaatcgggaggcctccaagggctttcatgacaaggactcatctggctggagctgttctaaagataaggacgcttatagcagcttcggatcgcgggactctcggggtaagccaggttatttttccgaacggggttctggatccagagggagattcgacgatcgagggcgaagcgattacgatggtataggaaaccgggagaggcccggtttcggccgtttcgagaggagtggtcacagtagatggtgcgataagtctgtggaagacgattggtccaaacctctcccaccaagtgaaaggctggaacaagagctgttcagcggaggcaatacagggattaactttgagaagtacgacgacatcccagtagaggctactgggagtaactgcccgccacatatcgaaaacttctccgacatcgatatgggagaaatcatcatgggcaacattgaactgacacgatacaccagacccactcccgtgcagaagcatgccattccaattatcaaggggaaacgagatctgatggcctgtgcccagaccggatccggcaaaactgcggctttcctgcttccaatactgtcccagatatatactgacggtcccggtgaagctctaaaggccgtgaaggagaacgggaggtatgggagacggaaacagtatccaatatccttagtgctggcacctacaagggagctggcagtgcaaatatatgaagaggccaggaagttctcctacaggtcaagagtcagaccttgcgttgtgtacggcggtgcggatattggacagcagattagggatttagagcgaggttgccacctcctggtggccacgcctgggagactggttgacatgatggaaagagggaagattgggttggacttttgtaaatacttagtgctggacgaagctgatcggatgctggacatgggcttcgagcctcaaatccgcaggattgtggagcaggacacaatgccacccaagggagtgcgtcatactatgatgttttccgcaacttttcccaaagaaattcaaatgctggcacgcgatttcctggacgagtacattttcctggcagtggggagagttggctctactagtgagaacattacacaaaaggtggtgtgggttgaggatctggataagagatcttttctgctggacattttgggcgcaacaggttctgattctctgacattagtttttgtggaaactaaaaagggagccgactccctggaagattttctgtatcacgagggctatgcctgtacaagtatccacggcgatcgtagccagcgggatcgggaagaagctctgcatcagttccggtccggcaagtcgcccattttggttgccacagcagtggcagccagagggctggatatatccaacgtgcgacacgttatcaatttcgatcttcctagtgatatagaggaatatgtgcatcggattggccgaaccggaagagtgggaaacctgggcctggccacttctttctttaacgagaaaaatatgaacatcaccaaagacctgctcgacctactggtagaagcaaaacaggaggtgcctagctggctcgagaacatggcgtacgagcatcactataaaggcggaagccgcggaagaagtaagagtaatcgtttctccgggggttttggggctcgggattacagacagagcagcgggtctagcagctctggtttcggtgccagtcggggtagcagctcccgcagcggcggaggagggtacgggaactctaggggattcggaggcggtggctacggaggcttctataattctgatgggtatggcggaaattacaacagccagggtgtagattggtgggggaactag

SEQ ID NO: 114227 - DNA, 792 bp, Artificial Sequence
  derived and/or modified sequence
gaaggatggctgccgcgtgcttctcttgaccctgtagaaataatggaaattggacgcccgcggaaagacacctggaagcttgctaatctggacctgaactctgaaaaacagagtggaggagcaagtacagcgagcaaagggcgctatatacctcctcacttaaggaacagagaagcatctaaaggattccatgataaagacagttcaggttggagttgcagcaaagataaggatgcatatagcagttttgggtctcgagattctagaggaaagcctggttatttcagtgaacgtggaagtggatcaaggggaagatttgatgatcgtggacggagtgactatgatggtattggcaatcgtgaaagacctggctttggcagatttgaacggagtggacatagtcgttggtgtgacaagtcagttgaagatgattggtcaaaaccacttccaccaagtgaacgcttggagcaagaactgttttctggaggaaacacggggattaactttgagaaatatgatgatataccagtagaggcaaccggcagtaactgtcctccacatattgagaattttagcgatattgacatgggagaaattatcatggggaacattgaacttactcgctatactcgtcctactccagtgcaaaaacatgccattcctattattaagggaaaaagagacttaatggcttgtgcccaaacaggatctgggaaaactgcagcatttcttttacccatactgagtcagatatatacagatggtccaggagaagctttgaaggctgtgaag

SEQ ID NO: 114228 - DNA, 2330 bp, Artificial Sequence
  derived and/or modified sequence
gaaggaccggaaagggatggtggggagggtagggaaggatggctgccgcgtgcttctcttgaccctgtagaaataatggaaattggacgcccgcggaaagacacctggaagcttgctaatctggacctgaactctgaaaaacagagtggaggagcaagtacagcgagcaaagggcgctatatacctcctcacttaaggaacagagaagcatctaaaggattccatgataaagacagttcaggttggagttgcagcaaagataaggatgcatatagcagttttgggtctcgagattctagaggaaagcctggttatttcagtgaacgtggaagtggatcaaggggaagatttgatgatcgtggacggagtgactatgatggtattggcaatcgtgaaagacctggctttggcagatttgaacggagtggacatagtcgttggtgtgacaagtcagttgaagatgattggtcaaaaccacttccaccaagtgaacgcttggagcaagaactgttttctggaggaaacacggggattaactttgagaaatatgatgatataccagtagaggcaaccggcagtaactgtcctccacatattgagaattttagcgatattgacatgggagaaattatcatggggaacattgaacttactcgctatactcgtcctactccagtgcaaaaacatgccattcctattattaagggaaaaagagacttaatggcttgtgcccaaacaggatctgggaaaactgcagcatttcttttacccatactgagtcagatatatacagatggtccaggagaagctttgaaggctgtgaaggaaaatggaaggtatgggcgccgcaaacaatatccaatatccttggttttagccccaacaagagaattggctgtacagatctatgaggaagccagaaaattttcctaccgatctagagttcgtccttgtgtagtttatggtggtgctgatattggtcagcagattcgggacttagaacgtggatgccacttgttagtagccactccaggacgtctagtggatatgatggaaagaggaaagattggattagacttctgcaagtacttagtgttggatgaagctgataggatgctggatatgggatttgaacctcagatacgtcgtatagttgaacaagatactatgccaccaaagggcgttcgtcacaccatgatgtttagtgctacttttcctaaggaaatacagatgcttgctcgtgactttttggatgaatatatctttttggctgtaggcagagtaggctctacctctgagaacatcacacagaaagtagtttgggtggaagacttagataaacggtcatttctactggacattttaggtgcaacagggagtgattcacttactttagtgtttgtggagaccaaaaagggagcagattccctggaggatttcttataccatgaaggatatgcttgtactagtattcatggagaccggtcacagagagatcgagaggaggcccttcaccagtttcgctcaggaaaaagcccaattctagtggctacagctgtggcagcacgaggactagacatttcaaatgtgagacatgttatcaattttgatttgccaagtgatattgaagaatatgtgcatcgtattggccgtacaggacgtgtaggaaacctgggccttgccacctcattctttaatgaaaaaaatatgaatattacaaaggatttgttggatcttcttgtagaagctaaacaagaagtgccttcttggttggaaaatatggcttatgaacaccactacaagggtggcagtcgtggacgatctaaaagtaatagattcagtggaggatttggtgccagagactatcgacaaagtagtggttccagcagttctggctttggtgctagtcgcggaagcagcagccgcagtggtggaggtggttacggcaacagcagaggatttggtggaggtggctatggaggcttctacaatagtgatggatatggaggaaattataactcccagggggttgactggtggggcaactgaatctgctttgcagcaaagtcacccttacaaagaagctaatatggaaaccacatgtaacttagccagactatattgtgtagcttcaagaacttgcagtacattaccagctgtgattctcctgataattcaagggagctcaaagtcacaagaagaaaaatgaaaggaaaaaacagcagccctattcagaaattggtttgaagatgtaattgctctagtttggattaaactcttcccctcctgctttagtgccaccccaaactgcatttataattttgtgactg

SEQ ID NO: 114229 - DNA, 753 bp, Artificial Sequence
  derived and/or modified sequence
atggagatcggcagacccagaaaggacacctggaagctggccaacctggacctgaacagcgagaagcagagcggcggcgccagcaccgccagcaagggcagatacatccccccccacctgagaaacagagaggccagcaagggcttccacgacaaggacagcagcggctggagctgcagcaaggacaaggacgcctacagcagcttcggcagcagagacagcagaggcaagcccggctacttcagcgagagaggcagcggcagcagaggcagattcgacgacagaggcagaagcgactacgacggcatcggcaacagagagagacccggcttcggcagattcgagagaagcggccacagcagatggtgcgacaagagcgtggaggacgactggagcaagcccctgccccccagcgagagactggagcaggagctgttcagcggcggcaacaccggcatcaacttcgagaagtacgacgacatccccgtggaggccaccggcagcaactgccccccccacatcgagaacttcagcgacatcgacatgggcgagatcatcatgggcaacatcgagctgaccagatacaccagacccacccccgtgcagaagcacgccatccccatcatcaagggcaagagagacctgatggcctgcgcccagaccggcagcggcaagaccgccgccttcctgctgcccatcctgagccagatctacaccgacggccccggcgaggccctgaaggccgtgaagtag

SEQ ID NO: 114230 - DNA, 1974 bp, Artificial Sequence
  derived and/or modified sequence
atggagatcggcagacccagaaaggacacctggaagctggccaacctggacctgaacagcgagaagcagagcggcggcgccagcaccgccagcaagggcagatacatccccccccacctgagaaacagagaggccagcaagggcttccacgacaaggacagcagcggctggagctgcagcaaggacaaggacgcctacagcagcttcggcagcagagacagcagaggcaagcccggctacttcagcgagagaggcagcggcagcagaggcagattcgacgacagaggcagaagcgactacgacggcatcggcaacagagagagacccggcttcggcagattcgagagaagcggccacagcagatggtgcgacaagagcgtggaggacgactggagcaagcccctgccccccagcgagagactggagcaggagctgttcagcggcggcaacaccggcatcaacttcgagaagtacgacgacatccccgtggaggccaccggcagcaactgccccccccacatcgagaacttcagcgacatcgacatgggcgagatcatcatgggcaacatcgagctgaccagatacaccagacccacccccgtgcagaagcacgccatccccatcatcaagggcaagagagacctgatggcctgcgcccagaccggcagcggcaagaccgccgccttcctgctgcccatcctgagccagatctacaccgacggccccggcgaggccctgaaggccgtgaaggagaacggcagatacggcagaagaaagcagtaccccatcagcctggtgctggcccccaccagagagctggccgtgcagatctacgaggaggccagaaagttcagctacagaagcagagtgagaccctgcgtggtgtacggcggcgccgacatcggccagcagatcagagacctggagagaggctgccacctgctggtggccacccccggcagactggtggacatgatggagagaggcaagatcggcctggacttctgcaagtacctggtgctggacgaggccgacagaatgctggacatgggcttcgagccccagatcagaagaatcgtggagcaggacaccatgccccccaagggcgtgagacacaccatgatgttcagcgccaccttccccaaggagatccagatgctggccagagacttcctggacgagtacatcttcctggccgtgggcagagtgggcagcaccagcgagaacatcacccagaaggtggtgtgggtggaggacctggacaagagaagcttcctgctggacatcctgggcgccaccggcagcgacagcctgaccctggtgttcgtggagaccaagaagggcgccgacagcctggaggacttcctgtaccacgagggctacgcctgcaccagcatccacggcgacagaagccagagagacagagaggaggccctgcaccagttcagaagcggcaagagccccatcctggtggccaccgccgtggccgccagaggcctggacatcagcaacgtgagacacgtgatcaacttcgacctgcccagcgacatcgaggagtacgtgcacagaatcggcagaaccggcagagtgggcaacctgggcctggccaccagcttcttcaacgagaagaacatgaacatcaccaaggacctgctggacctgctggtggaggccaagcaggaggtgcccagctggctggagaacatggcctacgagcaccactacaagggcggcagcagaggcagaagcaagagcaacagattcagcggcggcttcggcgccagagactacagacagagcagcggcagcagcagcagcggcttcggcgccagcagaggcagcagcagcagaagcggcggcggcggctacggcaacagcagaggcttcggcggcggcggctacggcggcttctacaacagcgacggctacggcggcaactacaacagccagggcgtggactggtggggcaactag

SEQ ID NO: 114231 - protein, 617 aa, Artificial Sequence
  derived and/or modified sequence
MRPPQCLLHTPSLASPLLLLLLWLLGGGVGAEGREDAELLVTVRGGRLRGIRLKTPGGPVSAFLGIPFAEPPMGPRRFLPPEPKQPWSGVVDATTFQSVCYQYVDTLYPGFEGTEMWNPNRELSEDCLYLNVWTPYPRPTSPTPVLVWIYGGGFYSGASSLDVYDGRFLVQAERTVLVSMNYRVGAFGFLALPGSREAPGNVGLLDQRLALQWVQENVAAFGGDPTSVTLFGESAGAASVGMHLLSPPSRGLFHRAVLQSGAPNGPWATVGMGEARRRATQLAHLVGCPPGGTGGNDTELVACLRTRPAQVLVNHEWHVLPQESVFRFSFVPVVDGDFLSDTPEALINAGDFHGLQVLVGVVKDEGSYFLVYGAPGFSKDNESLISRAEFLAGVRVGVPQVSDLAAEAVVLHYTDWLHPEDPARLREALSDVVGDHNVVCPVAQLAGRLAAQGARVYAYVFEHRASTLSWPLWMGVPHGYEIEFIFGIPLDPSRNYTAEEKIFAQRLMRYWANFARTGDPNEPRDPKAPQWPPYTAGAQQYVSLDLRPLEVRRGLRAQACAFWNRFLPKLLSATASEAPSTCPGFTHGEAAPRPGLPLPLLLLHQLLLLFLSHLRRL

SEQ ID NO: 114232 - protein, 601 aa, Artificial Sequence
  derived and/or modified sequence
MRPPQCLLHTPSLASPLLLLLLWLLGGGVGAEGREDAELLVTVRGGRLRGIRLKTPGGPVSAFLGIPFAEPPMGPRRFLPPEPKQPWSGVVDATTFQSVCYQYVDTLYPGFEGTEMWNPNRELSEDCLYLNVWTPYPRPTSPTPVLVWIYGGGFYSGASSLDVYDGRFLVQAERTVLVSMNYRVGAFGFLALPGSREAPGNVGLLDQRLALQWVQENVAAFGGDPTSVTLFGESAGAASVGMHLLSPPSRGLFHRAVLQSGAPNGPWATVGMGEARRRATQLAHLVGCPPGGTGGNDTELVACLRTRPAQVLVNHEWHVLPQESVFRFSFVPVVDGDFLSDTPEALINAGDFHGLQVLVGVVKDEGSYFLVYGAPGFSKDNESLISRAEFLAGVRVGVPQVSDLAAEAVVLHYTDWLHPEDPARLREALSDVVGDHNVVCPVAQLAGRLAAQGARVYAYVFEHRASTLSWPLWMGVPHGYEIEFIFGIPLDPSRNYTAEEKIFAQRLMRYWANFARTGDPNEPRDPKAPQWPPYTAGAQQYVSLDLRPLEVRRGLRAQACAFWNRFLPKLLSATGMQGPAGSGRRGVGARCNPSLLPLASE

SEQ ID NO: 114233 - DNA, 1854 bp, Artificial Sequence
  derived and/or modified sequence
atgagacccccacaatgcttactgcatactcccagcttagcctcaccattgttgcttctcctgttatggctcctgggcggtggtgtgggtgccgaaggacgcgaagacgccgagttgttagtgaccgtgcgcggtggccggcttagggggattcgcctgaagacacctggtggccctgtgtccgcctttctgggtattccctttgcagaacccccaatggggccccgcaggttcctccctcccgaacccaagcagccgtggagtggagttgtcgacgccactacattccagtctgtgtgttatcagtacgtggacaccctgtatccaggctttgaggggactgagatgtggaacccaaaccgagaactctctgaggactgcttgtacttgaacgtttggacgccctaccccaggcccaccagcccgacacccgtactcgtttggatctacggtggaggattctacagcggcgcctcctctctggatgtttatgacggacggtttctggtgcaggccgaacggaccgtcttggtgagtatgaattatcgcgtcggagctttcggttttctcgccttgccaggctctagggaggcgcctggcaacgtaggcttactggatcagaggctcgccctacagtgggtgcaggagaatgtagcggccttcggaggcgaccccacctctgtcacactgttcggagaatcggccggggctgcttcagtagggatgcaccttttgtcacctccaagccggggactgtttcaccgagccgtgctgcagtcaggggcgcctaacggcccatgggccaccgtgggaatgggcgaggctagaaggcgagccacccagctagcacacctagtgggatgtcccccaggtggcaccggcgggaatgacacggaattggtcgcctgcctgcgaactaggcctgcacaggtactagtgaatcacgagtggcacgtcctgccacaggaaagtgtgtttcggttttcatttgtgcccgtggtagatggggactttctctctgacacgcctgaagccctcatcaacgcgggagatttccacgggctgcaggttctggtgggagtagtcaaggacgaggggtcttacttcctcgtgtacggtgctcccggattttctaaagacaacgagagtctgatttctcgggccgaattcctcgccggtgttagagtcggcgtccctcaagtgtccgacctggcagcagaagcggtggtgctgcattatacagattggttgcatcccgaggacccagctcgccttagggaggcattgtccgatgttgtaggagaccacaacgtggtgtgcccagtggcccaactcgcgggcagactggccgctcagggcgctcgcgtgtatgcttacgtattcgagcatagggcctccaccttgtcatggccattgtggatgggtgttccccatggctacgagatcgagttcatatttgggatcccccttgacccttcccggaattatacagctgaggagaagattttcgcacagcggctgatgcgttattgggccaactttgcacgaaccggtgatcctaacgagcctagggaccctaaggctccacagtggccaccttatacagccggggctcagcagtatgtgagcctggatctgcgaccactcgaagtgcgcagagggctgcgcgctcaggcctgcgcattttggaacaggttcctgcctaaactgttgtctgcgacagccagcgaggcccctagtacatgtcctggattcacccatggagaagccgcccccagacccggtctccccctgccactgctgttactgcaccagctgctcttactatttttgagccacttgcgtagactatag

SEQ ID NO: 114234 - DNA, 1854 bp, Artificial Sequence
  derived and/or modified sequence
atgaggcccccacagtgtctgctgcacacgccttcgctggctagtccgctgcttctactgcttctgtggttgctcggtgggggagtaggagctgagggccgcgaagacgcagaactgcttgtgacagtccgtggcggtcggctgaggggtattaggctaaaaacacccggcggtcccgtgagtgcctttttaggtatcccattcgctgagccgcccatgggcccaaggaggtttctccccccagagcccaagcagccttggtccggtgtcgttgacgccaccaccttccagtccgtctgctatcagtatgtggacacattgtatcctggctttgagggcactgaaatgtggaatcctaacagagaactgtctgaggattgcctctacctcaacgtatggacaccatatccacggccaacctcaccgactcccgtgctggtctggatttatgggggtggtttctactctggcgcctcttcactagacgtgtacgatggaaggtttttggttcaggctgagaggaccgtgctggtgagtatgaactaccgggttggggcgtttggctttctggcactgcccggaagccgcgaggcacccggcaacgtcggactactggaccagcgcctggctctgcagtgggtgcaggagaacgtagccgccttcgggggggaccctactagcgtaactctctttggcgaatcagcaggcgccgccagcgtcggaatgcacctattaagccccccaagccgtggcctatttcaccgggccgtgctgcagagtggcgctcctaacggaccgtgggcaacagtaggaatgggggaagccagaaggagggccacacagctcgcccacctggttggttgtcccccaggtggcactggcgggaacgatacagaactggtggcttgcctgaggacacgccctgcccaggtgttggtaaatcacgaatggcatgtcctccctcaggaaagcgtgttcagattcagcttcgttcctgttgtagacggtgatttcctgtcagacacaccagaagcattaatcaacgcgggcgatttccacgggttgcaggttctggtgggggtagtcaaggacgagggaagttacttcctcgtgtatggcgccccaggcttctcgaaggataacgagtcgcttatttccagggccgagtttcttgccggcgtacgcgttggagtgcctcaggtgagtgacctggcagcggaggccgtagtcctgcactacactgactggctgcacccagaggatccggcccggctgcgtgaagcactgtccgacgtcgtaggtgaccataatgttgtctgtcctgtggcccaactagccggtcgtttggccgctcagggcgcacgcgtctatgcttacgtgttcgaacacagagcttctacactgtcatggccactgtggatgggggtcccccacggctacgagatcgagttcattttcggcatcccgctcgatccttctcggaactatacagccgaggagaagatttttgctcagcggttaatgaggtactgggcgaatttcgctcggacaggagatcctaacgagccaagagacccaaaggccccccaatggcccccttacactgcaggggcccaacagtatgtcagtttggatctccgcccactggaggtgcgtaggggtttacgggcgcaggcttgtgccttttggaatcgattcctgcccaagcttctttcggctacagcatccgaggcccccagcacgtgtcctgggtttacacatggtgaggccgccccaagaccaggtctcccgctgccattactgctgctacaccaactcctactgttatttctgagccacctcaggaggctgtag

SEQ ID NO: 114235 - DNA, 1806 bp, Artificial Sequence
  derived and/or modified sequence
atgaggcctccacagtgtctcctgcatactccatcattggcctcccctcttttgttgctcttgctttggctgctgggaggcggggtcggggccgagggacgcgaggacgcagagcttctggtcacagtccggggcggcaggcttcgcggcatcagactgaaaacccccggcggaccagtgtccgccttcctggggattccctttgccgagccacctatgggcccgcgacgttttcttcccccagaaccaaagcagccatggtctggagtcgtagatgccacaacgtttcaatctgtgtgctaccagtacgtggacactttatatcccgggtttgagggaaccgaaatgtggaaccccaacagggagctgtccgaagactgcctctaccttaatgtgtggaccccctaccccagaccgacctcccccactccagtcctggtgtggatctacggaggcggcttttactctggggcgagctcactggacgtgtacgatggacggtttctcgttcaggccgagcgaacagtattggtctccatgaactaccgtgtgggggccttcggttttctggcactgcccggtagtcgagaagcaccaggaaatgtaggactcctggaccagcgtctggcgcttcagtgggtgcaggagaacgtggctgcatttggcggggacccaaccagcgtcaccctttttggagaaagtgccggggctgcttccgtgggcatgcacctcctgtctccaccgtcaaggggtctattccatagagctgtactccagtcaggagctcctaatggcccatgggccacagtgggtatgggagaggcccgacgccgggctacccagctagcacatctagtcggctgcccgccaggggggaccgggggaaatgacacggagctggtcgcatgcttgcggacacgaccagctcaggtgctggttaaccacgagtggcatgttcttcctcaggaatccgtcttcagattctcatttgtgccagtcgttgatggcgatttcctcagcgacactccagaggctctcattaatgccggtgactttcacggccttcaggtgctggtaggcgttgtcaaggatgaaggatcttacttcctggtttacggcgctcccggctttagcaaggacaatgaaagccttatctcccgcgccgaattcttagccggagtgcgcgtgggcgtaccccaggtgagcgacttagccgccgaagcggtcgtgctgcattacacagattggcttcaccctgaagaccctgctagactgcgcgaggcactgagtgatgtagtcggagaccataacgtggtctgcccagtagctcaacttgccgggaggctggcagcccaaggcgctcgcgtgtacgcatacgtgttcgagcaccgcgccagtacactaagctggcctctatggatgggagtgccgcatggatacgagattgagttcatctttggtatcccattggacccctcaagaaattacaccgctgaggagaagatcttcgctcagagactcatgcgctactgggccaacttcgccagaaccggggatcctaatgaaccacgggaccccaaggccccccaatggccaccctacacagctggtgcccagcagtatgtttccctcgatctgcgcccacttgaagtcagacggggcctcagggcccaggcatgtgccttctggaaccgcttcctgcctaagttgctgagcgcgaccggaatgcaggggcctgcaggaagtgggcggaggggcgtaggagcacgctgcaacccatctctgctgcccctggcgtctgagtag

SEQ ID NO: 114236 - DNA, 1854 bp, Artificial Sequence
  derived and/or modified sequence
atgaggcctccccagtgcctgctgcacacccccagcctggccagccccctgctgctgctgctgctgtggctgctgggcggcggcgtgggcgctgagggcagagaagatgctgagctgctggtgacagtgcggggcggccgcctgcggggcatccggctgaagacccctgggggccctgtgtctgccttcctgggcatcccctttgctgagccccccatgggcccccggcgcttcctgcccccagagcccaagcagccctggagcggcgtggtggatgccaccaccttccagagcgtgtgctaccagtatgtggacaccctgtacccaggctttgagggcacagagatgtggaaccccaaccgggagctgtctgaggactgcctgtacctgaatgtgtggaccccctacccccggcccaccagccccacccctgtgctggtgtggatctacggcggcggcttctacagcggggccagcagcctggatgtgtatgatggccgcttcctggtgcaggccgagaggacagtgctggtgtccatgaactacagagtgggcgccttcggcttcctggccctgcccggcagccgggaggcccctggaaatgtgggcctgctggaccagaggctggccctgcagtgggtgcaggagaatgtggccgcctttggaggagaccccacctctgtgaccctgtttggagagagcgctggagctgcctctgtgggcatgcacctgctgagcccccccagccggggcctcttccacagagctgtgctgcagagcggggcccccaacggcccctgggccaccgtgggcatgggagaggccaggagaagagccacccagctggcccacctggtgggctgccccccaggcggcactggaggaaatgacacagagctggtggcctgcctgcggaccaggcctgcccaggtgctggtgaaccacgagtggcacgtgctgccccaggagagcgtcttccgcttctcctttgtgcctgtggtggatggagacttcctgagtgacaccccagaggccctgatcaatgctggggacttccacggcctgcaggtgctggtgggcgtggtgaaggatgagggcagctacttcctggtgtatggagcccctggcttcagcaaggacaatgaaagcctcatcagcagagctgagttcctggccggcgtgcgggtgggcgtgccccaggtgtctgacctggccgctgaggccgtggtgctgcactacacagactggctgcaccctgaggaccctgcccggctgcgggaggccctgagtgatgtggtgggggaccacaacgtggtgtgccctgtggcccagctggccggccgcctggccgcccagggcgcccgggtgtatgcctacgtgtttgagcaccgggccagcaccctgtcctggcccctgtggatgggcgtgccccacggctatgaaattgagttcatcttcggcatccccctggaccccagcaggaactacacagctgaggagaagatctttgcccagaggctgatgagatactgggccaactttgccaggactggagaccccaatgagccccgggaccccaaggccccccagtggccaccctacacagctggggcccagcagtatgtgtccctggacctgcggcccctggaggtgcggcggggcctgcgggcccaggcctgtgccttctggaaccgcttcctgcccaagctgctgagcgccacagccagcgaggcccccagcacctgccccggcttcacccatggagaggccgccccccggcccggcctgcccctgcccctgctgctgctgcaccagctgctgctgctcttcctgagccacctgcggcggctgtag

SEQ ID NO: 114237 - DNA, 1806 bp, Artificial Sequence
  derived and/or modified sequence
atgaggcctccccagtgcctgctgcacacccccagcctggccagccccctgctgctgctgctgctgtggctgctgggcggcggcgtgggcgctgagggcagagaagatgctgagctgctggtgacagtgcggggcggccgcctgcggggcatccggctgaagacccctgggggccctgtgtctgccttcctgggcatcccctttgctgagccccccatgggcccccggcgcttcctgcccccagagcccaagcagccctggagcggcgtggtggatgccaccaccttccagagcgtgtgctaccagtatgtggacaccctgtacccaggctttgagggcacagagatgtggaaccccaaccgggagctgtctgaggactgcctgtacctgaatgtgtggaccccctacccccggcccaccagccccacccctgtgctggtgtggatctacggcggcggcttctacagcggggccagcagcctggatgtgtatgatggccgcttcctggtgcaggccgagaggacagtgctggtgtccatgaactacagagtgggcgccttcggcttcctggccctgcccggcagccgggaggcccctggaaatgtgggcctgctggaccagaggctggccctgcagtgggtgcaggagaatgtggccgcctttggaggagaccccacctctgtgaccctgtttggagagagcgctggagctgcctctgtgggcatgcacctgctgagcccccccagccggggcctcttccacagagctgtgctgcagagcggggcccccaacggcccctgggccaccgtgggcatgggagaggccaggagaagagccacccagctggcccacctggtgggctgccccccaggcggcactggaggaaatgacacagagctggtggcctgcctgcggaccaggcctgcccaggtgctggtgaaccacgagtggcacgtgctgccccaggagagcgtcttccgcttctcctttgtgcctgtggtggatggagacttcctgagtgacaccccagaggccctgatcaatgctggggacttccacggcctgcaggtgctggtgggcgtggtgaaggatgagggcagctacttcctggtgtatggagcccctggcttcagcaaggacaatgaaagcctcatcagcagagctgagttcctggccggcgtgcgggtgggcgtgccccaggtgtctgacctggccgctgaggccgtggtgctgcactacacagactggctgcaccctgaggaccctgcccggctgcgggaggccctgagtgatgtggtgggggaccacaacgtggtgtgccctgtggcccagctggccggccgcctggccgcccagggcgcccgggtgtatgcctacgtgtttgagcaccgggccagcaccctgtcctggcccctgtggatgggcgtgccccacggctatgaaattgagttcatcttcggcatccccctggaccccagcaggaactacacagctgaggagaagatctttgcccagaggctgatgagatactgggccaactttgccaggactggagaccccaatgagccccgggaccccaaggccccccagtggccaccctacacagctggggcccagcagtatgtgtccctggacctgcggcccctggaggtgcggcggggcctgcgggcccaggcctgtgccttctggaaccgcttcctgcccaagctgctgagcgccaccggcatgcagggccctgctggcagcggccggcggggcgtgggcgcccgctgcaaccccagcctgctgcccctggccagcgagtag

SEQ ID NO: 114238 - DNA, 1854 bp, Artificial Sequence
  derived and/or modified sequence
atgcggcccccccagtgcctgctgcacacccccagcctggccagccccctgctcctcttgttgctctggctgttgggcggaggggtgggcgctgagggtagagaggatgcagagctcttggtgaccgtgcgaggcggcaggctgagaggcatccggttgaagacacctggcggaccagtcagcgcattcctgggaattcccttcgctgagccacccatgggcccaaggcgcttcctgccccccgaacccaaacagccttggagcggagtggtggacgctactacattccaaagtgtgtgttatcaatacgttgataccctgtaccccggattcgaaggcacagaaatgtggaacccaaatagggaactgtctgaggattgtctttatctgaatgtgtggaccccgtacccgaggcctacatctcccacaccagttctcgtgtggatctacggcggaggcttctactctggcgccagtagcctggacgtatacgacggccgtttcctggtgcaagcagagaggacagtcctcgtttccatgaattatcgagtgggcgcctttggctttctggcacttcctggctctagggaggcccccggaaacgtcggactgcttgaccagaggcttgccctgcaatgggtgcaggagaacgtggcagcgttcggcggggatccaacatctgtaactttgtttggagagtctgctggtgccgcctctgtgggcatgcacttactcagccctccgagtcgcggcctctttcaccgagctgtgctgcagtcaggagcgcccaacggcccatgggctacagtgggcatgggggaagcccggaggagggccacgcagcttgcccacttagttggctgtcctcccggggggaccggcggaaacgatactgaactcgtggcttgcctgcgtacacgtcctgctcaggttcttgtgaaccatgaatggcacgtgttgccacaggaaagcgtgtttaggttctcctttgttcccgttgtggatggcgacttccttagcgatactccggaagcactcatcaatgctggcgattttcacggcctgcaggtgttggtgggagttgtaaaggatgaggggtcatattttttagtttacggggctcctgggtttagtaaggacaacgagagtctgatctctcgcgcggagtttctggcaggggtccgagtcggcgtgccccaggtgtccgacctcgctgccgaggcagttgttctgcattatacagattggctgcacccagaagacccagcccggctgcgggaggccttgtccgacgtggtgggcgaccacaacgtggtgtgtcctgtggcacaactggctgggaggctggctgcccaaggcgcacgcgtttacgcctatgtatttgagcatcgcgcgagcaccctttcgtggccactgtggatgggtgttccacacggctacgaaatcgagtttatttttggaattcccctcgacccatctagaaattacactgctgaagaaaaaatctttgcacaacgcctgatgaggtactgggctaattttgcgaggacgggtgatcctaatgagcctcgggacccaaaagcaccccaatggcccccttatacggctggcgcacagcagtacgtaagtctggacctgcgccctctagaggtgcggagggggctccgggcccaggcgtgtgcattctggaaccgattcctgcccaagctgctaagcgctacggcttcggaagctccaagtacttgccccgggttcacccatggagaggccgcccccaggccagggttacctctgccactgcttctcctgcaccagctgctcctgttatttttatcccatctaagacgcctgtag

SEQ ID NO: 114239 - DNA, 1854 bp, Artificial Sequence
  derived and/or modified sequence
atgcggcccccccagtgcctgctgcacacccccagcctggccagccccttgctcttactgctgctgtggttactaggagggggagtaggtgcagaaggccgcgaggacgccgaactgcttgttacagtaaggggcgggaggctgaggggtattagattgaaaacaccgggcggacctgtgtctgcgttcctgggcatcccctttgccgagccaccaatgggccctaggagatttctgcctccagagcccaagcagccctggagcggtgtggtggacgcaaccactttccagagcgtgtgttaccagtacgttgacactctatatcctggcttcgaggggactgaaatgtggaaccctaaccgggaattgtccgaggactgtctgtaccttaatgtgtggacaccatatccacgccctacctcgcccacacctgttttggtatggatctacggcggtgggttttatagtggcgctagctctctggatgtttacgacggcaggtttctggtgcaggctgaacgtaccgtgctcgtgtcaatgaactatagagtaggagcctttggcttcttagccctgcccgggtctagggaggcgccaggaaacgtgggactactggatcaacggcttgcattgcagtgggttcaggaaaatgtggcagcatttggcggagatcccacctcggtgacgctgttcggagaatctgctggagctgcctccgtgggcatgcatctgctgtcacctccctctaggggcctgttccacagggcggttctgcagtccggcgcccccaatggcccgtgggctactgtgggaatgggtgaggcccgccgcagagcaactcagctggcccatctggtaggatgcccccctggaggcaccggggggaatgataccgaattagttgcctgtttgcgaactcgaccagctcaggtcctggtgaatcatgaatggcatgttctgccccaggagtcagtttttaggttctcctttgtccctgtcgttgatggtgacttcctaagcgatacgcccgaggcactgattaacgccggggactttcatggccttcaggttctggtgggtgtggtgaaggacgaaggttcctatttcctcgtgtacggtgcacccggattctccaaagacaatgagagcttgatatcccgggcagaattcttggccggcgtgagagttggtgtccctcaagttagtgacctagccgctgaggctgtcgttctccactacactgactggctgcatccggaagatcctgcgcgcttaagagaagccctgtccgatgtcgtcggcgaccataacgtggtgtgtcctgtcgcccagttagccggcagattggccgctcagggcgcacgcgtgtatgcatacgtgttcgagcacagagctagtactctgagctggcccctttggatgggcgtgccccacgggtacgagattgagttcatctttgggattccattagatccttcccggaactataccgcagaagaaaagatctttgcacagcggctcatgagatattgggcaaattttgctcggacgggggaccccaatgagccgcgcgaccctaaggctccccagtggccaccatatactgctggggctcagcagtatgtgtctctggacttaagacctctggaagtcaggcgaggtcttagggcgcaagcttgcgccttctggaataggtttctgcccaaactcttatcggctacagcctccgaagcacccagtacttgcccaggatttacccacggggaggccgctcctcggccaggcctaccacttcccctcctcttactacaccagctgctgctgctttttctcagtcaccttcgacggctctag

SEQ ID NO: 114240 - DNA, 1806 bp, Artificial Sequence
  derived and/or modified sequence
atgcggcccccccagtgcctgctgcacacccccagcctggccagccccctgctgctgctcctgctgtggctgctggggggcggcgtgggagccgagggtagagaggatgccgaacttctggttactgtgagaggaggaaggctgaggggcatacggctgaagacccctggtgggccagtctcagcattccttgggatcccgtttgcagaacctccaatgggacctcgccggtttctgccccccgaaccaaagcagccatggtcaggcgttgtggacgcgaccacattccagtccgtgtgctaccagtatgtagataccctgtacccagggtttgagggaactgagatgtggaacccaaacagggagttgtcagaggactgcctgtatctaaatgtgtggaccccctacccacgcccaacatcgccgacaccggtgctggtatggatctatggcggggggttttattcaggtgcgagtagtttggacgtgtacgacggcaggttcctggtgcaggccgaaaggaccgttttggtgtccatgaactaccgtgttggggcttttggctttttggccctccctggaagcagagaagcacccgggaatgtcggactgctggatcagcgtctcgccttgcagtgggttcaggaaaatgttgctgcttttggtggggaccctacaagtgtgactctcttcggcgaatctgctggtgctgcatcggtgggcatgcatctgctgagcccaccgtcgagagggctgttccacagggccgtgcttcagagtggcgccccaaatgggccctgggccacagtgggcatgggcgaggccagacggcgagctacgcagctggcgcaccttgttggatgtccgcctggcgggacgggaggaaacgacaccgagctggtggcatgtttgcgcactcgtccggcccaagtgctggtgaaccacgagtggcatgtcctacctcaggaaagcgttttcagattctccttcgtccctgtcgtggatggcgatttcctatccgacaccccagaggccttaatcaatgccggcgattttcacgggctgcaagttctggtgggcgtcgtgaaggacgaggggagctattttctggtgtacggcgcacccggcttctctaaagacaatgaatcactcatttctcgggcagagttcttagcaggagtacgggtgggtgtgccacaggtgtctgacctagcagctgaggccgtggttttgcactataccgactggcttcacccagaggacccagcacgcctccgggaagccctgtcagacgtcgtcggcgaccacaatgtggtgtgccccgtggcgcaactcgctggtcgcttggcggctcaaggggctcgggtgtacgcttacgtttttgaacacagggcttccacactttcatggccactgtggatgggagtgccgcacggctacgagatcgagttcatcttcggcatccccctggacccatctaggaattatacagccgaggagaagattttcgctcagaggctgatgaggtactgggcaaactttgctcgcacaggggaccccaatgaacctcgcgatcccaaagcccctcagtggccaccatacaccgctggggcgcagcaatatgtctctcttgacctgaggcccttagaggtgcgccgcggcttgagggcccaggcttgtgctttttggaatcgatttctgcccaaactcctgtcagccactggtatgcaaggacctgctgggtctggcagacgcggcgttggcgcccggtgcaatccaagtcttctccccctggctagtgaatag

SEQ ID NO: 114241 - DNA, 1854 bp, Artificial Sequence
  derived and/or modified sequence
atgcgcccaccccagtgcctgctgcatacaccctctctagcgtctccacttttattactgctactgtggttactcggcggaggcgtgggagcagaaggacgcgaagacgcggagctactggtgaccgttcggggtggccgacttcgcggtatcaggctgaagactcccggaggacccgtgtccgcttttttaggcatcccatttgccgaacccccaatgggcccacgccgatttctgccaccagaacctaagcagccgtggagcggtgttgttgacgctaccaccttccagtccgtgtgctaccagtacgtggacactctctacccgggattcgaaggaacggagatgtggaacccgaatagagagctcagcgaagattgcctgtacctcaacgtctggactccttacccgagacccacatctcctacacccgtcctggtctggatttatggtggtggcttctactccggcgcttcgtcactagacgtctacgacggcaggttcctggttcaggccgagcgtaccgtgctcgtttctatgaactaccgcgttggcgctttcggattcttggcactgccaggcagccgggaagccccagggaacgtcggccttctcgaccagagactggccctacaatgggtccaagagaatgtcgccgcatttggcggtgaccccacaagtgtcacgctctttggagagtcagctggggcagccagtgttggaatgcatctcttaagtcctccctctcgaggcctgtttcatagagccgtgttacagtctggggcacccaacggaccctgggccaccgtgggaatgggcgaggcccgtcgacgagccactcagctggcccatcttgtgggctgtccccctgggggtaccgggggaaacgacacggagctcgtggcttgtctccgcactcggcctgcccaggtgctggtaaaccatgaatggcacgtcctgccccaggagagcgtttttagattcagttttgtgcctgtagtcgacggcgactttctctctgacactcccgaggcgctgatcaacgccggtgatttccatggcctccaggttctggtgggagtcgtcaaagatgaaggttcctatttcctcgtgtacggggcaccgggattttccaaagacaatgagagtctcatctctcgtgctgagtttcttgccggtgtcagagtgggtgtgccacaggtgtcagacctcgctgccgaggccgtggtgctgcattacacagattggctccaccccgaggaccctgcccgtctccgcgaagcactgtccgacgtcgtgggagatcacaatgtggtgtgtccagtcgcacaactggcaggtcgcttggccgctcagggcgctcgcgtctacgcctacgtcttcgagcatagggcctccaccctgtcatggccactctggatgggtgtccctcacggatacgagatcgagttcatcttcgggattccactcgatccttctcgcaactatacggcagaggagaagatcttcgcacagcgccttatgaggtattgggctaactttgcacgcaccggggaccccaatgagcctagggatcctaaggcccctcagtggccaccctacaccgccggagcacaacagtatgtaagcctcgacctgaggccactagaagtgcgcaggggcctccgggcacaagcttgcgcattttggaacagatttctcccaaaactgctgtctgcaacagcctcagaggccccttcaacatgtccagggttcacccacggtgaagcagctccgaggccagggctgccacttcccctcctgctgctacatcagctgctactgctgttcttgtctcatctcagacgtctctag

SEQ ID NO: 114242 - DNA, 1854 bp, Artificial Sequence
  derived and/or modified sequence
atgcgccctccacagtgtctgcttcatacacctagcctcgcgagcccattactgttgctcctcctgtggttgctggggggtggagtcggtgccgagggccgagaggatgcggaactgctagtgacagtacgcggaggcagactaagaggtatccgtctaaaaaccccaggtgggcctgtgagtgcattcctcggcattccgtttgcagaacctcccatgggtcctagaaggttcttgcctccggaaccaaagcagccctggtccggggtggtggacgccaccacgttccagtccgtgtgctatcagtatgtagacactttgtacccagggttcgagggaactgaaatgtggaatccaaacagagagcttagcgaagactgtctgtatctaaacgtgtggactccttacccccgtcccacttcccctacacctgtgctggtctggatttatggaggcggattctactcaggagcaagtagcctggatgtctatgatggtagatttctggttcaggcagagcgcacggtactggtatccatgaactatcgagtgggagccttcggtttccttgccttaccgggaagtcgggaagcaccaggaaacgttggacttctcgatcaacggctggctctgcagtgggttcaggaaaatgtggccgcttttggcggagatcctactagtgtcacactgttcggcgaaagtgccggtgcagcatcagttggtatgcatctcttatctccgccatcccgcggactcttccacagagccgtgctccagtctggggctcctaacggcccatgggctactgtgggcatgggcgaggcaagaagacgggctacacagctggcccatcttgtaggctgcccacccggagggaccggcggaaacgatacggagctcgttgcctgcttgcgcacccgccctgcacaggtgcttgtgaatcatgaatggcatgttctgcctcaagagtccgtgtttcggttcagctttgtacccgttgtggatggagactttctgtcagatacccctgaggctctgatcaacgctggagactttcatggactgcaggttcttgtaggcgttgtgaaagacgagggatcctactttcttgtttatggcgcacctgggttctctaaggataatgagagtctgattagccgagccgagttcctggcaggcgtgcgcgtcggggttccacaggtttcagatcttgcggcagaggcagttgtactgcactacactgattggctgcatccagaggaccccgctcggctgcgggaagctttgtctgatgtggttggcgaccacaatgtggtgtgccctgtcgcacagttggccggtagactggccgctcagggagcaagagtgtacgcctacgtctttgagcatcgggcttcgacattgagctggcccttatggatgggcgtgcctcatggatacgagattgagtttattttcggcatcccgctggacccctcccgtaactatacagctgaggaaaaaatcttcgcccagcgtctgatgcggtactgggcaaactttgcgaggaccggcgaccccaacgagcctcgggaccctaaagcccctcaatggccgccatatactgccggagcacaacagtatgtctctcttgatctgagaccgctagaggtccggaggggcttacgggcacaggcgtgcgccttctggaacaggtttcttcccaagctcctgtcagctacggccagcgaagccccttccacatgtcctggcttcacccacggcgaggcagctcccaggcccggactgccactcccactgcttctgctgcatcagcttctcctgctgttcctcagccacctgagacgtctatag

SEQ ID NO: 114243 - DNA, 1806 bp, Artificial Sequence
  derived and/or modified sequence
atgaggcctccacaatgcttactccacacaccatcactcgcctcgcctcttttgttgctcctgctgtggttgctgggcggaggtgtaggggctgagggcagggaagacgcagagctcctcgtgacagtccgaggtggcaggctgaggggcattcggctgaagacaccaggcggacccgtcagcgccttcttagggattccttttgcagagccccctatggggccacggcgtttcttaccgccagaacccaagcagccctggtccggggtcgttgatgctacaaccttccagtcagtgtgttatcagtacgtggatacactgtatcctggctttgaggggactgagatgtggaaccctaatagagaactgagcgaggattgcctataccttaacgtgtggacgccctacccacggccaacgagcccaacaccagtgctggtgtggatttatggcggaggcttctactccggggcaagttctttggatgtttacgacggcaggtttcttgtgcaagcggaacggaccgttttggtctccatgaattaccgggttggggctttcggatttctggctctcccaggctctcgggaagccccaggcaacgtgggactgctcgaccaacggttggccttacagtgggtgcaggagaacgtcgcggctttcggcggagatcccactagcgttaccctctttggcgagtccgccggtgccgcttcagtgggcatgcatctgctgtctccaccgagcagaggcctctttcacagagccgtactgcagtcgggagcacctaacggcccatgggcaacagtgggcatgggcgaggcaaggagaagggcaacgcaactggcccatctggtaggatgccctcccggaggaacgggcggaaatgacactgagctggttgcatgcttgcggactcgcccagcccaggttctggtaaatcacgaatggcatgtgctgccacaggaatccgtgttccggttttcattcgtacccgtcgttgatggcgacttcttatcggacacacccgaggccctcatcaatgcaggtgacttccacggtctacaggtccttgttggcgtggttaaggatgaaggaagttacttcctggtgtacggcgcacctgggttctcaaaggacaatgaatctttaatttctcgcgctgagttccttgctggtgtccgagtgggcgtcccacaagtctccgacctggccgcagaggcagtggtgctccattataccgactggctgcaccctgaagaccctgccaggttgcgagaggcactgtctgatgttgtcggcgaccataatgtcgtttgtccggttgctcaactcgcagggaggctggctgcccagggggcacgtgtctacgcctatgtgttcgaacacagagcttcaacccttagctggccactgtggatgggggtcccccacggatacgagattgaatttatcttcgggatcccccttgatccatcaaggaactacaccgccgaagagaaaatattcgctcaacgccttatgaggtactgggccaactttgctcgaactggtgaccctaacgagcctcgggatcctaaggctccccagtggcctccctacaccgctggggctcagcaatacgttagcctggacctgcgtcctttggaggtgaggagaggtttacgggctcaggcttgtgccttctggaataggttcctgccaaagttgttgtccgccacaggaatgcagggacctgctggctctggcaggaggggcgtgggggcacgctgcaacccctctctgctgccccttgcctccgagtag

SEQ ID NO: 114244 - DNA, 2956 bp, Artificial Sequence
  derived and/or modified sequence
ggggtgtgtgcggggggccggaggcggcggctgtcagagtcggctcagcctgcgccggggaacatcggccgcctccagctcccggcgcggcccggcccggcccggctcggccgcctcagacgccgcctgccctgcagccatgaggcccccgcagtgtctgctgcacacgccttccctggcttccccactccttctcctcctcctctggctcctgggtggaggagtgggggctgagggccgggaggatgcagagctgctggtgacggtgcgtgggggccggctgcggggcattcgcctgaagacccccgggggccctgtctctgctttcctgggcatcccctttgcggagccacccatgggaccccgtcgctttctgccaccggagcccaagcagccttggtcaggggtggtagacgctacaaccttccagagtgtctgctaccaatatgtggacaccctatacccaggttttgagggcaccgagatgtggaaccccaaccgtgagctgagcgaggactgcctgtacctcaacgtgtggacaccatacccccggcctacatcccccacccctgtcctcgtctggatctatgggggtggcttctacagtggggcctcctccttggacgtgtacgatggccgcttcttggtacaggccgagaggactgtgctggtgtccatgaactaccgggtgggagcctttggcttcctggccctgccggggagccgagaggccccgggcaatgtgggtctcctggatcagaggctggccctgcagtgggtgcaggagaacgtggcagccttcgggggtgacccgacatcagtgacgctgtttggggagagcgcgggagccgcctcggtgggcatgcacctgctgtccccgcccagccggggcctgttccacagggccgtgctgcagagcggtgcccccaatggaccctgggccacggtgggcatgggagaggcccgtcgcagggccacgcagctggcccaccttgtgggctgtcctccaggcggcactggtgggaatgacacagagctggtagcctgccttcggacacgaccagcgcaggtcctggtgaaccacgaatggcacgtgctgcctcaagaaagcgtcttccggttctccttcgtgcctgtggtagatggagacttcctcagtgacaccccagaggccctcatcaacgcgggagacttccacggcctgcaggtgctggtgggtgtggtgaaggatgagggctcgtattttctggtttacggggccccaggcttcagcaaagacaacgagtctctcatcagccgggccgagttcctggccggggtgcgggtcggggttccccaggtaagtgacctggcagccgaggctgtggtcctgcattacacagactggctgcatcccgaggacccggcacgcctgagggaggccctgagcgatgtggtgggcgaccacaatgtcgtgtgccccgtggcccagctggctgggcgactggctgcccagggtgcccgggtctacgcctacgtctttgaacaccgtgcttccacgctctcctggcccctgtggatgggggtgccccacggctacgagatcgagttcatctttgggatccccctggacccctctcgaaactacacggcagaggagaaaatcttcgcccagcgactgatgcgatactgggccaactttgcccgcacaggggatcccaatgagccccgagaccccaaggccccacaatggcccccgtacacggcgggggctcagcagtacgttagtctggacctgcggccgctggaggtgcggcgggggctgcgcgcccaggcctgcgccttctggaaccgcttcctccccaaattgctcagcgccaccgcctcggaggctcccagcacctgcccaggcttcacccatggggaggctgctccgaggcccggcctccccctgcccctcctcctcctccaccagcttctcctcctcttcctctcccacctccggcggctgtgaacacggcctcttcccctacggccacaggggcccctcctctaatgagtggtcggaccgtggggaagggccccactcagggatctcagacctagtgctcccttcctcctcaaaccgagagactcacactggacagggcaggaggagggggccgtgcctcccacccttctcagggacccccacgcctttgttgtttgaatggaaatggaaaagccagtattcttttataaaattatcttttggaacctgagcctgacattggggggaagtgggaggccccggacggggtagcaccccccattggggctataacggtcaaccatttctgtctcttctttttcccccaacctccccctcctgtcccctctgttcccgtcttccggtcattcttttctcctcctctctccttcctgctgtccttctccggccccgcctctgccctcatcctccctctcgtctttcgcacattctcctgatcctcttgccaccgtcccacgtggtcgcctgcatttctccgtgcgtcctccctgcactcatacccccccttcaacccgcccaaatgtccgatccccgaccttcctcgtgccgtcctcccctcccgcctcgctgggcgccctggccgcagacacgctcgacgaggcggagcgccagtggaaggccgagttccaccgctggagctcctacatggtgcactggaagaaccagttcgaccactacagcaagcaggatcgctgctcagacctgtgaccccggcgggacccccatgtcctccgctccgcccggccccctagctgtatatactatttatttcagggctgggctataacacagacgagccccagactctgcccatccccaccccaccccgacgtcccccggggctcccggtcctctgcatgtctcaggctgagctccctcccccgcggtgccttcgcccctctgggctgccaataaactgttacagcc

SEQ ID NO: 114245 - DNA, 2179 bp, Artificial Sequence
  derived and/or modified sequence
gaacatcggccgcctccagctcccggcgcggcccggcccggcccggctcggccgcctcagcagacgccgcctgccctgcagccatgaggcccccgcagtgtctgctgcacacgccttccctggcttccccactccttctcctcctcctctggctcctgggtggaggagtgggggctgagggccgggaggatgcagagctgctggtgacggtgcgtgggggccggctgcggggcattcgcctgaagacccccgggggccctgtctctgctttcctgggcatcccctttgcggagccacccatgggaccccgtcgctttctgccaccggagcccaagcagccttggtcaggggtggtagacgctacaaccttccagagtgtctgctaccaatatgtggacaccctatacccaggttttgagggcaccgagatgtggaaccccaaccgtgagctgagcgaggactgcctgtacctcaacgtgtggacaccatacccccggcctacatcccccacccctgtcctcgtctggatctatgggggtggcttctacagtggggcctcctccttggacgtgtacgatggccgcttcttggtacaggccgagaggactgtgctggtgtccatgaactaccgggtgggagcctttggcttcctggccctgccggggagccgagaggccccgggcaatgtgggtctcctggatcagaggctggccctgcagtgggtgcaggagaacgtggcagccttcgggggtgacccgacatcagtgacgctgtttggggagagcgcgggagccgcctcggtgggcatgcacctgctgtccccgcccagccggggcctgttccacagggccgtgctgcagagcggtgcccccaatggaccctgggccacggtgggcatgggagaggcccgtcgcagggccacgcagctggcccaccttgtgggctgtcctccaggcggcactggtgggaatgacacagagctggtagcctgccttcggacacgaccagcgcaggtcctggtgaaccacgaatggcacgtgctgcctcaagaaagcgtcttccggttctccttcgtgcctgtggtagatggagacttcctcagtgacaccccagaggccctcatcaacgcgggagacttccacggcctgcaggtgctggtgggtgtggtgaaggatgagggctcgtattttctggtttacggggccccaggcttcagcaaagacaacgagtctctcatcagccgggccgagttcctggccggggtgcgggtcggggttccccaggtaagtgacctggcagccgaggctgtggtcctgcattacacagactggctgcatcccgaggacccggcacgcctgagggaggccctgagcgatgtggtgggcgaccacaatgtcgtgtgccccgtggcccagctggctgggcgactggctgcccagggtgcccgggtctacgcctacgtctttgaacaccgtgcttccacgctctcctggcccctgtggatgggggtgccccacggctacgagatcgagttcatctttgggatccccctggacccctctcgaaactacacggcagaggagaaaatcttcgcccagcgactgatgcgatactgggccaactttgcccgcacaggggatcccaatgagccccgagaccccaaggccccacaatggcccccgtacacggcgggggctcagcagtacgttagtctggacctgcggccgctggaggtgcggcgggggctgcgcgcccaggcctgcgccttctggaaccgcttcctccccaaattgctcagcgccaccgcctcggaggctcccagcacctgcccaggcttcacccatggggaggctgctccgaggcccggcctccccctgcccctcctcctcctccaccagcttctcctcctcttcctctcccacctccggcggctgtgaacacggcctcttcccctacggccacaggggcccctcctctaatgagtggtcggaccgtggggaagggccccactcagggatctcagacctagtgctcccttcctcctcaaaccgagagactcacactggacagggcaggaggagggggccgtgcctcccacccttctcagggacccccacgcctttgttgtttgaatggaaatggaaaagccagtattcttttataaaattatcttttggaa

SEQ ID NO: 114246 - DNA, 1942 bp, Artificial Sequence
  derived and/or modified sequence
ggggtgtgtgcggggggccggaggcggcggctgtcagagtcggctcagcctgcgccggggaacatcggccgcctccagctcccggcgcggcccggcccggcccggctcggccgcctcagacgccgcctgccctgcagccatgaggcccccgcagtgtctgctgcacacgccttccctggcttccccactccttctcctcctcctctggctcctgggtggaggagtgggggctgagggccgggaggatgcagagctgctggtgacggtgcgtgggggccggctgcggggcattcgcctgaagacccccgggggccctgtctctgctttcctgggcatcccctttgcggagccacccatgggaccccgtcgctttctgccaccggagcccaagcagccttggtcaggggtggtagacgctacaaccttccagagtgtctgctaccaatatgtggacaccctatacccaggttttgagggcaccgagatgtggaaccccaaccgtgagctgagcgaggactgcctgtacctcaacgtgtggacaccatacccccggcctacatcccccacccctgtcctcgtctggatctatgggggtggcttctacagtggggcctcctccttggacgtgtacgatggccgcttcttggtacaggccgagaggactgtgctggtgtccatgaactaccgggtgggagcctttggcttcctggccctgccggggagccgagaggccccgggcaatgtgggtctcctggatcagaggctggccctgcagtgggtgcaggagaacgtggcagccttcgggggtgacccgacatcagtgacgctgtttggggagagcgcgggagccgcctcggtgggcatgcacctgctgtccccgcccagccggggcctgttccacagggccgtgctgcagagcggtgcccccaatggaccctgggccacggtgggcatgggagaggcccgtcgcagggccacgcagctggcccaccttgtgggctgtcctccaggcggcactggtgggaatgacacagagctggtagcctgccttcggacacgaccagcgcaggtcctggtgaaccacgaatggcacgtgctgcctcaagaaagcgtcttccggttctccttcgtgcctgtggtagatggagacttcctcagtgacaccccagaggccctcatcaacgcgggagacttccacggcctgcaggtgctggtgggtgtggtgaaggatgagggctcgtattttctggtttacggggccccaggcttcagcaaagacaacgagtctctcatcagccgggccgagttcctggccggggtgcgggtcggggttccccaggtaagtgacctggcagccgaggctgtggtcctgcattacacagactggctgcatcccgaggacccggcacgcctgagggaggccctgagcgatgtggtgggcgaccacaatgtcgtgtgccccgtggcccagctggctgggcgactggctgcccagggtgcccgggtctacgcctacgtctttgaacaccgtgcttccacgctctcctggcccctgtggatgggggtgccccacggctacgagatcgagttcatctttgggatccccctggacccctctcgaaactacacggcagaggagaaaatcttcgcccagcgactgatgcgatactgggccaactttgcccgcacaggggatcccaatgagccccgagaccccaaggccccacaatggcccccgtacacggcgggggctcagcagtacgttagtctggacctgcggccgctggaggtgcggcgggggctgcgcgcccaggcctgcgccttctggaaccgcttcctccccaaattgctcagcgccaccggtatgcaggggccagcgggcagcgggaggaggggagtgggagcccgctgtaacccctctcttctccccctagcctcggag

SEQ ID NO: 114247 - DNA, 1854 bp, Artificial Sequence
  derived and/or modified sequence
atgagacccccccagtgcctgctgcacacccccagcctggccagccccctgctgctgctgctgctgtggctgctgggcggcggcgtgggcgccgagggcagagaggacgccgagctgctggtgaccgtgagaggcggcagactgagaggcatcagactgaagacccccggcggccccgtgagcgccttcctgggcatccccttcgccgagccccccatgggccccagaagattcctgccccccgagcccaagcagccctggagcggcgtggtggacgccaccaccttccagagcgtgtgctaccagtacgtggacaccctgtaccccggcttcgagggcaccgagatgtggaaccccaacagagagctgagcgaggactgcctgtacctgaacgtgtggaccccctaccccagacccaccagccccacccccgtgctggtgtggatctacggcggcggcttctacagcggcgccagcagcctggacgtgtacgacggcagattcctggtgcaggccgagagaaccgtgctggtgagcatgaactacagagtgggcgccttcggcttcctggccctgcccggcagcagagaggcccccggcaacgtgggcctgctggaccagagactggccctgcagtgggtgcaggagaacgtggccgccttcggcggcgaccccaccagcgtgaccctgttcggcgagagcgccggcgccgccagcgtgggcatgcacctgctgagcccccccagcagaggcctgttccacagagccgtgctgcagagcggcgcccccaacggcccctgggccaccgtgggcatgggcgaggccagaagaagagccacccagctggcccacctggtgggctgcccccccggcggcaccggcggcaacgacaccgagctggtggcctgcctgagaaccagacccgcccaggtgctggtgaaccacgagtggcacgtgctgccccaggagagcgtgttcagattcagcttcgtgcccgtggtggacggcgacttcctgagcgacacccccgaggccctgatcaacgccggcgacttccacggcctgcaggtgctggtgggcgtggtgaaggacgagggcagctacttcctggtgtacggcgcccccggcttcagcaaggacaacgagagcctgatcagcagagccgagttcctggccggcgtgagagtgggcgtgccccaggtgagcgacctggccgccgaggccgtggtgctgcactacaccgactggctgcaccccgaggaccccgccagactgagagaggccctgagcgacgtggtgggcgaccacaacgtggtgtgccccgtggcccagctggccggcagactggccgcccagggcgccagagtgtacgcctacgtgttcgagcacagagccagcaccctgagctggcccctgtggatgggcgtgccccacggctacgagatcgagttcatcttcggcatccccctggaccccagcagaaactacaccgccgaggagaagatcttcgcccagagactgatgagatactgggccaacttcgccagaaccggcgaccccaacgagcccagagaccccaaggccccccagtggcccccctacaccgccggcgcccagcagtacgtgagcctggacctgagacccctggaggtgagaagaggcctgagagcccaggcctgcgccttctggaacagattcctgcccaagctgctgagcgccaccgccagcgaggcccccagcacctgccccggcttcacccacggcgaggccgcccccagacccggcctgcccctgcccctgctgctgctgcaccagctgctgctgctgttcctgagccacctgagaagactgtag

SEQ ID NO: 114248 - DNA, 1806 bp, Artificial Sequence
  derived and/or modified sequence
atgagacccccccagtgcctgctgcacacccccagcctggccagccccctgctgctgctgctgctgtggctgctgggcggcggcgtgggcgccgagggcagagaggacgccgagctgctggtgaccgtgagaggcggcagactgagaggcatcagactgaagacccccggcggccccgtgagcgccttcctgggcatccccttcgccgagccccccatgggccccagaagattcctgccccccgagcccaagcagccctggagcggcgtggtggacgccaccaccttccagagcgtgtgctaccagtacgtggacaccctgtaccccggcttcgagggcaccgagatgtggaaccccaacagagagctgagcgaggactgcctgtacctgaacgtgtggaccccctaccccagacccaccagccccacccccgtgctggtgtggatctacggcggcggcttctacagcggcgccagcagcctggacgtgtacgacggcagattcctggtgcaggccgagagaaccgtgctggtgagcatgaactacagagtgggcgccttcggcttcctggccctgcccggcagcagagaggcccccggcaacgtgggcctgctggaccagagactggccctgcagtgggtgcaggagaacgtggccgccttcggcggcgaccccaccagcgtgaccctgttcggcgagagcgccggcgccgccagcgtgggcatgcacctgctgagcccccccagcagaggcctgttccacagagccgtgctgcagagcggcgcccccaacggcccctgggccaccgtgggcatgggcgaggccagaagaagagccacccagctggcccacctggtgggctgcccccccggcggcaccggcggcaacgacaccgagctggtggcctgcctgagaaccagacccgcccaggtgctggtgaaccacgagtggcacgtgctgccccaggagagcgtgttcagattcagcttcgtgcccgtggtggacggcgacttcctgagcgacacccccgaggccctgatcaacgccggcgacttccacggcctgcaggtgctggtgggcgtggtgaaggacgagggcagctacttcctggtgtacggcgcccccggcttcagcaaggacaacgagagcctgatcagcagagccgagttcctggccggcgtgagagtgggcgtgccccaggtgagcgacctggccgccgaggccgtggtgctgcactacaccgactggctgcaccccgaggaccccgccagactgagagaggccctgagcgacgtggtgggcgaccacaacgtggtgtgccccgtggcccagctggccggcagactggccgcccagggcgccagagtgtacgcctacgtgttcgagcacagagccagcaccctgagctggcccctgtggatgggcgtgccccacggctacgagatcgagttcatcttcggcatccccctggaccccagcagaaactacaccgccgaggagaagatcttcgcccagagactgatgagatactgggccaacttcgccagaaccggcgaccccaacgagcccagagaccccaaggccccccagtggcccccctacaccgccggcgcccagcagtacgtgagcctggacctgagacccctggaggtgagaagaggcctgagagcccaggcctgcgccttctggaacagattcctgcccaagctgctgagcgccaccggcatgcagggccccgccggcagcggcagaagaggcgtgggcgccagatgcaaccccagcctgctgcccctggccagcgagtag

SEQ ID NO: 114249 - protein, 614 aa, Artificial Sequence
  derived and/or modified sequence
MRPPQCLLHTPSLASPLLLLLLWLLGGGVGAEGREDAELLVTVRGGRLRGIRLKTPGGPVSAFLGIPFAEPPMGPRRFLPPEPKQPWSGVVDATTFQSVCYQYVDTLYPGFEGTEMWNPNRELSEDCLYLNVWTPYPRPTSPTPVLVWIYGGGFYSGASSLDVYDGRFLVQAERTVLVSMNYRVGAFGFLALPGSREAPGNVGLLDQRLALQWVQENVAAFGGDPTSVTLFGESAGAASVGMHLLSPPSRGLFHRAVLQSGAPNGPWATVGMGEARRRATQLAHLVGCPPGGTGGNDTELVACLRTRPAQVLVNHEWHVLPQESVFRFSFVPVVDGDFLSDTPEALINAGDFHGLQVLVGVVKDEGSYFLVYGAPGFSKDNESLISRAEFLAGVRVGVPQVSDLAAEAVVLHYTDWLHPEDPARLREALSDVVGDHNVVCPVAQLAGRLAAQGARVYAYVFEHRASTLSWPLWMGVPHGYEIEFIFGIPLDPSRNYTAEEKIFAQRLMRYWANFARTGDPNEPRDPKAPQWPPYTAGAQQYVSLDLRPLEVRRGLRAQACAFWNRFLPKLLSATDTLDEAERQWKAEFHRWSSYMVHWKNQFDHYSKQDRCSDL

SEQ ID NO: 114250 - protein, 159 aa, Artificial Sequence
  derived and/or modified sequence
MRPPQCLLHTPSLASPLLLLLLWLLGGGVGAEGREDAELLVTVRGGRLRGIRLKTPGGPVSAFLGIPFAEPPMGPRRFLPPEPKQPWSGVVDATTFQSVCYQYVDTLYPGFEGTEMWNPNRELSEDCLYLNVWTPYPRPTSPTPVLVWIYGGGFYSGAS

SEQ ID NO: 114251 - protein, 28 aa, Artificial Sequence
  derived and/or modified sequence
MRPPQCLLHTPSLASPLLLLLLWLLGGG

SEQ ID NO: 114252 - DNA, 1845 bp, Artificial Sequence
  derived and/or modified sequence
atgcggcctcctcaatgtctactgcacacaccaagcctggcctctccactgctcctgctcttattgtggctcctgggcggcggtgtgggtgctgaagggcgggaggacgccgaactcctcgtgaccgttagaggaggtagactgcgcggtattcggctcaagactcccggggggcccgtcagcgccttcttggggatacccttcgccgagccccccatgggaccccgacgctttctgccgcctgaaccaaagcagccttggagtggtgtggtagatgccaccactttccagtcagtatgttatcagtatgtcgacactttgtatcccggctttgaaggcactgaaatgtggaacccaaaccgagaactctcagaagactgcttgtatctgaacgtttggaccccatatccacggccgaccagtcctacaccggtcttggtgtggatctacggagggggcttctattctggcgcttcgtccttggacgtttacgatggacgatttctagtccaggccgagaggactgtattagtgtccatgaattacagggtgggcgccttcggcttcctggccctgcccggcagccgcgaagcccctggaaacgtcggtcttctggaccaacggctcgccctgcagtgggtgcaggaaaacgtcgcagcttttgggggtgatccgacaagcgtcacgctgtttggtgaatcggccggcgctgcttctgtcggaatgcacttgttgtcccctccaagtcgcgggctttttcacagagccgttctgcaatcgggtgcaccaaatggcccgtgggcaacagtgggaatgggcgaagcacgtcgacgggcaactcagcttgcccatctagtgggttgtccacccgggggtacggggggcaacgatacggaactggtagcctgcttgagaactcgccctgcacaagttctggtgaaccacgaatggcacgtactaccccaggaatccgtcttccggtttagctttgtgccagtcgtggacggggacttcttgagtgacacccctgaggccttgatcaacgcaggcgatttccacggtctgcaggtgcttgtaggcgtggttaaggatgaaggcagctacttcctggtctatggcgcgcccggattctcaaaggacaacgaaagcttgatcagtagggccgagttcctcgccggagtgcgagtcggcgtcccacaggtgagcgaccttgccgcagaggctgtggtcctacactatactgattggctgcaccccgaggaccccgcacgcctgagagaagccctgagtgacgtggtgggggaccacaacgtagtttgccctgttgcccaactggcgggtcggctcgccgctcaaggagccagagtgtacgcatacgtcttcgagcatagggcttccaccttatcgtggcctttgtggatgggcgtgcctcacggttacgagattgaattcatctttgggattccactggatccgagccgcaattatactgctgaggagaaaatattcgcccaacggcttatgaggtactgggcgaactttgctcgcacaggcgaccctaacgaaccccgcgatcctaaagccccacagtggcctccctatacagcaggggcccagcagtacgtctccctggacctgagaccattagaggtccgaagagggctgcgcgcccaggcctgcgccttttggaaccgtttcctgcctaagctcttgtcagctactgacacgctcgacgaagcggagcgacaatggaaagccgaatttcatagatggagctcatacatggtgcactggaagaaccaatttgatcattacagcaagcaagatcggtgttctgacctctag

SEQ ID NO: 114253 - DNA, 1845 bp, Artificial Sequence
  derived and/or modified sequence
atgagacccccccagtgtctgctgcacacaccatctttagcatcccccttactcttgctactgctttggcttctggggggcggagtgggagccgaagggagagaggacgccgagttgctagtgaccgttcgcggggggcgtctccggggcataagacttaagactcccggtggccccgtctcagcgttcctcgggatcccctttgccgagccacctatgggacccaggcgcttcctcccgcccgagcctaagcaaccatggtcgggggtagtggatgccacgacttttcaaagcgtgtgctaccaatatgtagatactctgtatcccggattcgaagggacggagatgtggaacccgaacagagaacttagtgaggactgtctgtacctgaacgtctggactccttaccctagaccaaccagtccgacacccgttctggtgtggatctacgggggcggattttacagcggagcctctagtctggatgtctatgatggtagattcctggtgcaagccgaaagaaccgtcctggtttccatgaattacagagtcggcgctttcggcttcctcgctttgcctgggtccagggaggcccccggcaatgtgggtctgctggaccagcgactggcgctgcagtgggtgcaggagaacgtggccgccttcggcggcgatccaacttctgtcaccctgttcggagaatcagccggggccgcctctgttggtatgcatctcctgtctcccccgtcccgtggcctattccatcgcgcagtcttacagagtggcgcacccaatgggccttgggctactgtgggaatgggggaagcgcgccgtcgggcaacacaactggcccacctggtgggatgcccgccgggtgggaccggcggcaatgacactgaattggtcgcctgcctcaggactagacctgcccaagttctggttaatcacgaatggcatgtgcttccacaagaaagtgtgtttagattcagcttcgtacccgtcgtggatggagatttcctgtccgatacaccagaggctctgatcaacgctggcgactttcacgggctgcaggtgcttgtgggggttgtgaaagatgagggtagttatttcctcgtgtatggggctccaggcttcagcaaggataatgagtctttgatcagccgggcagagttcttggcaggggtaagggtgggcgtaccacaggtatccgatttagcagctgaagccgtggtgctgcactacaccgactggctacaccccgaagatcccgccaggttgagagaagcactgagcgatgtcgttggtgaccataatgttgtttgccccgtggcacaactggctggtcgcctagccgcacaaggtgcccgagtctatgcctatgtgttcgagcaccgggctagcaccctgtcatggcccctctggatgggagtcccccacggatatgaaattgaattcatcttcgggattccactggatccctctagaaattatacggccgaagaaaagatcttcgcccagcgcctgatgcggtactgggctaatttcgctcgaacaggagacccaaacgagccacgcgacccgaaagccccccaatggccaccgtacaccgctggagcgcaacagtacgtctcactggatctgcgacccctcgaggtcaggagaggactgagggcgcaggcttgcgccttctggaaccggtttctgccgaagcttctcagtgcaacggacacactggatgaagctgagaggcaatggaaagccgaattccataggtggtcctcttacatggtgcactggaagaaccagttcgatcactatagcaagcaggacaggtgctctgacttgtag

SEQ ID NO: 114254 - DNA, 1845 bp, Artificial Sequence
  derived and/or modified sequence
atgcggccaccacagtgcctgctccacactccgtccttagcttcccctctgttgctgctgcttctatggttacttggtgggggcgtgggcgcagaggggcgggaggatgctgaactgctggttactgtccgggggggaagattgcggggcatacggcttaagacaccgggcgggcccgtaagtgcattccttggcataccttttgccgagccccctatgggaccccggcgatttctcccacccgaaccgaagcagccctggtccggggtggtggacgccacaacatttcagtccgtgtgttaccaatacgtcgataccttgtatcctggattcgagggcactgagatgtggaacccgaatcgtgagctcagcgaggactgcttgtacctgaatgtgtggactccataccctcgccccactagcccgacccccgtactggtgtggatatatgggggcggcttctactccggcgctagctcgctcgatgtttacgatggtagattcctggtacaggccgaaaggacagtgttggtatccatgaactacagagtcggggcatttgggttcttagccctgcccggatctcgtgaggcccctgggaatgtcggcctgctggaccagcggctggccctccagtgggtgcaagagaacgtggcagcattcgggggggatcccaccagtgtcactctctttggtgagtcagcgggcgctgcctctgttggcatgcaccttttgagccccccttcacggggactcttccaccgcgcagttctccagtccggcgcccccaatggtccttgggcgacggttggtatgggcgaagcacgcaggcgagcaactcagctcgcccacctcgtcggttgtccccccgggggaaccggtggaaatgacaccgagcttgtcgcttgcctccgcactagaccagctcaagtgttggtgaaccacgagtggcatgttctgccacaagaaagtgttttccgcttcagctttgtacctgtcgtggatggggactttctctccgatacaccggaggcactgataaacgctggggacttccacggactccaggtgcttgttggagtagtgaaggatgaagggtcttattttctcgtctatggcgcccccgggttctccaaggacaatgagagcctcatctcacgagccgagttcctcgcaggggtccgggtgggggtccctcaggtgagcgatctcgcagctgaggcagtcgtcctccattatacggactggttacaccctgaggacccagccagattgcgggaggctctgtccgatgtggtgggtgatcataatgtcgtgtgtcccgtagctcagctcgctggaagactggccgcccaaggcgccagggtctacgcgtatgtcttcgagcaccgcgcttctacactctcatggcctctttggatgggcgttccccacggttacgaaatcgagtttatcttcggaatccctctcgaccctagccgcaactacaccgcggaggaaaagatttttgctcaaaggctgatgagatactgggccaatttcgctcggactggggatccaaacgaaccgcgagaccccaaggctccacaatggcctccatataccgctggtgcccaacagtatgtgagtctggacctccggccacttgaagtgcgaagaggattgcgggctcaagcttgcgctttttggaatagattcctacctaagctgttgtctgccactgacacactggatgaggccgagcgacagtggaaggccgaatttcacaggtggtcttcttacatggtgcactggaagaatcagtttgaccattattcaaaacaagaccgctgcagcgatctgtag

SEQ ID NO: 114255 - DNA, 1845 bp, Artificial Sequence
  derived and/or modified sequence
atgaggcctccccagtgcctgctgcacacccccagcctggccagccccctgctgctgctgctgctgtggctgctgggcggcggcgtgggcgctgagggcagagaagatgctgagctgctggtgacagtgcggggcggccgcctgcggggcatccggctgaagacccctgggggccctgtgtctgccttcctgggcatcccctttgctgagccccccatgggcccccggcgcttcctgcccccagagcccaagcagccctggagcggcgtggtggatgccaccaccttccagagcgtgtgctaccagtatgtggacaccctgtacccaggctttgagggcacagagatgtggaaccccaaccgggagctgtctgaggactgcctgtacctgaatgtgtggaccccctacccccggcccaccagccccacccctgtgctggtgtggatctacggcggcggcttctacagcggggccagcagcctggatgtgtatgatggccgcttcctggtgcaggccgagaggacagtgctggtgtccatgaactacagagtgggcgccttcggcttcctggccctgcccggcagccgggaggcccctggaaatgtgggcctgctggaccagaggctggccctgcagtgggtgcaggagaatgtggccgcctttggaggagaccccacctctgtgaccctgtttggagagagcgctggagctgcctctgtgggcatgcacctgctgagcccccccagccggggcctcttccacagagctgtgctgcagagcggggcccccaacggcccctgggccaccgtgggcatgggagaggccaggagaagagccacccagctggcccacctggtgggctgccccccaggcggcactggaggaaatgacacagagctggtggcctgcctgcggaccaggcctgcccaggtgctggtgaaccacgagtggcacgtgctgccccaggagagcgtcttccgcttctcctttgtgcctgtggtggatggagacttcctgagtgacaccccagaggccctgatcaatgctggggacttccacggcctgcaggtgctggtgggcgtggtgaaggatgagggcagctacttcctggtgtatggagcccctggcttcagcaaggacaatgaaagcctcatcagcagagctgagttcctggccggcgtgcgggtgggcgtgccccaggtgtctgacctggccgctgaggccgtggtgctgcactacacagactggctgcaccctgaggaccctgcccggctgcgggaggccctgagtgatgtggtgggggaccacaacgtggtgtgccctgtggcccagctggccggccgcctggccgcccagggcgcccgggtgtatgcctacgtgtttgagcaccgggccagcaccctgtcctggcccctgtggatgggcgtgccccacggctatgaaattgagttcatcttcggcatccccctggaccccagcaggaactacacagctgaggagaagatctttgcccagaggctgatgagatactgggccaactttgccaggactggagaccccaatgagccccgggaccccaaggccccccagtggccaccctacacagctggggcccagcagtatgtgtccctggacctgcggcccctggaggtgcggcggggcctgcgggcccaggcctgtgccttctggaaccgcttcctgcccaagctgctgagcgccacagacaccctggatgaggccgagcggcagtggaaggccgagttccaccgctggagcagctacatggtgcactggaagaaccagtttgaccactacagcaagcaggaccgctgcagcgacctgtag

SEQ ID NO: 114256 - DNA, 1845 bp, Artificial Sequence
  derived and/or modified sequence
atgcggcccccccagtgcctgctgcacacccccagcctggccagccccctcctgctgctgctcctttggttactcggtggcggggtgggagctgagggcagggaggatgctgaactgttggtaactgtgcgcggcgggagattgaggggcatccggctgaagaccccgggtgggcccgtgtctgcctttctcggcattcctttcgctgagccgccaatgggtccccgcaggtttctgccacccgagccaaagcaaccatggagcggagtggtagacgccaccaccttccagtcagtttgctaccagtacgtggatactctttacccaggctttgagggtaccgaaatgtggaatcctaacagggagctgagcgaagactgcctttatctcaacgtctggacaccataccccagaccgacctcccccacgccagtccttgtttggatttacggcggcggattttacagcggggcctcatccctggacgtgtacgacggaaggtttttggtgcaagcagagagaaccgtgctcgtgagcatgaactaccgagtgggcgcctttggttttttggctctgcctggctcccgcgaggctcccgggaatgttggactcctggaccaaaggctcgcgctccagtgggttcaggaaaatgttgccgcgtttggtggagatccaacctctgtcaccttgtttggtgaatccgccggggctgcaagcgtgggaatgcatctgctgtcaccccctagccgcgggctttttcatcgtgctgtgctgcagtccggagcaccaaatgggccctgggctaccgtcgggatgggcgaagcacgccggagggcaacccagctggcccatttggtgggatgcccacccggaggaacaggtgggaatgataccgagctggtggcatgtctgcgcactcgaccggcccaagtgcttgtgaaccatgagtggcacgtcttgcctcaggagagcgtgtttaggttctcttttgtcccggtggtggacggggactttttatcagacaccccagaagcactgataaacgctggtgacttccacggactgcaggtgttggttggcgtggtgaaggatgaaggatcttacttcttggtgtatggagcccctgggttctctaaagataatgaaagcctgattagtagggccgaatttctcgcgggcgtacgcgtgggggtcccccaggtttctgatctcgctgcagaggcagtggtgttgcactatacggattggctccatccagaagaccccgctcgtctgagagaggctctctctgatgttgttggggaccacaatgtagtatgtcctgtggctcagctggccggccgactggccgcccagggtgctcgggtatacgcttacgtctttgaacaccgggcaagtaccttgtcctggcctctttggatgggcgttcctcatggctacgaaatcgagttcatctttggcattcctctggacccttccagaaactatacagccgaggagaagattttcgcacaaaggctgatgcgatactgggccaattttgctcgaacaggggatccgaacgagccccgcgaccctaaggccccccagtggcccccatacacagcgggggcacagcagtacgtctctctggacttacgtccattggaggtgagacgcggcctacgtgcacaggcctgcgctttctggaatcgattcctgcccaagctgctcagcgccacagatacactcgatgaagcagagagacaatggaaggctgaattccacaggtggtcatcttacatggtgcactggaagaatcagtttgaccactattccaagcaggatcggtgctctgacctctag

SEQ ID NO: 114257 - DNA, 1845 bp, Artificial Sequence
  derived and/or modified sequence
atgcggcccccccagtgcctgctgcacacccccagcctggccagccctctgctcttgttgctgctgtggcttctggggggaggcgtgggggcggagggacgcgaggatgccgagctgctcgtgacggtgcgtggcgggcggttgcgcggcataaggttgaaaacccccggaggtcccgtgtcagcttttttgggcataccttttgccgaacctccgatgggcccacgtcgatttctccccccagaaccaaagcagccctggagcggcgtcgtcgacgccactacattccagtctgtgtgttaccagtacgtggacacactctaccccggctttgaaggaactgagatgtggaatcccaatcgggagctttccgaggactgtctgtacctcaacgtgtggaccccatatccccggccgacgtcaccaacccctgttctggtgtggatttatggcggggggttttattcaggagccagtagtcttgacgtgtacgacggccggtttctagtgcaggctgaaagaaccgttctcgtgtctatgaactatagagtgggagcctttggcttcctcgcgttaccggggagtcgagaggcccctggcaacgtgggtctgctcgatcagagactggccctccagtgggtccaggagaacgtggcagccttcggtggggatccgacttcagtcacactgttcggcgaatcggctggagctgcaagcgtcggcatgcatttactttctccaccgtcaaggggtctattccatcgtgcagtattacagtccggagctccaaacgggccctgggctaccgtgggcatgggtgaagcacgaaggcgcgctacacagttagcacacttggtggggtgtccaccaggaggtaccggaggcaacgacacagaactggtggcctgtttgcgcactcggcccgcccaagtactggtgaatcatgaatggcatgtcctccctcaggaatctgtctttcgcttcagctttgttcccgttgtggatggcgactttctctctgatacccctgaggctctgattaatgccggcgactttcatggactccaggtcctggtgggagtggtcaaggacgagggatcctatttcttagtatatggcgcccctgggttctccaaagataatgaatctctgatatccagagctgagtttctggcaggcgtaagggtgggtgtgccacaggtgagcgatctggccgctgaagccgtagtcttgcactacacagactggctgcatcctgaagaccccgcccgcttacgtgaggccctgagcgatgttgtgggcgatcacaatgtagtgtgccccgttgcgcagttggccggccgccttgctgcccagggcgctcgcgtctatgcatatgttttcgaacacagggcaagtacccttagttggcccttgtggatgggcgtgccccacgggtacgagattgaattcatattcgggatcccactcgacccttcccggaactatacagccgaggagaaaatattcgcccagcgtctgatgcggtattgggcaaatttcgcgcgaaccggagacccaaacgaacctcgcgaccccaaggctccccagtggccgccttataccgccggcgcccagcagtatgtctcacttgacctcagacccctcgaggtaagacggggactccgcgctcaagcatgcgccttctggaatcggtttttgccgaaactgctctctgccaccgataccctggatgaggcagagcgtcagtggaaagccgagttccacagatggtcttcctacatggtgcattggaaaaaccagtttgaccactatagcaaacaggaccgatgctctgatctgtag

SEQ ID NO: 114258 - DNA, 1845 bp, Artificial Sequence
  derived and/or modified sequence
atgcggcccccccagtgcctgctgcacacccccagcctggccagcccacttttgctcctgctgctttggttgttgggtggtggtgtgggcgccgaggggcgcgaagatgccgagctgctggttaccgtccgtggaggccggctccgaggcatccggctgaagactcctgggggacccgtctccgcttttctcggcataccctttgccgagcccccaatgggacctcgacggtttctgcctcctgagccaaaacaaccttggagcggtgtggtagatgctacaaccttccagtccgtctgttaccaatacgtggataccctgtatcctggcttcgaggggacagagatgtggaatccaaacagagagctttctgaggactgcctgtacctgaacgtctggaccccttaccccagaccaacctctcctacccctgtgcttgtgtggatctatggaggcggattttattccggcgcttcctccttggatgtgtacgatggaaggtttttggtgcaagcggagagaacggtgcttgtgagcatgaattacagagtgggtgccttcggattcctggccctacccgggagtcgggaagccccagggaacgtggggttattggatcaacggctagcactccagtgggtgcaggaaaacgtggcagcatttggtggtgatcccactagcgtgacccttttcggcgaaagcgctggggctgctagtgttggcatgcacttgttgtcacctcccagtaggggtcttttccatagagctgtcctccagagcggtgcccccaatggtccctgggctaccgtgggcatgggcgaggccagaaggcgggcgacgcagttagcccacttggtcggctgccctcccggcgggactggggggaacgacactgagctggtggcgtgtctcagaactaggccagcccaggtgttggtgaaccatgagtggcacgtattgccccaagaatccgtattccgcttttcctttgtccccgtcgtcgatggtgatttcttaagtgacacaccagaagcactaattaatgctggtgattttcacggcctgcaggtgttggtcggtgtggtgaaggatgagggtagctattttctggtgtacggcgctcccgggttttccaaggataatgaatccttaataagtcgcgcggagttcctggccggcgtccgagttggggtcccgcaggtttcagatttagctgcagaagctgtagtgcttcactacaccgactggctgcaccctgaggatccagcacgcttacgggaggccttgagtgatgtggttggtgaccacaacgtggtctgccctgttgcgcaactcgccgggcggctcgccgcccagggggcacgggtttatgcctacgtgtttgagcaccgggccagcactctctcctggcccctttggatgggggtgcctcatggatatgagatagagtttatattcgggatacctctggatccaagcagaaattacaccgctgaggaaaaaatctttgcccaaaggctaatgcgctactgggctaattttgcacgaaccggggaccctaacgaacccagagaccctaaagccccccagtggcctccttacaccgcgggagctcaacaatatgtgtcacttgacttgcgaccgcttgaagtcagacggggtctcagagcacaggcttgtgcattttggaatcgctttctgcccaaacttctgagcgcaaccgacacattagatgaagccgagaggcaatggaaagccgagtttcacaggtggtcgagctacatggtccattggaagaatcagttcgatcactacagcaaacaggatagatgtagcgacctgtag

SEQ ID NO: 114259 - DNA, 1845 bp, Artificial Sequence
  derived and/or modified sequence
atgaggcctccacaatgtttactgcacaccccaagcttggcaagtcctctgctgctcctgttgctgtggctactcgggggaggcgtcggagccgaagggagagaagatgccgaattgctcgtgactgttcgaggaggcagactccgaggcatcagactgaagacccctggtggtccagtcagcgccttcctgggcattccctttgctgagcctccaatgggccctaggcggtttttgccgccagaacccaagcagccttggtcaggcgtcgtggatgctacaacttttcagagcgtttgttaccagtatgttgacacactgtaccccggatttgaaggaactgagatgtggaatccaaatcgcgagcttagcgaagactgcttgtacctgaatgtttggactccatacccccgacctacatctccaacccctgttctggtctggatatacggaggtggcttctatagcggcgctagcagcctggacgtgtacgatgggagatttctggtgcaggcagagagaaccgtgctggtaagtatgaactacagggttggtgcattcggatttctggctcttccgggaagcagagaggctcctggcaatgtgggactgttggaccagagactggctctccaatgggttcaggaaaacgtggctgcctttggtggggatcccacctctgtgacacttttcggggagtctgccggagccgcttctgttggtatgcatttgctatcccctccctctcgaggccttttccatcgcgctgttttgcagagtggggctccaaatggaccatgggctacggtgggcatgggtgaggccaggagacgggcaacgcagctcgcgcacctcgtgggctgccccccaggaggcaccggagggaatgacacagagttagtggcgtgtctccgcacgaggcctgcccaggttctggtgaaccatgaatggcatgtgctgcctcaagagtcagtcttcaggttttccttcgtgccagtcgttgacggagacttccttagtgacactccagaggccctcattaatgccggagacttccacgggctgcaggtgcttgttggggttgtaaaagatgaaggctcctactttctggtgtacggagccccagggttctcaaaggataatgaaagtttgataagcagagctgagttcttagccggtgtgcgggtaggagtgccacaggtgagtgacctggccgcagaggcggtcgtgctccactataccgattggctgcatccagaggatcctgctagacttagggaggccctttctgacgtggtgggggatcataacgtggtgtgcccagtggcgcagctggccggtaggctggctgcccagggtgccagggtatacgcttatgtctttgagcaccgggctagtaccttgtcctggccgctgtggatgggagtcccgcacggttatgagatcgagtttattttcgggatcccccttgatccatctcggaattatacagccgaggagaaaatttttgcacagcggctgatgcgctattgggctaacttcgcacgcaccggcgatccgaacgaacccagagaccccaaggcacctcagtggcctccatacactgcgggagctcagcagtacgtctccctggacctcagaccgctggaagtgcggagagggcttagagcccaagcgtgtgcgttttggaataggttcctgcctaaattgctgagtgcaaccgataccctcgacgaagcagaacgccaatggaaagcagagtttcataggtggagctcttacatggtgcactggaaaaatcagtttgaccattactctaagcaggataggtgtagtgatttgtag

SEQ ID NO: 114260 - DNA, 1845 bp, Artificial Sequence
  derived and/or modified sequence
atgagaccccctcagtgcctgctgcatactccttctctggcctcgcctttgctgctcttattgctctggctgctgggaggcggagtgggggcagaagggagggaggacgccgagctccttgttactgttagagggggacgtctccgaggcatccgactgaaaaccccaggtggccctgtcagcgcgtttctgggaattccgtttgccgagccccctatgggaccgaggcgcttcttaccacccgagcctaagcaaccatggtccggggttgtagatgccacaacctttcagagtgtgtgctaccagtatgtagataccttgtacccgggatttgaaggaactgagatgtggaatcctaacagggaactgagtgaagactgtctgtaccttaatgtatggactccctatcccaggcccacctctccgacacctgtcctcgtgtggatctacggcggaggcttttacagcggagcctcttcactagatgtctacgacgggaggtttctggttcaagcagagaggaccgtgctggttagtatgaattaccgtgtaggggcattcggattcctggcactccccggatccagggaggctcctggaaatgtgggcctgttagaccagcggctggccttacaatgggtgcaggagaacgtcgctgcatttggaggagacccaacaagcgtgacattattcggggagagcgcgggtgccgcttctgttggtatgcacctgctgtccccaccatctagaggcctcttccatagggcagtcctacagtcaggagcaccgaatgggccatgggctaccgtagggatgggggaggccaggcgccgagccacgcagttggcacaccttgtgggctgtccaccgggaggcacaggaggcaatgatactgaactcgtggcctgcctgcgtacaaggccagctcaggtcctcgtgaaccatgaatggcacgtgttgccccaggaatcagtctttcggtttagcttcgtgcccgtggtggatggtgatttcctgagtgacactccagaggctctgatcaacgctggcgactttcacgggcttcaggttctagtgggcgtggttaaggacgaaggctcatactttctggtctacggtgcgcctgggtttagcaaagacaacgagtcactaatctcaagagcagagtttctggcaggagttagggtgggagtgccccaggtgagcgacctggcggcagaggcagtggtcctacactatacagactggctgcacccagaagaccctgctaggctgcgggaagcattgagtgatgttgtcggagaccataacgtcgtgtgccccgtggcccagctcgcgggaaggctggctgcccagggcgcacgcgtctacgcctatgtgttcgagcatagagcctccactctcagctggccactctggatgggcgtgccccacggctatgagatcgagttcatttttggtatacccctggatccaagcaggaattacaccgccgaagagaagatctttgcccagaggctcatgcggtactgggcaaacttcgcccgtactggggacccaaacgaacccagagatcctaaggcgccacagtggcctccatacaccgccggagctcaacaatacgtgagcctcgatctccggccactcgaagtgcgtaggggactacgagcccaggcttgcgctttttggaatcggttcctccctaaactgctgtccgccaccgacaccctggacgaagccgagcgacagtggaaagccgagtttcacagatggtcaagttatatggtccactggaagaatcaatttgaccactacagcaagcaagacagatgcagcgacttgtag

SEQ ID NO: 114261 - DNA, 1845 bp, Artificial Sequence
  derived and/or modified sequence
atgagacctccacagtgtctgctgcacacaccctcactcgcatcgcccctacttttactgttactgtggctcctcggtggaggggtgggagctgagggccgagaagatgccgagctgcttgtgaccgttagggggggaagattgcgtggaatccgcctcaaaacccccggaggtccggtgtccgcatttctaggaattcccttcgcagaaccacccatgggtcctcgtcgcttccttccacccgagccgaaacagccgtggagcggggtagtcgacgccacaacatttcagtctgtctgttaccaatacgttgatacactgtaccctggcttcgaaggaactgaaatgtggaaccctaatagagaactgtccgaggactgtctctaccttaacgtgtggaccccatatccgaggcccacttcgccaacaccggttcttgtgtggatttatgggggaggcttctacagcggcgcaagttcccttgatgtgtacgatgggagatttctggttcaagctgaacgaacagtgctagtatcgatgaattacagggtcggggctttcggattcctcgccctccccggttcgagggaggctccaggcaacgtaggtttgctggaccaacggctggccctgcagtgggtgcaagagaatgtggcggcatttgggggagatccaacttccgtcacattgtttggtgaatcggcaggcgcagcatccgtcgggatgcacctgttgtcgccccctagccgagggttattccaccgcgctgtgttgcaatccggagcccctaatggaccttgggccaccgtgggcatgggggaggcgaggcggagggccacccagctggctcaccttgtgggttgcccgccaggaggcacgggtggaaacgatactgagttagtcgcttgtttgcggacacgccctgcgcaggtgctggtgaatcacgaatggcatgtgttgccacaggagtccgtgttccggttttctttcgtgcccgtggtagatggcgatttcctctctgatacacctgaagcactgatcaatgctggagacttccatgggctgcaggtgctagttggcgtcgtcaaggatgagggatcttactttctcgtttacggcgctcccggattttcgaaggataatgagtctctcatcagtagagccgaatttcttgcaggagttcgggtgggagtccctcaggtgtctgatctggcagctgaggctgtggtgttgcactacaccgactggcttcaccctgaggatcccgctcgcctacgcgaagcattgtccgacgtggtcggggatcataatgtggtgtgcccagtcgcacagttggctgggagactggcagcccagggtgcacgggtttatgcgtatgtgtttgagcatagggcctccaccctgtcgtggcctctatggatgggggtgcctcatggctacgagatcgagttcatcttcggtattcctttggatcctagcaggaattatacagccgaagagaaaatatttgcacagagactgatgcgctactgggcgaattttgcaagaaccggcgatccaaatgagccacgggatccaaaagcaccccagtggcctccctacaccgccggagctcaacaatacgtctcccttgatctgcgcccattagaggtccggcgaggcttgagagcacaggcgtgcgccttctggaacaggtttcttccaaagctactctcagccacagacaccttggacgaggcagagagacagtggaaagcagaatttcaccggtggtcctcatatatggtgcattggaagaatcagtttgaccattactcgaaacaagatcggtgcagcgacttgtag

SEQ ID NO: 114262 - DNA, 2172 bp, Artificial Sequence
  derived and/or modified sequence
gtcagagtcggctcagcctgcgccggggaacatcggccgcctccagctcccggcgcggcccggcccggcccggctcggccgcctcagacgccgcctgccctgcagccatgaggcccccgcagtgtctgctgcacacgccttccctggcttccccactccttctcctcctcctctggctcctgggtggaggagtgggggctgagggccgggaggatgcagagctgctggtgacggtgcgtgggggccggctgcggggcattcgcctgaagacccccgggggccctgtctctgctttcctgggcatcccctttgcggagccacccatgggaccccgtcgctttctgccaccggagcccaagcagccttggtcaggggtggtagacgctacaaccttccagagtgtctgctaccaatatgtggacaccctatacccaggttttgagggcaccgagatgtggaaccccaaccgtgagctgagcgaggactgcctgtacctcaacgtgtggacaccatacccccggcctacatcccccacccctgtcctcgtctggatctatgggggtggcttctacagtggggcctcctccttggacgtgtacgatggccgcttcttggtacaggccgagaggactgtgctggtgtccatgaactaccgggtgggagcctttggcttcctggccctgccggggagccgagaggccccgggcaatgtgggtctcctggatcagaggctggccctgcagtgggtgcaggagaacgtggcagccttcgggggtgacccgacatcagtgacgctgtttggggagagcgcgggagccgcctcggtgggcatgcacctgctgtccccgcccagccggggcctgttccacagggccgtgctgcagagcggtgcccccaatggaccctgggccacggtgggcatgggagaggcccgtcgcagggccacgcagctggcccaccttgtgggctgtcctccaggcggcactggtgggaatgacacagagctggtagcctgccttcggacacgaccagcgcaggtcctggtgaaccacgaatggcacgtgctgcctcaagaaagcgtcttccggttctccttcgtgcctgtggtagatggagacttcctcagtgacaccccagaggccctcatcaacgcgggagacttccacggcctgcaggtgctggtgggtgtggtgaaggatgagggctcgtattttctggtttacggggccccaggcttcagcaaagacaacgagtctctcatcagccgggccgagttcctggccggggtgcgggtcggggttccccaggtaagtgacctggcagccgaggctgtggtcctgcattacacagactggctgcatcccgaggacccggcacgcctgagggaggccctgagcgatgtggtgggcgaccacaatgtcgtgtgccccgtggcccagctggctgggcgactggctgcccagggtgcccgggtctacgcctacgtctttgaacaccgtgcttccacgctctcctggcccctgtggatgggggtgccccacggctacgagatcgagttcatctttgggatccccctggacccctctcgaaactacacggcagaggagaaaatcttcgcccagcgactgatgcgatactgggccaactttgcccgcacaggggatcccaatgagccccgagaccccaaggccccacaatggcccccgtacacggcgggggctcagcagtacgttagtctggacctgcggccgctggaggtgcggcgggggctgcgcgcccaggcctgcgccttctggaaccgcttcctccccaaattgctcagcgccaccgacacgctcgacgaggcggagcgccagtggaaggccgagttccaccgctggagctcctacatggtgcactggaagaaccagttcgaccactacagcaagcaggatcgctgctcagacctgtgaccccggcgggacccccatgtcctccgctccgcccggccccctagctgtatatactatttatttcagggctgggctataacacagacgagccccagactctgcccatccccaccccaccccgacgtcccccggggctcccggtcctctgcatgtctcaggctgagctccctcccccgcggtgccttcgcccctctgggctgccaataaactgttacagcca

SEQ ID NO: 114263 - DNA, 2218 bp, Artificial Sequence
  derived and/or modified sequence
ctctcccctcatctttgccaacctgccccacctcctctgcagctgagcgataacccttgggccgacagtgccctaatctcctccctcctggcttctcgaccgacccttcaccctttccctttctttctcccagcagacgccgcctgccctgcagccatgaggcccccgcagtgtctgctgcacacgccttccctggcttccccactccttctcctcctcctctggctcctgggtggaggagtgggggctgagggccgggaggatgcagagctgctggtgacggtgcgtgggggccggctgcggggcattcgcctgaagacccccgggggccctgtctctgctttcctgggcatcccctttgcggagccacccatgggaccccgtcgctttctgccaccggagcccaagcagccttggtcaggggtggtagacgctacaaccttccagagtgtctgctaccaatatgtggacaccctatacccaggttttgagggcaccgagatgtggaaccccaaccgtgagctgagcgaggactgcctgtacctcaacgtgtggacaccatacccccggcctacatcccccacccctgtcctcgtctggatctatgggggtggcttctacagtggggcctcctccttggacgtgtacgatggccgcttcttggtacaggccgagaggactgtgctggtgtccatgaactaccgggtgggagcctttggcttcctggccctgccggggagccgagaggccccgggcaatgtgggtctcctggatcagaggctggccctgcagtgggtgcaggagaacgtggcagccttcgggggtgacccgacatcagtgacgctgtttggggagagcgcgggagccgcctcggtgggcatgcacctgctgtccccgcccagccggggcctgttccacagggccgtgctgcagagcggtgcccccaatggaccctgggccacggtgggcatgggagaggcccgtcgcagggccacgcagctggcccaccttgtgggctgtcctccaggcggcactggtgggaatgacacagagctggtagcctgccttcggacacgaccagcgcaggtcctggtgaaccacgaatggcacgtgctgcctcaagaaagcgtcttccggttctccttcgtgcctgtggtagatggagacttcctcagtgacaccccagaggccctcatcaacgcgggagacttccacggcctgcaggtgctggtgggtgtggtgaaggatgagggctcgtattttctggtttacggggccccaggcttcagcaaagacaacgagtctctcatcagccgggccgagttcctggccggggtgcgggtcggggttccccaggtaagtgacctggcagccgaggctgtggtcctgcattacacagactggctgcatcccgaggacccggcacgcctgagggaggccctgagcgatgtggtgggcgaccacaatgtcgtgtgccccgtggcccagctggctgggcgactggctgcccagggtgcccgggtctacgcctacgtctttgaacaccgtgcttccacgctctcctggcccctgtggatgggggtgccccacggctacgagatcgagttcatctttgggatccccctggacccctctcgaaactacacggcagaggagaaaatcttcgcccagcgactgatgcgatactgggccaactttgcccgcacaggggatcccaatgagccccgagaccccaaggccccacaatggcccccgtacacggcgggggctcagcagtacgttagtctggacctgcggccgctggaggtgcggcgggggctgcgcgcccaggcctgcgccttctggaaccgcttcctccccaaattgctcagcgccaccgacacgctcgacgaggcggagcgccagtggaaggccgagttccaccgctggagctcctacatggtgcactggaagaaccagttcgaccactacagcaagcaggatcgctgctcagacctgtgaccccggcgggacccccatgtcctccgctccgcccggccccctagctgtatatactatttatttcagggctgggctataacacagacgagccccagactctgcccatccccaccccaccccgacgtcccccggggctcccggtcctctgcatgtctcaggctgagctccctcccccgcggtgccttcgcccctctgggctgccaataaactgttacag

SEQ ID NO: 114264 - DNA, 2159 bp, Artificial Sequence
  derived and/or modified sequence
tctactccgccgctgcaggtctttgggtcgcgtctgtcactgcgctctgtcgtcggtcggcgtctggcactggaacgccgcctgccctgcagccatgaggcccccgcagtgtctgctgcacacgccttccctggcttccccactccttctcctcctcctctggctcctgggtggaggagtgggggctgagggccgggaggatgcagagctgctggtgacggtgcgtgggggccggctgcggggcattcgcctgaagacccccgggggccctgtctctgctttcctgggcatcccctttgcggagccacccatgggaccccgtcgctttctgccaccggagcccaagcagccttggtcaggggtggtagacgctacaaccttccagagtgtctgctaccaatatgtggacaccctatacccaggttttgagggcaccgagatgtggaaccccaaccgtgagctgagcgaggactgcctgtacctcaacgtgtggacaccatacccccggcctacatcccccacccctgtcctcgtctggatctatgggggtggcttctacagtggggcctcctccttggacgtgtacgatggccgcttcttggtacaggccgagaggactgtgctggtgtccatgaactaccgggtgggagcctttggcttcctggccctgccggggagccgagaggccccgggcaatgtgggtctcctggatcagaggctggccctgcagtgggtgcaggagaacgtggcagccttcgggggtgacccgacatcagtgacgctgtttggggagagcgcgggagccgcctcggtgggcatgcacctgctgtccccgcccagccggggcctgttccacagggccgtgctgcagagcggtgcccccaatggaccctgggccacggtgggcatgggagaggcccgtcgcagggccacgcagctggcccaccttgtgggctgtcctccaggcggcactggtgggaatgacacagagctggtagcctgccttcggacacgaccagcgcaggtcctggtgaaccacgaatggcacgtgctgcctcaagaaagcgtcttccggttctccttcgtgcctgtggtagatggagacttcctcagtgacaccccagaggccctcatcaacgcgggagacttccacggcctgcaggtgctggtgggtgtggtgaaggatgagggctcgtattttctggtttacggggccccaggcttcagcaaagacaacgagtctctcatcagccgggccgagttcctggccggggtgcgggtcggggttccccaggtaagtgacctggcagccgaggctgtggtcctgcattacacagactggctgcatcccgaggacccggcacgcctgagggaggccctgagcgatgtggtgggcgaccacaatgtcgtgtgccccgtggcccagctggctgggcgactggctgcccagggtgcccgggtctacgcctacgtctttgaacaccgtgcttccacgctctcctggcccctgtggatgggggtgccccacggctacgagatcgagttcatctttgggatccccctggacccctctcgaaactacacggcagaggagaaaatcttcgcccagcgactgatgcgatactgggccaactttgcccgcacaggggatcccaatgagccccgagaccccaaggccccacaatggcccccgtacacggcgggggctcagcagtacgttagtctggacctgcggccgctggaggtgcggcgggggctgcgcgcccaggcctgcgccttctggaaccgcttcctccccaaattgctcagcgccaccgacacgctcgacgaggcggagcgccagtggaaggccgagttccaccgctggagctcctacatggtgcactggaagaaccagttcgaccactacagcaagcaggatcgctgctcagacctgtgaccccggcgggacccccatgtcctccgctccgcccggccccctagctgtatatactatttatttcagggctgggctataacacagacgagccccagactctgcccatccccaccccaccccgacgtcccccggggctcccggtcctctgcatgtctcaggctgagctccctcccccgcggtgccttcgcccctctgggctgccaataaactgttacagcca

SEQ ID NO: 114265 - DNA, 2259 bp, Artificial Sequence
  derived and/or modified sequence
atgctaggcctggtgatgtcatgccccgaccggaccctggtgacgaaagtccgaagtcacccgtcagggaaccagcacagacccacccgcgggggttccagaagtttccactgccgccgcggagtgcctcgcccagcagccttgcgcgtgctaccacgctgtcctgccttctcagacgccgcctgccctgcagccatgaggcccccgcagtgtctgctgcacacgccttccctggcttccccactccttctcctcctcctctggctcctgggtggaggagtgggggctgagggccgggaggatgcagagctgctggtgacggtgcgtgggggccggctgcggggcattcgcctgaagacccccgggggccctgtctctgctttcctgggcatcccctttgcggagccacccatgggaccccgtcgctttctgccaccggagcccaagcagccttggtcaggggtggtagacgctacaaccttccagagtgtctgctaccaatatgtggacaccctatacccaggttttgagggcaccgagatgtggaaccccaaccgtgagctgagcgaggactgcctgtacctcaacgtgtggacaccatacccccggcctacatcccccacccctgtcctcgtctggatctatgggggtggcttctacagtggggcctcctccttggacgtgtacgatggccgcttcttggtacaggccgagaggactgtgctggtgtccatgaactaccgggtgggagcctttggcttcctggccctgccggggagccgagaggccccgggcaatgtgggtctcctggatcagaggctggccctgcagtgggtgcaggagaacgtggcagccttcgggggtgacccgacatcagtgacgctgtttggggagagcgcgggagccgcctcggtgggcatgcacctgctgtccccgcccagccggggcctgttccacagggccgtgctgcagagcggtgcccccaatggaccctgggccacggtgggcatgggagaggcccgtcgcagggccacgcagctggcccaccttgtgggctgtcctccaggcggcactggtgggaatgacacagagctggtagcctgccttcggacacgaccagcgcaggtcctggtgaaccacgaatggcacgtgctgcctcaagaaagcgtcttccggttctccttcgtgcctgtggtagatggagacttcctcagtgacaccccagaggccctcatcaacgcgggagacttccacggcctgcaggtgctggtgggtgtggtgaaggatgagggctcgtattttctggtttacggggccccaggcttcagcaaagacaacgagtctctcatcagccgggccgagttcctggccggggtgcgggtcggggttccccaggtaagtgacctggcagccgaggctgtggtcctgcattacacagactggctgcatcccgaggacccggcacgcctgagggaggccctgagcgatgtggtgggcgaccacaatgtcgtgtgccccgtggcccagctggctgggcgactggctgcccagggtgcccgggtctacgcctacgtctttgaacaccgtgcttccacgctctcctggcccctgtggatgggggtgccccacggctacgagatcgagttcatctttgggatccccctggacccctctcgaaactacacggcagaggagaaaatcttcgcccagcgactgatgcgatactgggccaactttgcccgcacaggggatcccaatgagccccgagaccccaaggccccacaatggcccccgtacacggcgggggctcagcagtacgttagtctggacctgcggccgctggaggtgcggcgggggctgcgcgcccaggcctgcgccttctggaaccgcttcctccccaaattgctcagcgccaccgacacgctcgacgaggcggagcgccagtggaaggccgagttccaccgctggagctcctacatggtgcactggaagaaccagttcgaccactacagcaagcaggatcgctgctcagacctgtgaccccggcgggacccccatgtcctccgctccgcccggccccctagctgtatatactatttatttcagggctgggctataacacagacgagccccagactctgcccatccccaccccaccccgacgtcccccggggctcccggtcctctgcatgtctcaggctgagctccctcccccgcggtgccttcgcccctctgggctgccaataaactgttacagcc

SEQ ID NO: 114266 - DNA, 1845 bp, Artificial Sequence
  derived and/or modified sequence
atgagacccccccagtgcctgctgcacacccccagcctggccagccccctgctgctgctgctgctgtggctgctgggcggcggcgtgggcgccgagggcagagaggacgccgagctgctggtgaccgtgagaggcggcagactgagaggcatcagactgaagacccccggcggccccgtgagcgccttcctgggcatccccttcgccgagccccccatgggccccagaagattcctgccccccgagcccaagcagccctggagcggcgtggtggacgccaccaccttccagagcgtgtgctaccagtacgtggacaccctgtaccccggcttcgagggcaccgagatgtggaaccccaacagagagctgagcgaggactgcctgtacctgaacgtgtggaccccctaccccagacccaccagccccacccccgtgctggtgtggatctacggcggcggcttctacagcggcgccagcagcctggacgtgtacgacggcagattcctggtgcaggccgagagaaccgtgctggtgagcatgaactacagagtgggcgccttcggcttcctggccctgcccggcagcagagaggcccccggcaacgtgggcctgctggaccagagactggccctgcagtgggtgcaggagaacgtggccgccttcggcggcgaccccaccagcgtgaccctgttcggcgagagcgccggcgccgccagcgtgggcatgcacctgctgagcccccccagcagaggcctgttccacagagccgtgctgcagagcggcgcccccaacggcccctgggccaccgtgggcatgggcgaggccagaagaagagccacccagctggcccacctggtgggctgcccccccggcggcaccggcggcaacgacaccgagctggtggcctgcctgagaaccagacccgcccaggtgctggtgaaccacgagtggcacgtgctgccccaggagagcgtgttcagattcagcttcgtgcccgtggtggacggcgacttcctgagcgacacccccgaggccctgatcaacgccggcgacttccacggcctgcaggtgctggtgggcgtggtgaaggacgagggcagctacttcctggtgtacggcgcccccggcttcagcaaggacaacgagagcctgatcagcagagccgagttcctggccggcgtgagagtgggcgtgccccaggtgagcgacctggccgccgaggccgtggtgctgcactacaccgactggctgcaccccgaggaccccgccagactgagagaggccctgagcgacgtggtgggcgaccacaacgtggtgtgccccgtggcccagctggccggcagactggccgcccagggcgccagagtgtacgcctacgtgttcgagcacagagccagcaccctgagctggcccctgtggatgggcgtgccccacggctacgagatcgagttcatcttcggcatccccctggaccccagcagaaactacaccgccgaggagaagatcttcgcccagagactgatgagatactgggccaacttcgccagaaccggcgaccccaacgagcccagagaccccaaggccccccagtggcccccctacaccgccggcgcccagcagtacgtgagcctggacctgagacccctggaggtgagaagaggcctgagagcccaggcctgcgccttctggaacagattcctgcccaagctgctgagcgccaccgacaccctggacgaggccgagagacagtggaaggccgagttccacagatggagcagctacatggtgcactggaagaaccagttcgaccactacagcaagcaggacagatgcagcgacctgtag

SEQ ID NO: 114267 - protein, 1181 aa, Artificial Sequence
  derived and/or modified sequence
MAVAVAMAGALIGSEPGPAEELAKLEYLSLVSKVCTELDNHLGINDKDLAEFVISLAEKNTTFDTFKASLVKNGAEFTDSLISNLLRLIQTMRPPAKPSTSKDPVVKPKTEKEKLKELFPVLCQPDNPSVRTMLDEDDVKVAVDVLKELEALMPSAAGQEKQRDAEHRDRTKKKKRSRSRDRNRDRDRDRERNRDRDHKRRHRSRSRSRSRTRERNKVKSRYRSRSRSQSPPKDRKDRDKYGERNLDRWRDKHVDRPPPEEPTIGDIYNGKVTSIMQFGCFVQLEGLRKRWEGLVHISELRREGRVANVADVVSKGQRVKVKVLSFTGTKTSLSMKDVDQETGEDLNPNRRRNLVGETNEETSMRNPDRPTHLSLVSAPEVEDDSLERKRLTRISDPEKWEIKQMIAANVLSKEEFPDFDEETGILPKVDDEEDEDLEIELVEEEPPFLRGHTKQSMDMSPIKIVKNPDGSLSQAAMMQSALAKERRELKQAQREAEMDSIPMGLNKHWVDPLPDAEGRQIAANMRGIGMMPNDIPEWKKHAFGGNKASYGKKTQMSILEQRESLPIYKLKEQLVQAVHDNQILIVIGETGSGKTTQITQYLAEAGYTSRGKIGCTQPRRVAAMSVAKRVSEEFGCCLGQEVGYTIRFEDCTSPETVIKYMTDGMLLRECLIDPDLTQYAIIMLDEAHERTIHTDVLFGLLKKTVQKRQDMKLIVTSATLDAVKFSQYFYEAPIFTIPGRTYPVEILYTKEPETDYLDASLITVMQIHLTEPPGDILVFLTGQEEIDTACEILYERMKSLGPDVPELIILPVYSALPSEMQTRIFDPAPPGSRKVVIATNIAETSLTIDGIYYVVDPGFVKQKVYNSKTGIDQLVVTPISQAQAKQRAGRAGRTGPGKCYRLYTERAYRDEMLTTNVPEIQRTNLASTVLSLKAMGINDLLSFDFMDAPPMETLITAMEQLYTLGALDDEGLLTRLGRRMAEFPLEPMLCKMLIMSVHLGCSEEMLTIVSMLSVQNVFYRPKDKQALADQKKAKFHQTEGDHLTLLAVYNSWKNNKFSNPWCYENFIQARSLRRAQDIRKQMLGIMDRHKLDVVSCGKSTVRVQKAICSGFFRNAAKKDPQEGYRTLIDQQVVYIHPSSALFNRQPECPKHFLPVVAVAVSLEQCLSKFEDLNKELGLVTC

SEQ ID NO: 114268 - DNA, 3546 bp, Artificial Sequence
  derived and/or modified sequence
atggccgtggcagtggcaatggcaggcgctctgataggctccgaacccgggcctgcagaggagctggcaaagcttgagtacctcagcttggttagcaaagtgtgcactgaactagataatcatctcggaatcaatgacaaggatctggccgagttcgtgatctccctagccgagaagaacacgacctttgataccttcaaagcatctctcgtgaaaaacggagccgagttcaccgactccctgatttccaatctgttgcgtctgatacaaacaatgagacccccggccaaaccgagcactagtaaggatccagtggtgaagccaaagacagaaaaggaaaagttgaaggaactgtttcccgtgctgtgtcagccagacaacccgtccgtgcgtaccatgcttgacgaggatgacgtgaaggtggctgtggatgtactgaaggaactcgaagctttaatgccaagcgccgcgggccaagaaaagcagcgagacgccgaacacagggaccgcacaaaaaaaaagaagcgttcacgatcaagggaccgaaaccgggaccgggatagggatagggaacggaaccgggacagggaccataaacgccggcaccgtagccggtcccgaagcagatcaagaaccagggagaggaataaagtcaagagcagatataggagccggtcaagatcacagtctccgccaaaagatcgcaaggacagagataagtacggtgagagaaacctggataggtggcgcgacaagcacgtggatcgtccccctcctgaggagcctacaattggcgacatttacaatggcaaggtgacaagtataatgcagttcggttgctttgtgcagttggaaggcctgcggaagcgttgggagggactggtacacataagcgagttgcgccgagaaggccgagtagccaacgtggcagacgttgtgtctaaaggccagcgtgttaaagtgaaagtgctgagtttcacaggaaccaaaaccagtctgtctatgaaggacgtggaccaggagactggcgaagatcttaatccaaaccgcaggcgcaatctcgtgggagaaactaacgaagaaacctcaatgaggaacccggaccggccgacccatctgtcccttgtatccgcacctgaagttgaggatgacagcttagagcgaaagcgcctgacaagaatctccgaccccgaaaagtgggaaatcaaacagatgatcgcagctaatgtgctctccaaggaagagttccccgacttcgacgaggagaccggcattttgcccaaagtagacgacgaagaggacgaggacctcgagattgagttggtcgaagaagagccccctttccttcgagggcataccaagcagtccatggatatgtcccctattaagatcgtgaagaatccggacgggagcctgtctcaggccgctatgatgcagtctgccctggctaaggagagacgagagctcaagcaggcccaaagagaggctgaaatggactccatccccatgggcctcaataagcactgggtagatcccctgccggatgctgaaggacgacagatagctgccaatatgcgtggtatcgggatgatgccaaacgacatccctgagtggaagaagcatgcttttggcggaaacaaagcatcctacggaaaaaaaacccagatgagcatcctggagcagagagagtcactccctatctacaaactcaaagagcagctcgtgcaggctgtccacgacaaccaaattctgattgtgatcggggaaaccggctcaggcaaaaccacacaaatcactcagtatctcgctgaagcgggatacacatcaagaggcaaaattggatgtacccagccaaggagggtggccgcaatgtccgtggctaagcgcgtctctgaagagtttggatgttgtctaggccaggaagtgggctacaccattaggttcgaagattgcaccagccccgagaccgtgattaagtatatgacagacggcatgttgcttcgtgaatgtcttattgatcctgatttaacacaatatgccatcattatgttggacgaggcccacgagagaacaattcacaccgacgtcttgtttgggctattgaaaaagaccgtgcagaaaagacaggacatgaaactcattgttacctcagccacgcttgacgcagtgaaattttcccagtatttctatgaggctccgattttcaccattccaggccggacatatcccgtcgaaatcctttacacaaaggagcctgaaacagattacctagacgcatctcttatcacagtcatgcagattcatttgactgagcccccaggggacattctcgtgtttcttactggacaggaggaaatcgatacagcttgcgaaatcctgtacgagcgcatgaaatccctgggcccagacgtgccagaacttataatcctgcctgtctacagcgcgctcccgagtgaaatgcagactaggattttcgatccggctccccccgggtccaggaaggtggtcatcgccaccaacattgcagaaacttctctgaccatcgacggtatatattacgtggtggaccctggcttcgtcaaacagaaggtgtataatagcaaaacgggtatcgaccagttggttgttacccctataagtcaggcacaggcaaaacagcgggccggcagggctggtcgaactgggcccggcaaatgctaccggctgtacactgagagggcttaccgggatgagatgctgacaacaaatgtgccagaaatacagcggacgaacctggcctccactgttctatctctcaaagccatggggatcaatgatttgttgagcttcgatttcatggacgccccccccatggaaacactgattaccgccatggagcagctgtacaccctaggtgcattggacgacgagggcttactaacacgcctggggcggcgtatggcggagtttccactggaacccatgttgtgtaagatgctcattatgtcagtgcacctcgggtgttcagaagagatgctcactattgtgtcaatgctaagtgtgcagaatgtgttctaccggcccaaagataaacaggccctggcagatcagaaaaaagctaagttccaccagacggaaggggatcacctgactctcctcgccgtatacaacagttggaaaaacaacaagttctctaatccgtggtgttatgagaatttcatccaggcaaggtcgcttcgtagagcccaagacatacgcaagcagatgttgggtatcatggatagacataaactggacgtcgtgtcgtgtggaaagtctacggtcagggtgcagaaggccatttgctcaggctttttccgcaatgccgccaagaaggatccacaggagggatacaggaccctgattgaccaacaagtcgtctatattcatccatcaagtgcgctctttaacagacagccggagtgtccaaagcattttctgcctgtcgtcgctgttgcagtttctttggagcagtgcctctctaagttcgaagatctgaataaggaattgggattggtcacctgctag

SEQ ID NO: 114269 - DNA, 3546 bp, Artificial Sequence
  derived and/or modified sequence
atggctgtggccgtggccatggccggggccctgattggcagcgagcccggccctgctgaggagctggccaagctggagtacctgagcctggtgtccaaggtgtgcacagagctggacaaccacctgggcatcaatgacaaggacctggccgagtttgtgatcagcctggccgagaagaacaccacctttgacaccttcaaggccagcctggtgaagaatggagctgagttcacagacagcctcatcagcaacctgctgcggctcatccagaccatgaggcccccagccaagcccagcaccagcaaggaccctgtggtgaagcccaagacagagaaggagaagctgaaggagctgtttcctgtgctgtgccagcctgacaaccccagcgtgaggaccatgctggatgaagatgatgtgaaggtggccgtggatgtgctgaaggagctggaggccctgatgcccagcgctgctggccaggagaagcagagagatgctgagcaccgggacaggaccaagaagaagaagaggagccgcagccgggacaggaacagagaccgggaccgggaccgggagaggaacagagaccgggaccacaagaggaggcacaggagccgcagccgcagccgcagcaggacccgggagaggaacaaggtgaagagccgctaccgcagccgcagccgcagccagagcccccccaaggacaggaaggaccgggacaagtatggagagaggaacctggaccgctggagggacaagcacgtggacaggcctcctcctgaggagcccaccatcggggacatctacaacgggaaggtgaccagcatcatgcagtttggctgctttgtgcagctggagggcctgaggaagcgctgggagggcctggtgcacatcagcgagctgcggcgggagggccgggtggccaacgtggctgatgtggtgtccaagggccagagggtgaaggtgaaggtgctgtccttcaccggcaccaagaccagcctgtccatgaaggatgtggaccaggagaccggggaggacctgaaccccaacagaagaagaaacctggtgggggagaccaatgaggagacctccatgagaaatccagaccggcccacccacctgagcctggtgtctgcccctgaggtggaggatgacagcctggagaggaagaggctgacccgcatcagtgaccctgagaagtgggagatcaagcagatgattgctgccaacgtgctgagcaaggaggagttcccagactttgatgaggagaccggcatcctgcccaaggtggatgatgaagaagatgaggacctggagattgagctggtggaggaggagccccccttcctgcggggccacaccaagcagagcatggacatgagccccatcaagatcgtgaagaacccagatggcagcctgagccaggccgccatgatgcagagcgccctggccaaggagcggcgggagctgaagcaggcccagcgggaggccgagatggacagcatccccatgggcctgaacaagcactgggtggaccccctgcctgatgctgagggccggcagattgctgccaacatgaggggcatcggcatgatgcccaatgacatccctgagtggaagaagcacgcctttggaggcaacaaggccagctatggcaagaagacccagatgagcatcctggagcagcgggagagcctgcccatctacaagctgaaggagcagctggtgcaggccgtgcatgacaaccagatcctgattgtgattggagagaccggcagcggcaagaccacccagatcacccagtacctggccgaggccggctacaccagccggggcaagattggctgcacccagcccaggagagtggccgccatgtctgtggccaagagggtgtctgaggagtttggctgctgcctgggccaggaggtgggctacaccatccgctttgaggactgcaccagccctgagaccgtcatcaagtacatgacagatggcatgctgctgagagaatgtctgattgatcctgacctgacccagtatgccatcatcatgctggatgaggcccacgagaggaccatccacacagatgtgctgtttggcctgctgaagaagacagtgcagaagaggcaggacatgaagctgattgtgaccagcgccaccctggatgctgtgaagttcagccagtacttctatgaggcccccatcttcaccatccctggccgcacctaccctgtggagatcctgtacaccaaggagcctgagacagactacctggatgccagcctcatcaccgtgatgcagatccacctgacagagcccccaggggacatcctggtgttcctgaccggccaggaggagattgacacagcctgtgagatcctgtatgaaagaatgaagagcctgggcccagatgtgcctgagctgatcatcctgcctgtgtacagcgccctgcccagcgagatgcagacccgcatctttgatcctgcccctcctggcagcaggaaggtggtgattgccaccaacattgctgagaccagcctgaccattgatggcatctactacgtggtggaccccggctttgtgaagcagaaggtgtacaacagcaagacaggaattgaccagctggtggtgacccccatcagccaggcccaggccaagcagagagctggccgggccggccgcacaggccctgggaagtgctaccgcctgtacacagagcgggcctacagagatgagatgctgaccaccaacgtgcctgagatccagaggaccaacctggccagcacagtgctgagcctgaaggccatgggcatcaatgacctgctgagctttgacttcatggatgccccacccatggagaccctcatcacagccatggagcagctgtacaccctgggcgccctggatgatgagggcctgctgacccggctgggccgcaggatggccgagttccccctggagcccatgctgtgcaagatgctgatcatgtctgtgcacctgggctgcagcgaggagatgctgaccatcgtgtccatgctgtctgtgcagaatgtgttctaccggcccaaggacaagcaggccctggccgaccagaagaaggccaagttccaccagacagaaggagaccacctgaccctgctggccgtgtacaacagctggaagaacaacaagttcagcaacccctggtgctatgagaacttcatccaggcccggagcctgcggcgggcccaggacatcaggaagcagatgctgggcatcatggacagacacaagctggatgtggtgtcctgtgggaagagcacagtgcgggtgcagaaggccatctgcagcggcttcttcagaaatgctgccaagaaggacccccaggagggctaccgcaccctgattgaccagcaggtggtgtacatccaccccagcagcgccctcttcaaccggcagccagaatgtcccaagcacttcctgcctgtggtggccgtggccgtgtccctggagcagtgcctgagcaagtttgaggacctgaacaaggagctgggcctggtgacctgctag

SEQ ID NO: 114270 - DNA, 3546 bp, Artificial Sequence
  derived and/or modified sequence
atggccgtggccgtggccatggccggcgccctgatcggcagcgagcccggacctgccgaagagctcgctaaactggagtatcttagcctcgtatccaaggtgtgcactgaacttgacaatcacctgggtattaatgacaaagacctcgctgaatttgtgattagcctagcagagaaaaataccaccttcgatactttcaaagctagtctcgtgaaaaatggtgccgagtttactgacagcctcattagtaacctcctccggctaatccagacaatgcgacctccagccaaaccaagtacgtctaaagacccggtggttaaaccaaagacggagaaggaaaagctcaaggagttgttcccagtcctatgccagcctgacaatccgtccgttcgtactatgttggatgaagacgatgtcaaagtggccgtcgacgtactcaaagaactggaggctcttatgccctctgcggccggacaagaaaaacagcgcgatgctgagcatagggacagaacaaagaagaagaagaggtccagaagcagggatagaaatagggacagggacagagatagggaaaggaaccgcgaccgagaccacaaaaggagacatcgctcgaggagccgctcacggtccagaactagagagcgcaataaggtcaagagccgttatcggtctcgctccagatcccagtcgccgcccaaggaccggaaggacagagataagtatggagagcggaaccttgatagatggagggataagcatgtcgatcgcccccctcccgaagaacccacaatcggggacatctataatggcaaggtgacaagtatcatgcagtttggatgcttcgtccagctggaaggactgagaaagcggtgggagggacttgtacacatctccgagctacggagagagggacgcgtcgccaacgttgcagatgtggtttcaaagggccagcgtgtgaaagtgaaggtgctgtcctttaccgggacaaaaacttcgctctccatgaaggacgttgatcaggaaactggggaggacttgaatccaaatcgccgccgcaatttagtcggcgaaacaaatgaagagacctccatgaggaacccagataggccaacccatctgtctctggtgtccgctccggaagtcgaagacgactctctggagcgcaagcgccttacccggataagcgacccggaaaagtgggagattaagcaaatgatcgcagcaaatgtactgagtaaggaggaattcccggatttcgacgaagaaactggaatactccccaaagtcgatgatgaggaggatgaggaccttgagattgagttagtggaggaggaacccccatttctgaggggccacacaaaacaaagcatggacatgagccccatcaagatcgtgaagaatcctgacggatcactcagccaggcggctatgatgcagagtgcactggcaaaagaacgacgcgagcttaaacaggcccagcgtgaggcagagatggattctattcccatggggttgaataagcattgggtggatcctctgccagatgctgaaggacgtcagatagctgcaaatatgcgcggtattgggatgatgccaaatgatatacctgaatggaagaaacacgcctttggtggaaataaggccagctacggaaagaagacacagatgtccatcttggagcaacgagaatcgctgcctatatacaagttgaaagaacagcttgtacaagccgtgcatgacaaccagatcctgatagttataggtgaaacaggcagcggcaagacaacacaaatcactcagtacctggcagaagccgggtacaccagccgcggtaagatcgggtgcacccagccccgcagagtggctgccatgtcagtcgcaaagagggtaagtgaggagtttgggtgttgcctaggccaggaagtaggctataccataaggttcgaggactgcacctcccccgagacagtgatcaagtacatgacagatggcatgctgctgcgggaatgtcttatagatcctgatttaacccagtacgctatcatcatgcttgatgaagcacatgaacggacaattcatacagacgtgcttttcgggctgcttaagaagacggtgcaaaaaagacaagacatgaaacttatcgtgacttctgccactctggacgcagtaaagttcagccaatacttttacgaggcgcccatatttactatacccgggcgtacttaccccgtggagatactgtacaccaaggaaccagagaccgactatctcgatgcaagtctgatcacagtgatgcagattcatctgaccgaacctcctggcgatatcctggtcttcctgacagggcaggaagagatcgacacagcgtgtgaaattctgtacgagaggatgaagagcttaggccccgatgtgcctgagttgataatactgcccgtgtacagtgccttgcccagcgagatgcagacacgaatcttcgatcctgcccctccaggcagccggaaagtggttatcgcaactaatatcgcagagacatccctgactatcgatgggatctattacgtggtggatccaggctttgtgaaacagaaggtctacaatagcaagactggcattgatcagcttgttgtgacccctatttctcaggctcaagccaagcagagggcggggcgcgctggtcgcactggtcctggaaaatgttataggttatacacggagcgtgcttaccgcgacgaaatgctcactacgaatgtacccgagatccagcggactaatctcgcctctacagtgctgagtttgaaagccatgggcattaatgacctgctcagcttcgacttcatggatgctccacctatggagactctcatcacagctatggagcagctctacaccctgggagcgttggacgatgagggtttgttaacacggctcgggcggaggatggccgaatttcccttggaacctatgctgtgcaaaatgctgattatgtcggttcatcttgggtgcagcgaagaaatgctgacgattgtcagcatgctgtccgtgcaaaatgtattctatagacctaaagataaacaggcccttgccgatcagaagaaagcaaaattccaccagaccgagggagaccatctgaccctgctggcggtctacaactcttggaaaaataacaaattttcaaacccctggtgctatgaaaatttcatccaggcgcggagcttgcgccgcgcacaggacatccggaaacaaatgcttggaatcatggaccgacacaagctagacgtcgtgagttgcggtaaatcaacggtgcgagtccaaaaggccatctgttctggcttctttaggaatgccgcaaagaaagacccccaggaggggtaccggacactgattgatcagcaagtggtctacatccatcctagtagcgccttgttcaataggcagcccgagtgccctaaacattttttgcccgtcgtcgcagtcgctgttagcctggagcagtgcctgagcaaattcgaggacctcaacaaagagctgggcctggttacctgctag

SEQ ID NO: 114271 - DNA, 3546 bp, Artificial Sequence
  derived and/or modified sequence
atggctgtggcagtcgccatggccggtgcgctcatcgggagtgagccgggacccgctgaagaactagctaagctcgaatatctgtccttggtgtctaaggtctgtaccgagttagacaatcacctaggcatcaacgataaggacctggcagaattcgtaatcagcctggcagagaaaaacaccaccttcgacacattcaaggcttctctcgttaaaaatggtgccgagttcacagactctctaatctcaaatttgctacggctgattcagacgatgcgcccaccagcgaaaccaagtaccagcaaggacccagtggtgaaacccaaaactgaaaaagagaagctaaaagagctgttcccagtgctttgtcagcccgataaccctagtgttcgtacgatgttggatgaggatgacgtgaaagtggccgttgatgtgctgaaagagcttgaggccctcatgccctcggccgctggacaggagaaacagcgtgacgcggagcaccgggatcgcactaaaaagaagaagcggtcaaggtctcgggacaggaatcgggaccgggaccgcgaccgcgagcgcaatcgggaccgcgaccacaagagaagacataggtcccgatcacgctcgcgcagccgtactagggagagaaataaggtcaaatccaggtatcggtctaggtcccgatcccagtcccctcctaaagaccgcaaagaccgtgacaagtacggcgaaagaaatctggatcgctggagggacaaacacgtggacagaccccctcctgaggaacctactatcggagatatttataatggtaaagtcacatccatcatgcagtttggctgcttcgtgcagttagaaggactgcgcaaaagatgggaaggccttgtgcacatatcggagctgcgaagagagggcagagtggccaatgttgccgacgtagtctctaagggccagagggtgaaggtgaaggtgctttctttcacaggaactaaaacttcactgtccatgaaagacgtggaccaggaaaccggtgaggatttaaaccccaaccgacgccgtaacttggtgggcgaaactaatgaggagacaagtatgcggaaccccgatagacccacacacctgtccctcgtcagcgcccctgaagtggaagatgattccctggagaggaagcgacttactcgcatcagcgatccagagaaatgggagataaaacagatgatcgctgccaacgttctgtccaaagaagaatttccagacttcgacgaggagactggaattctccccaaggtggacgacgaggaggacgaggatctggaaatcgagctggtggaggaagaaccgccatttctgagaggccacacaaaacagtccatggacatgtccccgattaaaatcgtgaagaacccagacggctctctctcccaggccgcaatgatgcaatcggctctggctaaggagaggagggaactcaagcaggctcagcgtgaggccgaaatggactctattcccatgggtcttaacaagcactgggttgatcctcttccggatgccgaaggccgacagatcgcagcaaatatgagggggatcgggatgatgccgaatgatatcccggagtggaagaaacatgcgtttggcggtaataaggcatcctacggaaaaaagacacaaatgtcaattttggaacaaagagagtcccttccgatctacaagttgaaggaacagttggttcaggcagtgcacgacaaccagattttaattgtgatcggcgagaccgggtctggaaaaactacccaaattactcagtatctcgctgaggctggatatactagccgagggaaaatcgggtgcacgcagccgcgacgcgtcgccgcaatgtctgtggccaagagggtctccgaggaattcggttgttgcctggggcaggaggtaggttatactatccgctttgaggactgcacaagtcccgaaacagtgataaaatacatgaccgacggcatgctgctgagggagtgtcttatagaccctgatctaacccagtacgcgatcatcatgttggatgaggcacacgaaagaactattcacacagacgttctatttgggttgctgaaaaaaacagtccagaaaaggcaagatatgaagcttattgtgacctccgcaacactggatgcagtgaagttctcacagtatttctacgaagcacccatatttactattcccggtaggacttatcccgtggaaatcctatacactaaggagcccgagactgattaccttgacgcatctcttataaccgtcatgcaaattcatttgaccgaacctcctggagatattctcgtattcttgacaggacaggaggagattgacaccgcttgcgagattctgtatgaaaggatgaaatccttgggccctgacgtgccagagttgattattcttccggtttacagtgcgctgccttccgagatgcagactaggatctttgacccagcaccacctgggtctcgcaaagtcgtgattgcaacaaatatcgccgaaactagtctgaccatcgacggcatctactacgtggtggacccgggattcgtcaagcaaaaagtttacaacagcaaaaccggcatagatcagctggtggtgacaccgatctctcaagcgcaggcaaagcagagagctgggcgtgcgggtcgaaccgggcctgggaagtgctatcgattgtacacagagcgcgcttatagggacgaaatgttgaccacaaatgttcccgaaattcagagaaccaacctggcatccactgtgctgagcctaaaggcaatgggcattaatgatctgttgagcttcgactttatggatgcgccacctatggaaacacttataaccgcaatggagcagctgtacaccttaggcgctctcgacgacgaggggctgctgaccagactggggcgtagaatggcagaattccccctggagcccatgctctgcaagatgttaatcatgagcgttcacctgggctgctcggaggaaatgctgaccattgtgtcaatgctctctgtccagaacgtcttttaccggccaaaggataaacaggccctggctgaccaaaaaaaggcaaagttccaccagactgaaggagaccatttgaccttactggccgtgtacaattcttggaaaaataataaattttccaatccctggtgttacgagaactttatccaggccagatccttgcgcagagcccaggatattagaaagcagatgctgggcatcatggacagacacaagctcgacgtggtgtcctgtggcaaaagtacagttagggtacaaaaagcaatttgcagcggcttttttcgcaatgcggctaagaaggacccccaggagggttatcggacactgatcgaccagcaggtcgtgtatatacacccctcatccgctctcttcaaccgtcaacccgagtgcccaaagcatttcctgcctgtcgtcgcagtggctgtttctctcgaacagtgcctgtctaagttcgaagatctgaataaggagctgggtctggtgacctgctag

SEQ ID NO: 114272 - DNA, 3546 bp, Artificial Sequence
  derived and/or modified sequence
atggccgtggccgtggccatggccggcgccctgatcggcagcgagcccggccccgccgaggagctggccaagctggagtacctgagcctggtgagcaaggtgtgcaccgagctggacaaccacctgggcatcaacgacaaggacctggccgagttcgtgatcagcctggccgagaagaacaccaccttcgacaccttcaaggccagcctggtgaagaacggcgccgagttcaccgacagcctgatcagcaacctgctgagactgatccagaccatgagaccccccgccaagcccagcaccagcaaggaccccgtggtgaagcccaagaccgagaaggagaagctgaaggagctgttccccgtgctgtgccagcccgacaaccccagcgtgagaaccatgctggacgaggacgacgtgaaggtggccgtggacgtgctgaaggagctggaggccctgatgcccagcgccgccggccaggagaagcagagagacgccgagcacagagacagaaccaagaagaagaagagaagcagaagcagagacagaaacagagacagagacagagacagagagagaaacagagacagagaccacaagagaagacacagaagcagaagcagaagcagaagcagaaccagagagagaaacaaggtgaagagcagatacagaagcagaagcagaagccagagcccccccaaggacagaaaggacagagacaagtacggcgagagaaacctggacagatggagagacaagcacgtggacagacccccccccgaggagcccaccatcggcgacatctacaacggcaaggtgaccagcatcatgcagttcggctgcttcgtgcagctggagggcctgagaaagagatgggagggcctggtgcacatcagcgagctgagaagagagggcagagtggccaacgtggccgacgtggtgagcaagggccagagagtgaaggtgaaggtgctgagcttcaccggcaccaagaccagcctgagcatgaaggacgtggaccaggagaccggcgaggacctgaaccccaacagaagaagaaacctggtgggcgagaccaacgaggagaccagcatgagaaaccccgacagacccacccacctgagcctggtgagcgcccccgaggtggaggacgacagcctggagagaaagagactgaccagaatcagcgaccccgagaagtgggagatcaagcagatgatcgccgccaacgtgctgagcaaggaggagttccccgacttcgacgaggagaccggcatcctgcccaaggtggacgacgaggaggacgaggacctggagatcgagctggtggaggaggagccccccttcctgagaggccacaccaagcagagcatggacatgagccccatcaagatcgtgaagaaccccgacggcagcctgagccaggccgccatgatgcagagcgccctggccaaggagagaagagagctgaagcaggcccagagagaggccgagatggacagcatccccatgggcctgaacaagcactgggtggaccccctgcccgacgccgagggcagacagatcgccgccaacatgagaggcatcggcatgatgcccaacgacatccccgagtggaagaagcacgccttcggcggcaacaaggccagctacggcaagaagacccagatgagcatcctggagcagagagagagcctgcccatctacaagctgaaggagcagctggtgcaggccgtgcacgacaaccagatcctgatcgtgatcggcgagaccggcagcggcaagaccacccagatcacccagtacctggccgaggccggctacaccagcagaggcaagatcggctgcacccagcccagaagagtggccgccatgagcgtggccaagagagtgagcgaggagttcggctgctgcctgggccaggaggtgggctacaccatcagattcgaggactgcaccagccccgagaccgtgatcaagtacatgaccgacggcatgctgctgagagagtgcctgatcgaccccgacctgacccagtacgccatcatcatgctggacgaggcccacgagagaaccatccacaccgacgtgctgttcggcctgctgaagaagaccgtgcagaagagacaggacatgaagctgatcgtgaccagcgccaccctggacgccgtgaagttcagccagtacttctacgaggcccccatcttcaccatccccggcagaacctaccccgtggagatcctgtacaccaaggagcccgagaccgactacctggacgccagcctgatcaccgtgatgcagatccacctgaccgagccccccggcgacatcctggtgttcctgaccggccaggaggagatcgacaccgcctgcgagatcctgtacgagagaatgaagagcctgggccccgacgtgcccgagctgatcatcctgcccgtgtacagcgccctgcccagcgagatgcagaccagaatcttcgaccccgccccccccggcagcagaaaggtggtgatcgccaccaacatcgccgagaccagcctgaccatcgacggcatctactacgtggtggaccccggcttcgtgaagcagaaggtgtacaacagcaagaccggcatcgaccagctggtggtgacccccatcagccaggcccaggccaagcagagagccggcagagccggcagaaccggccccggcaagtgctacagactgtacaccgagagagcctacagagacgagatgctgaccaccaacgtgcccgagatccagagaaccaacctggccagcaccgtgctgagcctgaaggccatgggcatcaacgacctgctgagcttcgacttcatggacgccccccccatggagaccctgatcaccgccatggagcagctgtacaccctgggcgccctggacgacgagggcctgctgaccagactgggcagaagaatggccgagttccccctggagcccatgctgtgcaagatgctgatcatgagcgtgcacctgggctgcagcgaggagatgctgaccatcgtgagcatgctgagcgtgcagaacgtgttctacagacccaaggacaagcaggccctggccgaccagaagaaggccaagttccaccagaccgagggcgaccacctgaccctgctggccgtgtacaacagctggaagaacaacaagttcagcaacccctggtgctacgagaacttcatccaggccagaagcctgagaagagcccaggacatcagaaagcagatgctgggcatcatggacagacacaagctggacgtggtgagctgcggcaagagcaccgtgagagtgcagaaggccatctgcagcggcttcttcagaaacgccgccaagaaggacccccaggagggctacagaaccctgatcgaccagcaggtggtgtacatccaccccagcagcgccctgttcaacagacagcccgagtgccccaagcacttcctgcccgtggtggccgtggccgtgagcctggagcagtgcctgagcaagttcgaggacctgaacaaggagctgggcctggtgacctgctag

SEQ ID NO: 114273 - DNA, 3809 bp, Artificial Sequence
  derived and/or modified sequence
agtgaaagctggaacccggccggagtagctctgagcgccggctgtgaggaaggaggttctgggcaagctatagccatggctgtggctgtagccatggcgggagccttaatcgggtcggagccaggccccgcggaagaacttgccaaactcgagtacctgtctttggtgtcaaaggtttgcactgagctggacaatcacttggggatcaacgacaaggaccttgctgaatttgtgatcagtcttgctgagaaaaataccacctttgatacttttaaggcttctctcgtcaaaaatggtgcagaatttacggattctcttattagtaacttgctgcgtctcatacaaaccatgcggcctccagcgaagccttccactagcaaagatccagttgttaaacctaaaacagaaaaagaaaagctgaaggaactcttcccagtcctttgccaaccggacaacccttctgttcggaccatgttggatgaagatgatgtgaaagttgctgtggatgtcctgaaagaactggaagctttaatgcccagcgcagcaggccaggagaagcaaagagatgctgaacaccgggacaggacaaagaagaagaagcggagtcgaagccgagatcgaaaccgagatcgagacagagatagggaacgaaaccgagatagagaccacaagcggagacaccgatcccgctctcgatcacgttccaggacccgggagaggaataaagtgaagtctagatatcggtccaggagcaggagtcagagtccccccaaagaccggaaggaccgggacaaatatggagagcggaatctggatagatggcgggataagcatgtggaccgccctcctccagaagagcccaccattggtgacatttataatggcaaagttaccagcatcatgcagtttggttgctttgtgcagctggaaggactaaggaagcggtgggaaggcctggtgcacatctctgagctccggcgggagggtcgtgtggccaatgtagctgatgtcgtgagcaaaggccagagggtcaaagtcaaagtgctgtccttcactgggaccaagaccagcctgagcatgaaggatgtggatcaagagactggagaagatctaaacccaaatagacggcgaaatcttgtcggggagaccaatgaggagacctcaatgcggaatcctgatagacccactcacttgtcccttgtcagtgctcctgaagtagaggacgactcactggaacgcaagcgcctcacccgaatctctgacccagagaagtgggagatcaaacagatgattgctgccaatgtcctttccaaagaagaatttccagactttgatgaagagactggcattctccctaaggtggatgatgaagaagatgaggaccttgagattgaattggttgaggaagagcctccattcctgagagggcacactaagcaaagcatggacatgagccccattaaaattgtcaagaacccagacggctccctctcccaagcagcaatgatgcagagtgccttggccaaagaaaggcgggaactcaaacaggcccagcgggaagctgagatggattctattcccatgggactcaacaaacactgggttgaccctctgcctgatgcggaaggcagacagattgctgccaacatgaggggtattgggatgatgcccaatgatattcctgagtggaagaagcatgcctttgggggcaacaaagcctcttacggaaaaaagacccagatgtcaatccttgagcagagggagagcctgcccatctacaaactgaaggagcaattggtccaggccgtccatgacaatcagatcctgattgtcattggtgagacaggatctggaaagacaacacagatcacccagtacctggcggaggcaggctacacttccaggggcaagattgggtgtacccagcccagaagagtggcagctatgtcggtggccaaaagagtgtcagaggagtttggttgttgcttaggccaagaggtgggctacaccattcgatttgaggactgcactagccctgaaacagtcatcaagtacatgacagatgggatgttgcttagagagtgcttgattgaccctgacctcactcagtacgcgatcatcatgttggacgaggcacatgagaggacaattcacactgatgtgctctttggattgttgaaaaagacagttcagaaacggcaggacatgaagctgattgtcacctcagccaccttggatgcagtgaagttttctcaatacttctatgaagctcccattttcaccatcccaggtcgaacatatccagtggaaatactgtacacaaaggaacctgagacagattatctggatgccagcctgattactgttatgcagattcatttaacagaaccaccaggtgatatcctggtcttcctgactggtcaggaagaaattgatactgcttgtgagatcctgtatgaaagaatgaaatccctgggacctgatgttccagagttaattatcctcccagtgtactctgctcttcccagtgagatgcagacccgaatctttgacccagctccaccaggcagcagaaaggttgtgattgccaccaatatcgcagagacatcgctgactattgatggtatctactatgtggtggacccaggattcgtgaaacagaaagtttacaattccaagacagggattgaccagctcgtggtgacgcctatttctcaggctcaggcaaagcaacgagctggcagagctgggagaacaggcccagggaagtgttacaggttgtacacagaacgtgcctaccgagatgaaatgctgaccaccaacgtgccggaaatccagagaaccaacttagcaagcacagtgctgtcactcaaggccatgggtatcaatgatctgctgtcctttgatttcatggatgccccacctatggaaactttgatcacagccatggagcagctgtacacactgggggccctggatgacgagggcctgctcactcgcttgggccgccggatggcagagttccctctggagccaatgctatgcaaaatgctcatcatgtctgtgcatctgggctgcagtgaggaaatgctgaccattgtatccatgctgtctgtgcagaacgtcttctataggcccaaggataaacaagcccttgcagatcagaagaaggccaaattccaccagactgaaggggaccacctcaccctgctagctgtgtacaactcctggaagaacaacaagttctccaacccatggtgctatgagaactttatccaggctcgttccctgcgccgggcccaggacattcgcaagcagatgttaggcataatggacagacacaagctggatgttgtttcctgtggcaagtccacagtccgagtgcagaaggccatctgcagtgggttcttccgtaatgctgccaagaaagacccgcaggagggttaccggacactgatcgaccagcaggtggtctatatccatccttccagtgccctcttcaacagacagccagaatgcccaaagcacttcctccctgtggttgctgtagctgtctcattggagcagtgcctctccaagtttgaggatttgaacaaagaactgggactggtgacttgttaatgaacagttcagagggcagagggccatcatctcagcttgtggagacctttctttccctggatgctgcttctcagctaactccctctctcttcgtgtgtgtactcggccttcagggtttccaccgatttttacaccttcttcccaccacgatagcttggctttaatgtggaattaaattatatattttt

SEQ ID NO: 114274 - protein, 268 aa, Artificial Sequence
  derived and/or modified sequence
MFLVNSFLKGGGGGGGGGGGLGGGLGNVLGGLISGAGGGGGGGGGGGGGGGGGGGGTAMRILGGVISAISEAAAQYNPEPPPPRTHYSNIEANESEEVRQFRRLFAQLAGDDMEVSATELMNILNKVVTRHPDLKTDGFGIDTCRSMVAVMDSDTTGKLGFEEFKYLWNNIKRWQAIYKQFDTDRSGTICSSELPGAFEAAGFHLNEHLYNMIIRRYSDESGNMDFDNFISCLVRLDAMFRAFKSLDKDGTGQIQVNIQEWLQLTMYS

SEQ ID NO: 114275 - DNA, 807 bp, Artificial Sequence
  derived and/or modified sequence
atgtttctagtgaattcctttctgaaggggggaggtggcggcggaggcggcgggggaggactcggcggtgggttggggaacgtcctgggcggactgatttcaggagccggcggcggaggcggaggtgggggcgggggcggcggcgggggcggcggcggcggcggcggcaccgccatgagaatcctcgggggagtgatatcagctatttctgaggctgcagcccagtataatcccgagcctcctccacctcggacccattatagcaatattgaggccaacgagtcagaagaagtccgccaatttagacgactgtttgcccagctcgccggcgatgatatggaagtgtcagcaaccgagctcatgaatattttgaacaaggtggttacaagacaccccgatctgaagaccgacggttttggtattgacacctgccgcagcatggtggctgtgatggattccgacacaacgggcaaactcggtttcgaggaatttaaatacctgtggaacaatattaagagatggcaggcaatttacaagcaattcgacacagatcggagtggaaccatctgcagctcggaactgcccggggcctttgaggcagctggcttccatttaaacgaacatctgtacaacatgatcattagaaggtatagcgacgagagcggaaacatggactttgacaacttcatcagctgtttggttaggttggacgctatgttccgggcattcaagtcactggataaagacggaaccggacaaatacaggtcaatattcaggagtggctgcagttgaccatgtactcctag

SEQ ID NO: 114276 - DNA, 807 bp, Artificial Sequence
  derived and/or modified sequence
atgttcctggtgaacagcttcctgaagggcggcggcggcggcggcggcggcggcggcggcctgggcggcggcctgggcaatgtgctgggcggcctcatcagcggggccggcggcggcggcggcggcggcggcggcggcggcggcggcggcggcggcggcggcggcggcacagccatgaggatcctgggcggcgtcatcagcgccatcagcgaggccgccgcccagtacaaccctgagcccccaccacccaggacccactacagcaacatcgaggccaatgaaagtgaggaggtgcggcagttccggcggctgtttgcccagctggccggagatgacatggaggtgtctgccacagagctgatgaacatcctgaacaaggtggtgaccaggcacccagacctgaagacagatggctttggaattgacacctgccgctccatggtggccgtgatggacagcgacaccaccgggaagctgggctttgaggagttcaagtacctgtggaacaacatcaagcgctggcaggccatctacaagcagtttgacacagacaggagcggcaccatctgcagcagcgagctgcccggggcctttgaggccgccggcttccacctgaatgagcacctgtacaacatgatcatccgccgctacagtgatgaaagtggcaacatggactttgacaacttcatcagctgcctggtgcggctggatgccatgttccgggccttcaagagcctggacaaggatggcaccggccagatccaggtgaacatccaggagtggctgcagctgaccatgtacagctag

SEQ ID NO: 114277 - DNA, 807 bp, Artificial Sequence
  derived and/or modified sequence
atgttcctggtgaacagcttcctgaagggcggcggcggcggcggcgggggcggaggcggactcggggggggcctggggaatgtgctgggcggtctgattagtggtgccgggggtggcggagggggcggcgggggcggaggcggaggtggcgggggcgggggtggaggcaccgcaatgcgaattcttgggggggtgatcagtgcaattagcgaggccgcagcccaatataatcctgagccacccccccccagaactcactactccaatatcgaggccaatgaaagcgaagaggtgagacaatttcgtcggttatttgcacaactggcgggagacgacatggaggtgtccgcaaccgaactcatgaacattctcaataaggtggtgacgcgacatcctgatctcaaaactgatgggttcggaatcgacacatgtagaagcatggtcgcggtaatggactcagatacaacagggaagctgggatttgaagaatttaaatacctgtggaataatatcaagcgctggcaggccatctacaagcaatttgataccgacagaagcggtacaatctgtagttccgaactccccggggccttcgaagcagccgggttccatctgaacgagcacctgtataatatgataatccgacgatatagcgacgaaagcggcaatatggacttcgacaactttatttcctgcctcgttaggcttgacgccatgtttcgagcttttaaatccctcgataaggatgggaccgggcagatccaggtaaatatccaggagtggctgcagctaacgatgtactcgtag

SEQ ID NO: 114278 - DNA, 807 bp, Artificial Sequence
  derived and/or modified sequence
atgttcctggtgaattccttcctgaaaggcggtgggggtggaggaggcggagggggaggactcggcggagggcttggaaatgtgctgggagggctgatttcgggcgctggcggaggcggaggtggcggtggcggaggtgggggaggcggagggggtggtggtggaggcactgcgatgaggatcctcggcggtgtcataagcgcaatcagtgaggccgcagcgcagtacaatcctgagcctccaccaccgagaactcattacagtaacatcgaggcaaatgagagcgaagaagtccgtcagttccgcaggctgtttgcccagcttgcgggtgatgatatggaggtaagcgccactgagctgatgaatattcttaacaaggtcgttacccgccaccctgatttgaagaccgacggctttgggatagatacttgcaggtcaatggtagcggtgatggattctgacacaacgggtaaactaggattcgaagagttcaagtacctttggaacaatataaagagatggcaagccatatacaagcagtttgatactgatcgctccgggacgatctgttctagcgaactccccggagccttcgaagcagcgggtttccacctgaatgagcacctttataacatgattatccgacgatacagtgatgagtctgggaacatggatttcgataacttcatttcttgtctagtgcgactcgatgcaatgtttagagcttttaaaagcctcgataaggatggaactggacagatccaggtgaatatccaggaatggctacagctgacgatgtatagctag

SEQ ID NO: 114279 - DNA, 1477 bp, Artificial Sequence
  derived and/or modified sequence
cgggcgacagcagggccgcggtgcagtgtccgacccgagagttgcggcctgagtcaccggccccgccctccggagccggacgctgcgggaggcccgggagcggcagtggaaccgactcccagaactccggacgtgtgcggcgcagtgagtcgcagccatgttcctggttaactcgttcttgaagggcggcggcggcggcggcgggggaggcgggggcctgggtgggggcctgggaaatgtgcttggaggcctgatcagcggggccgggggcggcggcggcggcggcggcggcggcggcggtggtggaggcggcggtggcggtggaacggccatgcgcatcctaggcggagtcatcagcgccatcagcgaggcggctgcgcagtacaacccggagcccccgcccccacgcacacattactccaacattgaggccaacgagagtgaggaggtccggcagttccggagactctttgcccagctggctggagatgacatggaggtcagcgccacagaactcatgaacattctcaataaggttgtgacacgacaccctgatctgaagactgatggttttggcattgacacatgtcgcagcatggtggccgtgatggatagcgacaccacaggcaagctgggctttgaggaattcaagtacttgtggaacaacatcaaaaggtggcaggccatatacaaacagttcgacactgaccgatcagggaccatttgcagtagtgaactcccaggtgcctttgaggcagcagggttccacctgaatgagcatctctataacatgatcatccgacgctactcagatgaaagtgggaacatggattttgacaacttcatcagctgcttggtcaggctggacgccatgttccgtgccttcaaatctcttgacaaagatggcactggacaaatccaggtgaacatccaggagtggctgcagctgactatgtattcctgaactggagccccagacccgccccctcactgccttgctataggagtcacctggagcctcggtctctcccagggccgatcctgtctgcagtcacatctttgtggggcctgctgacccacaagcttttgttctctcagtacttgttacccagcttctcaacatccagggcccaatttgccctgcctggagttccccctggctctaggacactctaacaagctctgtccacgggtctccccattcccaccaggccctgcacacacccactccgtaacctctcccctgtacctgtgccaagcctagcacttgtgatgcctccatgccccgagggccctctctcagttctgggaggatgactccagtccctgcacgccctggcacacccttcacggttgctacccaggcggccaagctccagaccgtgccagacccaggtgccccagtgcctttgtctatattctgctcccagcctgccaggcccaggaggaaataaacatgccccagttgctgatctct

SEQ ID NO: 114280 - DNA, 807 bp, Artificial Sequence
  derived and/or modified sequence
atgttcctggtgaacagcttcctgaagggcggcggcggcggcggcggcggcggcggcggcctgggcggcggcctgggcaacgtgctgggcggcctgatcagcggcgccggcggcggcggcggcggcggcggcggcggcggcggcggcggcggcggcggcggcggcggcaccgccatgagaatcctgggcggcgtgatcagcgccatcagcgaggccgccgcccagtacaaccccgagccccccccccccagaacccactacagcaacatcgaggccaacgagagcgaggaggtgagacagttcagaagactgttcgcccagctggccggcgacgacatggaggtgagcgccaccgagctgatgaacatcctgaacaaggtggtgaccagacaccccgacctgaagaccgacggcttcggcatcgacacctgcagaagcatggtggccgtgatggacagcgacaccaccggcaagctgggcttcgaggagttcaagtacctgtggaacaacatcaagagatggcaggccatctacaagcagttcgacaccgacagaagcggcaccatctgcagcagcgagctgcccggcgccttcgaggccgccggcttccacctgaacgagcacctgtacaacatgatcatcagaagatacagcgacgagagcggcaacatggacttcgacaacttcatcagctgcctggtgagactggacgccatgttcagagccttcaagagcctggacaaggacggcaccggccagatccaggtgaacatccaggagtggctgcagctgaccatgtacagctag

SEQ ID NO: 114281 - protein, 124 aa, Artificial Sequence
  derived and/or modified sequence
MESCSVAQAGVLTSPFMWRWTGMAGALSALDNTIEDDADDQLPCGEGRPGWVRGELLGSQGVCKDSKDLFVPTSSSLYGCFCVGLVSGMAISVLLLASDFRKLDFSRPEPCFEKEASLWFVAQH

SEQ ID NO: 114282 - DNA, 5442 bp, Artificial Sequence
  derived and/or modified sequence
cccttttctccgccttttccgcgctccatcttgccctcctccctccttcgcccccgctcctactctccccttcttcccctctctccctaccccctccctttctggggcaggcgtttctccgaggcgcactgaggctccggggcgagtccgcgcagcgcgagctggggaaagccgtccggggctcccgatgaccctgcactccgccgggaggccgcccttcggaaaagccgtggaaacacacccggattgaaatgcccctggcccgcctgacccgaccctaggagaagcagccgagttacccgacatcgtggtcagcaggagctgggtcggtggctggatgctgcagcagcagggactcagcgcctgggagggctcctggggcagggagagaagcagagatgcaacatttttaaaatttcacaaagcatccggctgcacccaggtccctggaacaggagacaaacagaattaatgttttataccttcgggtataggtttgagttttttccccctcatgccaagtatttaaaacctctagaaacccatgatttgacaatcaatgattgcgcgatactttcaatttgaatattcaaaggcttaacaaaatggactatcttctgcagaaatcctgcacacaggcaccccacagagagtccagagaaacagggagtgagacccctttgggtcctggcccttgcttttattatagtttgagcattttgtcctccttcccacagatagagcagatgtcctcaaagatgctctgtatttcagccttcagggcagctaagaagccatgagtgacttaggctgccctggccatgaacaccggagccagactggctggccagactgattcccgcatcccccatctgtgttttgaggggaaatctcaggttttgaggaatgaacatggcagctagtgggtgtggcacagcaagaagtcgctctgggcccaggtggcaggccagcggcctagcagaggccttcgctctgcacctcctatttttctggctccgcctggctaccagcgggcttccctccccctttcatcccgctcttcctgggcccgacactggggtttctgctcagaatgactgcccattaagaccctttcctcctccccacagagctggggatgccaggagcctcatcctctggagactttctgactctgggtttcaccaccgcactgcgaagtgccctctttgctttttcgccttctagagccacccctgcctttttgctgtaggagcacatgttaggaaacaatgacaagtttggctcctgctcattttaactgaaaggatgtggacttaggttcaagccttctcccattggggtgagaagggggagggacttgggatcaggcttcccccttggtccaggcccaagcccctcactaatgacttgggattctactgggtcatcttctgtgagtacttactgtgcctcttccatgtgatttggaaggtgaggagacaggaatggtccacagagggagagagtgccaggccaagtcctctcatagccacccgccccctccacagaaggggacagcaagagaagagagaggcatggtgaggttccttttgcaaataaccaagatatttccaggattcaagaccagtccatggttttaggcctctgctgtttattctctgagttctcagaaatgcaaaaagtgtagtttagccccagaggcctcaagaaaaagattggggtgcccccaaatgtgtcaaatacagagggaaacacacagagcttagggaaagggcaactgagaatgacaagactgataggaattgcttggcagctgaagccacatctctgggggagaggagcaggcctgggaacacctgaggtggcacctggcagtggagggcaggatggatgtattgaaatctgacagcttctggaacttctttctacaaatgcccctgagcctgtgtcctaggtttccctgatggaccagacctgaggaggggaaggacaatgggggtggagatggcacctcccctccctgcatgccttcttcctcgctgtgcctaggccttgccccctctgaaggaacagtgaaccaagcagcttggaatctagggatggtctcttgtcctcatagcgtcttccattacttcttttcttcgctgctctcctcctttttgttatactcttattttttgatttgcttttaaaaaccttctttgttgcatttttgtttatttctttctgtgtttctttgtctctcttcctgtcattgctttcttccatttcttatctgtactactggttttctccctggcttcacgtgtctctgtgttcccctatgctggggtgtcctcccagtgctttcaggcttcatctccttcctaacctctcctttctattttttttttttttttttttgagatggagtcttgctcagtcgcccaggctggagtgctaacctctcctttcatgtggagatggacagggatggcaggagcactgagtgctcttgacaacaccattgaagatgatgctgacgatcagctaccctgtggagaaggcaggccaggctgggtgagaggggagctccttggaagtcagggggtctgtaaggacagcaaggatctctttgtcccaacctccagcagcctttatgggtgcttctgtgttggccttgtttctgggatggccatctcagtgctgttgctggctagcgatttcagaaaactagatttttctaggcctgagccctgttttgagaaagaagcttccctctggtttgtagctcaacattaatgagttttggttcctgttgtttctataattacaaaaccccagcacaggtatttaagagccaaaggccatgcttgtggaagtaagggaggatctttctaaatggatcctgcaaatcctccttacagatctgagtggatgatcaggcccagagcaaccctgagaccccaggtacccacagcattggctgttcttcataggagactcagagaagacttcataggagactcattattgtttactggacatcaggtgctatattgtatagcattcacattccacaggtgaggaaacaggctcagaggaataagtggcatgccaagatcactgagtatatcagtagcagaattaggattcagactttgttaggcctaactccaaagccctggctttttttttttttgagatggaatcttactctgtcaccgggctggagtgcagtggcatgatctcagctcactgcaatctctgcctcctgggttcaagtgattcccctgccttagcctcctgagtagctgggactacaggcatgcaccaccacgcccagctaatttttgtgtttttagtagagaggaggtttcaccgtgttggccaggatggtctcaatctcttgaccttgtgatctgcctgcctcggcctcccaaagtactgggattataggcatgagccaccatgcccggcctttgctcttaactactgatgttgtcttcctgatcttttctacaagaagcttttaaactttttggactttaacctacaataagaaatccattttacatgttcacatgtatctataacaacatttatatttctaaaacaaacttttcatgaaacaagatatacctacatatgtcaggcactctgatattttctattctagtccaccttttccatttcattctatttatgggaaatatatgttggttgggagtcactgagttaatttaatgacccactaataggctgtgagtggcattggaaaaatacctgcttgtaagatatgcgaacacacgtttcaaggttgtttgtgcatgtggaaatattttggggtgctatctgttttaccatcagtttgtacaaggacactaagacagtgtagcctgctgacttgagaatgttctgtaaggactggaaacactagaatcttgaagaaacgcctggctagaggtgagggtaagctgttaattacactgattacagtttgtgcctctcagactgagaactcttttcttcttgctgggggcattgctatctctaggatgtttgccctgaagtcctgatagtctctttggggttttaataaatggctgaaaaaattgttgtggggtttcaacaggcgttcataggcacccttgcttggcaatataacatggcttttgatgtttgggtgttggaagggatctttgaagtgctgagagggactcagtctttttccaaaatctctgcttgtgtctgtccagcctctggctccactgcttggctgagatcctggcccatagtagaatctgtgtagaggaaacgagagctcactatttgtgaggcagcctgttccactattggactgctttaaatgtagtgatcagtgattatgctataatccaatcatgtattaattgggcaccaactatgcactaggcatggtatcaagtaccaggagtacaaaaataagtaaaccttgatttctgctatcaattactctcttctcctacttctgtactactgcttttctattgtgagtttgtttagttcattaattggtttattcattcattcaacaatcatatactgattagctactctgaccaggtccagtactaactctgaagaagttatgcccatcccatcttcaccccaagccttctccttttgagactcctcatccagtttctttagttcttcatatatcactgtttttcagatctctggctatccttgccattgacctcagaaatcctgtatttgaccttaaccttcttatacccagtccatacccaaagtgatggaaatggaatagatttctttttaaagttttaaacgaatattttgactgaaaaattttggcagtcttgtatgcaaatgacactgcagagcattgttttctcccccccacgtaggagattttattcaactaaggcacaggcatattaaaagactttcagtataaggaaaaggggtagtttattccctccaaatttgactacagctcgaaattgtctttattaatgcaaagttcttttgtcaccttgactttgggacactgttaccaaacctcgtgggaaatatcaagttccagaagattgaatacatgcaggaaacaaatgttttttgggccctagagtgaacatttggtccatatgaaaatgaccaggaagacaattaggtgaaggttttttaatgatttgtgctacgtcagtctcttcccataagacatattcaaagttttaacttttccttaagaggcttccatggggagcaagcatttgataattcatcctttaagaaaaacaccaccgtacactgcttgaagagttcctcttctattacttaaaacgtttttattgtgcaacatttaaggcatacaaaaacatataaagaataccatgatgaaaatctatgactgtattaccaagcttaagaaataaaacagttgagtgatctctc

SEQ ID NO: 114283 - DNA, 5496 bp, Artificial Sequence
  derived and/or modified sequence
agacttttgagatggacttttgaaagagtgtttgagggaactgttaatgctggctgtactgacctgcagaagatggtgcaactgggtctgaaaggtggacactgctgcctccggaccgctgtcaaagcaagaatatcaccgtgaagcaggctgaaagaaatgctctgaagggaaagctaagacattttgatgaggactatgtttctttctgctataaggaaaagccgtggaaacacacccggattgaaatgcccctggcccgcctgacccgaccctaggagaagcagccgagttacccgacatcgtggtcagcaggagctgggtcggtggctggatgctgcagcagcagggactcagcgcctgggagggctcctggggcagggagagaagcagagatgcaacatttttaaaatttcacaaagcatccggctgcacccaggtccctggaacaggagacaaacagaattaatgttttataccttcgggtataggtttgagttttttccccctcatgccaagtatttaaaacctctagaaacccatgatttgacaatcaatgattgcgcgatactttcaatttgaatattcaaaggcttaacaaaatggactatcttctgcagaaatcctgcacacaggcaccccacagagagtccagagaaacagggagtgagacccctttgggtcctggcccttgcttttattatagtttgagcattttgtcctccttcccacagatagagcagatgtcctcaaagatgctctgtatttcagccttcagggcagctaagaagccatgagtgacttaggctgccctggccatgaacaccggagccagactggctggccagactgattcccgcatcccccatctgtgttttgaggggaaatctcaggttttgaggaatgaacatggcagctagtgggtgtggcacagcaagaagtcgctctgggcccaggtggcaggccagcggcctagcagaggccttcgctctgcacctcctatttttctggctccgcctggctaccagcgggcttccctccccctttcatcccgctcttcctgggcccgacactggggtttctgctcagaatgactgcccattaagaccctttcctcctccccacagagctggggatgccaggagcctcatcctctggagactttctgactctgggtttcaccaccgcactgcgaagtgccctctttgctttttcgccttctagagccacccctgcctttttgctgtaggagcacatgttaggaaacaatgacaagtttggctcctgctcattttaactgaaaggatgtggacttaggttcaagccttctcccattggggtgagaagggggagggacttgggatcaggcttcccccttggtccaggcccaagcccctcactaatgacttgggattctactgggtcatcttctgtgagtacttactgtgcctcttccatgtgatttggaaggtgaggagacaggaatggtccacagagggagagagtgccaggccaagtcctctcatagccacccgccccctccacagaaggggacagcaagagaagagagaggcatggtgaggttccttttgcaaataaccaagatatttccaggattcaagaccagtccatggttttaggcctctgctgtttattctctgagttctcagaaatgcaaaaagtgtagtttagccccagaggcctcaagaaaaagattggggtgcccccaaatgtgtcaaatacagagggaaacacacagagcttagggaaagggcaactgagaatgacaagactgataggaattgcttggcagctgaagccacatctctgggggagaggagcaggcctgggaacacctgaggtggcacctggcagtggagggcaggatggatgtattgaaatctgacagcttctggaacttctttctacaaatgcccctgagcctgtgtcctaggtttccctgatggaccagacctgaggaggggaaggacaatgggggtggagatggcacctcccctccctgcatgccttcttcctcgctgtgcctaggccttgccccctctgaaggaacagtgaaccaagcagcttggaatctagggatggtctcttgtcctcatagcgtcttccattacttcttttcttcgctgctctcctcctttttgttatactcttattttttgatttgcttttaaaaaccttctttgttgcatttttgtttatttctttctgtgtttctttgtctctcttcctgtcattgctttcttccatttcttatctgtactactggttttctccctggcttcacgtgtctctgtgttcccctatgctggggtgtcctcccagtgctttcaggcttcatctccttcctaacctctcctttctattttttttttttttttttttgagatggagtcttgctcagtcgcccaggctggagtgctaacctctcctttcatgtggagatggacagggatggcaggagcactgagtgctcttgacaacaccattgaagatgatgctgacgatcagctaccctgtggagaaggcaggccaggctgggtgagaggggagctccttggaagtcagggggtctgtaaggacagcaaggatctctttgtcccaacctccagcagcctttatgggtgcttctgtgttggccttgtttctgggatggccatctcagtgctgttgctggctagcgatttcagaaaactagatttttctaggcctgagccctgttttgagaaagaagcttccctctggtttgtagctcaacattaatgagttttggttcctgttgtttctataattacaaaaccccagcacaggtatttaagagccaaaggccatgcttgtggaagtaagggaggatctttctaaatggatcctgcaaatcctccttacagatctgagtggatgatcaggcccagagcaaccctgagaccccaggtacccacagcattggctgttcttcataggagactcagagaagacttcataggagactcattattgtttactggacatcaggtgctatattgtatagcattcacattccacaggtgaggaaacaggctcagaggaataagtggcatgccaagatcactgagtatatcagtagcagaattaggattcagactttgttaggcctaactccaaagccctggctttttttttttttgagatggaatcttactctgtcaccgggctggagtgcagtggcatgatctcagctcactgcaatctctgcctcctgggttcaagtgattcccctgccttagcctcctgagtagctgggactacaggcatgcaccaccacgcccagctaatttttgtgtttttagtagagaggaggtttcaccgtgttggccaggatggtctcaatctcttgaccttgtgatctgcctgcctcggcctcccaaagtactgggattataggcatgagccaccatgcccggcctttgctcttaactactgatgttgtcttcctgatcttttctacaagaagcttttaaactttttggactttaacctacaataagaaatccattttacatgttcacatgtatctataacaacatttatatttctaaaacaaacttttcatgaaacaagatatacctacatatgtcaggcactctgatattttctattctagtccaccttttccatttcattctatttatgggaaatatatgttggttgggagtcactgagttaatttaatgacccactaataggctgtgagtggcattggaaaaatacctgcttgtaagatatgcgaacacacgtttcaaggttgtttgtgcatgtggaaatattttggggtgctatctgttttaccatcagtttgtacaaggacactaagacagtgtagcctgctgacttgagaatgttctgtaaggactggaaacactagaatcttgaagaaacgcctggctagaggtgagggtaagctgttaattacactgattacagtttgtgcctctcagactgagaactcttttcttcttgctgggggcattgctatctctaggatgtttgccctgaagtcctgatagtctctttggggttttaataaatggctgaaaaaattgttgtggggtttcaacaggcgttcataggcacccttgcttggcaatataacatggcttttgatgtttgggtgttggaagggatctttgaagtgctgagagggactcagtctttttccaaaatctctgcttgtgtctgtccagcctctggctccactgcttggctgagatcctggcccatagtagaatctgtgtagaggaaacgagagctcactatttgtgaggcagcctgttccactattggactgctttaaatgtagtgatcagtgattatgctataatccaatcatgtattaattgggcaccaactatgcactaggcatggtatcaagtaccaggagtacaaaaataagtaaaccttgatttctgctatcaattactctcttctcctacttctgtactactgcttttctattgtgagtttgtttagttcattaattggtttattcattcattcaacaatcatatactgattagctactctgaccaggtccagtactaactctgaagaagttatgcccatcccatcttcaccccaagccttctccttttgagactcctcatccagtttctttagttcttcatatatcactgtttttcagatctctggctatccttgccattgacctcagaaatcctgtatttgaccttaaccttcttatacccagtccatacccaaagtgatggaaatggaatagatttctttttaaagttttaaacgaatattttgactgaaaaattttggcagtcttgtatgcaaatgacactgcagagcattgttttctcccccccacgtaggagattttattcaactaaggcacaggcatattaaaagactttcagtataaggaaaaggggtagtttattccctccaaatttgactacagctcgaaattgtctttattaatgcaaagttcttttgtcaccttgactttgggacactgttaccaaacctcgtgggaaatatcaagttccagaagattgaatacatgcaggaaacaaatgttttttgggccctagagtgaacatttggtccatatgaaaatgaccaggaagacaattaggtgaaggttttttaatgatttgtgctacgtcagtctcttcccataagacatattcaaagttttaacttttccttaagaggcttccatggggagcaagcatttgataattcatcctttaagaaaaacaccaccgtacactgcttgaagagttcctcttctattacttaaaacgtttttattgtgcaacatttaaggcatacaaaaacatataaagaataccatgatgaaaatctatgactgtattaccaagcttaagaaataaaacagttgagtgatctctcatttatgactaaattaacttattaaaaccattaaaacttttggattattcctgttaa

SEQ ID NO: 114284 - DNA, 375 bp, Artificial Sequence
  derived and/or modified sequence
atggagtcttgctcagtcgcccaggctggagtgctaacctctcctttcatgtggagatggacagggatggcaggagcactgagtgctcttgacaacaccattgaagatgatgctgacgatcagctaccctgtggagaaggcaggccaggctgggtgagaggggagctccttggaagtcagggggtctgtaaggacagcaaggatctctttgtcccaacctccagcagcctttatgggtgcttctgtgttggccttgtttctgggatggccatctcagtgctgttgctggctagcgatttcagaaaactagatttttctaggcctgagccctgttttgagaaagaagcttccctctggtttgtagctcaacattaa

SEQ ID NO: 114285 - DNA, 375 bp, Artificial Sequence
  derived and/or modified sequence
atggagagctgcagcgtggcccaggccggcgtgctgaccagccccttcatgtggagatggaccggcatggccggcgccctgagcgccctggacaacaccatcgaggacgacgccgacgaccagctgccctgcggcgagggcagacccggctgggtgagaggcgagctgctgggcagccagggcgtgtgcaaggacagcaaggacctgttcgtgcccaccagcagcagcctgtacggctgcttctgcgtgggcctggtgagcggcatggccatcagcgtgctgctgctggccagcgacttcagaaagctggacttcagcagacccgagccctgcttcgagaaggaggccagcctgtggttcgtggcccagcactag

SEQ ID NO: 114286 - DNA, 375 bp, Artificial Sequence
  derived and/or modified sequence
atggagtcatgctctgttgcacaagcaggagttctgaccagcccgtttatgtggcgctggaccggtatggcaggggccttgtctgccctggacaacactattgaggacgacgccgacgatcaacttccgtgcggcgagggtaggccgggatgggtgcggggggagctcttaggaagccaaggcgtgtgcaaagatagcaaggatctctttgtaccaacctccagttccctctatggttgcttctgtgtcgggctggtttccggaatggccatatctgtcctcctgctcgcctccgattttcgcaaactggactttagtcgccccgagccatgcttcgaaaaagaggcctctttgtggtttgtggcgcaacattag

SEQ ID NO: 114287 - DNA, 375 bp, Artificial Sequence
  derived and/or modified sequence
atggaatcttgctcagttgcccaggctggagtgctgacgagcccctttatgtggagatggacaggtatggccggggcactgagtgcacttgacaacacaatcgaagacgacgccgacgaccagctgccatgtggagaagggcgcccgggctgggtgcgaggcgaactcctcggtagccagggtgtgtgtaaggactctaaggacctgtttgtgcccacctcctcaagtctgtatggatgcttttgtgtgggattggtgtctggcatggccattagcgttcttctcctggcgtccgattttcggaagttagatttttctcgtcctgaaccatgctttgagaaagaggctagcctatggtttgttgcgcaacattag

SEQ ID NO: 114288 - DNA, 375 bp, Artificial Sequence
  derived and/or modified sequence
atggagtcctgcagcgtggcacaagccggagtcctcacttcgccttttatgtggagatggacgggcatggcgggagcactgagcgccctcgataacacaatcgaagacgacgccgacgaccagctgccctgcggggaggggcgccctgggtgggtgaggggtgaactgcttggatctcagggagtgtgtaaggacagtaaggatctgttcgttccaacttcaagtagcctttacggatgtttttgcgtggggctggtttctggcatggcgatttccgtcctgctcctggcgtcagatttccgcaaacttgacttctctcgtcccgagccctgttttgagaaggaggccagcctgtggtttgttgctcagcactag

SEQ ID NO: 114289 - DNA, 375 bp, Artificial Sequence
  derived and/or modified sequence
atggagagctgcagcgtggcccaggccggcgtgctgaccagccccttcatgtggcgctggacaggcatggccggggccctgagcgccctggacaacaccattgaagatgatgctgatgaccagctgccctgtggggagggccggcccggctgggtgcggggggagctgctgggcagccagggcgtgtgcaaggacagcaaggacctgtttgtgcccaccagcagcagcctgtatggctgcttctgtgtgggcctggtgtctggcatggccatctctgtgctgctgctggccagtgacttcaggaagctggacttcagcaggcctgagccctgctttgagaaggaggccagcctgtggtttgtggcccagcactag

SEQ ID NO: 114290 - DNA, 375 bp, Artificial Sequence
  derived and/or modified sequence
atggagagctgcagcgtggcccaggccggcgtgctgaccagcccctttatgtggaggtggacaggcatggccggggcactttccgcgctcgataacacaattgaggacgatgcagacgaccagctaccttgtggcgaaggacgtcccgggtgggtgcgcggagaactccttggctcccaaggggtctgcaaagattcaaaggatttattcgtgccaacatcttcctccctgtatggctgcttttgcgtggggttggttagcggtatggcaatttctgtgctgttgttagcttctgactttcggaaactggacttttccagaccagaaccctgtttcgagaaggaggctagcctctggttcgtagctcagcattag

SEQ ID NO: 114291 - DNA, 375 bp, Artificial Sequence
  derived and/or modified sequence
atggagagctgcagcgtggcccaggccggcgtgctgaccagcccctttatgtggagatggaccggaatggccggtgcgctatcagcactggataacacaatcgaagacgacgccgacgatcagctgccttgtggtgaaggcaggccgggctgggtgagaggcgagctgctgggcagccagggggtttgcaaagactccaaggatctgtttgtgcctactagtagcagcctgtacggttgtttctgtgttggtctggtgtctggaatggctatatccgttctcctgctcgcctccgactttcgcaagctcgatttttccaggcccgagccatgctttgagaaggaagccagtctgtggttcgttgctcagcattag

SEQ ID NO: 114292 - DNA, 375 bp, Artificial Sequence
  derived and/or modified sequence
atggagagctgcagcgtggcccaggccggcgtgctgaccagcccctttatgtggcgttggactgggatggctggagccctgagcgctctggataacaccatcgaggatgacgcggacgaccagctgccctgcggagaggggagaccagggtgggtgcggggcgaactgctgggctctcagggggtatgcaaggatagcaaggacctgttcgtacccaccagttcatccctttatggctgcttttgtgtgggcctagtatctggcatggctatctccgttctgctcttagcctctgacttcagaaaattggacttcagtagaccggagccctgcttcgaaaaggaagcatcgctgtggtttgtcgcccaacactag

SEQ ID NO: 114293 - DNA, 375 bp, Artificial Sequence
  derived and/or modified sequence
atggagtcttgttccgttgcccaggccggagtactgacctctcccttcatgtggcgttggaccgggatggctggggctttatccgcattggacaatacaatagaagatgatgccgatgatcagctgccgtgcggagagggcagacccggatgggtgcgcggtgagctattgggatcccagggtgtctgtaaagactccaaggatctgttcgtaccaacatcctctagcctatacgggtgcttctgcgtgggcctagtttctggcatggccatcagtgtgcttctcttagctagtgattttcggaagctagattttagccggcctgaaccgtgtttcgaaaaggaggcctcactatggttcgttgcccagcattag

SEQ ID NO: 114294 - DNA, 375 bp, Artificial Sequence
  derived and/or modified sequence
atggagtcatgtagcgtggcccaggcaggagtcttgacttccccattcatgtggcgatggacaggcatggcaggagctctgagtgcccttgataatacgatcgaggatgacgccgatgaccagcttccctgtggtgaggggagacccggatgggtgcgcggagagctccttggctctcagggcgtgtgcaaagacagcaaagacttgttcgtgccgacctcatcttctctatacgggtgtttctgcgtgggtttagtctctggtatggccatttccgtcctgctcctggcgagcgattttcgcaaacttgatttttcaagacccgagccttgtttcgagaaagaagccagtctgtggtttgtggcccaacattag

SEQ ID NO: 114295 - DNA, 375 bp, Artificial Sequence
  derived and/or modified sequence
atggaatcatgcagcgtggctcaggcaggggttcttactagtccctttatgtggagatggacaggcatggccggagccctctccgcactggacaacacaattgaagatgacgccgacgaccagctgccgtgcggggagggaagacccggttgggtccgcggtgagttgctgggtagtcagggagtgtgcaaggacagtaaagacctgtttgtccctacatcctcctccctgtacggatgcttttgtgtgggactcgtatctgggatggcaatatctgtgctgcttctggcatccgacttcaggaagttggatttcagcaggcctgagccctgttttgagaaagaggctagcctgtggttcgtggcacagcactag

SEQ ID NO: 114296 - protein, 178 aa, Artificial Sequence
  derived and/or modified sequence
MEGSPAGPIEQKEARWESSWEEQPDWTLGCLSPESHTNHVALRDTGNQLIVTMSCLTKEDTGWYWCGIQRDFARDDMDFTELIVTDDKGTLANDFWSGKDLSGNKTRSCKAPKVVRKADRSRTSILIICILITGLGIISVISHLTKRRRSQRNRRVGNTLKPFSRVLTPKEMAPTEQM

SEQ ID NO: 114297 - protein, 172 aa, Artificial Sequence
  derived and/or modified sequence
GPIEQKEARWESSWEEQPDWTLGCLSPESHTNHVALRDTGNQLIVTMSCLTKEDTGWYWCGIQRDFARDDMDFTELIVTDDKGTLANDFWSGKDLSGNKTRSCKAPKVVRKADRSRTSILIICILITGLGIISVISHLTKRRRSQRNRRVGNTLKPFSRVLTPKEMAPTEQM

SEQ ID NO: 114298 - DNA, 537 bp, Artificial Sequence
  derived and/or modified sequence
atggaagggagtcctgcaggcccgattgagcaaaaggaggctcgctgggagtctagctgggaagagcagccggattggaccctaggatgccttagccctgagtcccacactaaccatgtcgccctgagggatacagggaaccagttgatagtgaccatgagctgtctgacaaaagaagacacaggctggtactggtgtggcatacagcgcgattttgctcgggacgacatggatttcacagaactgattgtcactgatgacaaaggcacgctcgctaacgatttttggtcaggcaaggacctgtccggcaataagacaaggtcttgcaaagctccaaaggttgtgagaaaagcggacagatcgaggacttctatcctgattatctgtattttgatcacaggcctgggaatcatatcagtgatatctcacttaacaaaacgccgaaggtcgcagagaaatagacgggttggaaatactttgaagccattctctagggtcctgacgcctaaggagatggcacccaccgagcagatgtag

SEQ ID NO: 114299 - DNA, 348 bp, Artificial Sequence
  derived and/or modified sequence
tagccatcctcccatgtggcactgcattccacactcctggggagccatttctccaccaatcatgttgccctgcgcgataccggcaaccagcttatagttactatgagttgcctaacaaaggaagacaccgggtggtactggtgtggaatccagagggatttcgcccgcgatgacatggattttaccgagctgattgtcacagatgataaaggtacacttgccaatgacttctggagcgggaaggacctctctggaaataagacccgaagttgcaaagcgcccaaagtcgtgagaaaagctgatcgatcccgcactagcatcctgattatctgcattcttatcacatag

SEQ ID NO: 114300 - DNA, 519 bp, Artificial Sequence
  derived and/or modified sequence
ggcccgatcgagcaaaaagaggctaggtgggaatcaagttgggaggagcagccggattggacgctggggtgtctcagcccggaatcccacaccaaccacgtcgcattgcgagatactggcaaccagttgattgtaactatgtcatgtctgacaaaggaggacaccgggtggtactggtgtggcattcaaagagacttcgcccgcgatgatatggacttcacagagctgatcgtcaccgacgacaaaggcaccctggccaatgacttctggtcaggaaaagatttgtccggcaacaaaacacgatcctgtaaagcacctaaggtcgtccgaaaagcagaccgctcaaggacgagcattctgatcatctgcatcctgatcactggattaggcatcatctccgtgataagccatttgactaagcgaaggagatcacagcggaacaggcgcgtgggcaacacactgaaaccgttctcgcgagtgctcacacccaaggagatggcacctacagaacaaatgtag

SEQ ID NO: 114301 - DNA, 897 bp, Artificial Sequence
  derived and/or modified sequence
ggtagagaccaccagttggaccaatggaagggtctccagcaggacccattgagcagaaggaggccaggtgggaaagctcctgggaagagcagccagactggacactgggctgcttgagtcctgagtcacacaccaatcatgtggccctgagggacacagggaaccagctcattgtcactatgtcctgcctgaccaaagaggacacgggctggtactggtgtggcatccagcgggactttgccagggatgacatggattttacagagctgattgtaactgacgacaaaggaaccctggccaatgacttttggtctgggaaagacctatcaggcaacaaaaccagaagctgcaaggctcccaaagttgtccgcaaggctgaccgctccaggacgtccattctcatcatttgcatactgatcacgggtttgggaatcatctctgtaatcagtcatttgaccaaaaggaggagaagtcaaaggaatagaagggtaggcaacactttgaagcccttctcgcgtgtcctgactccaaaggaaatggctcctactgaacagatgtgactgaagatttttttaatttagttcataaagtgatgctacaacagaataatcaccatgacaactggcccacacctcagagactgattctgatctcccaggaattctgaaggaccctctatccttgacaacaatcatttgcagccaggtagcaacggcggtagtcagaggagctatgatagaccacacccaagcaaggctgccctcaaataacatctcaagatcttagttcttatgcattccatcagtcagaagtgaagaagaggtggagaatctggattggggaccaggaaatcacttgtattttgttagccaataaattcctagccagtgttgaatg

SEQ ID NO: 114302 - DNA, 345 bp, Artificial Sequence
  derived and/or modified sequence
ttccttccagtcatgtggctcttcattctactctccttggctctcatttcagcaccaatcatgtggccctgagggacacagggaaccagctcattgtcactatgtcctgcctgaccaaagaggacacgggctggtactggtgtggcatccagcgggactttgccagggatgacatggattttacagagctgattgtaactgacgacaaaggaaccctggccaatgacttttggtctgggaaagacctatcaggcaacaaaaccagaagctgcaaggctcccaaagttgtccgcaaggctgaccgctccaggacgtccattctcatcatttgcatactgatcacgg

SEQ ID NO: 114303 - DNA, 637 bp, Artificial Sequence
  derived and/or modified sequence
ggacccattgagcagaaggaggccaggtgggaaagctcctgggaagagcagccagactggacactgggctgcttgagtcctgagtcacacaccaatcatgtggccctgagggacacagggaaccagctcattgtcactatgtcctgcctgaccaaagaggacacgggctggtactggtgtggcatccagcgggactttgccagggatgacatggattttacagagctgattgtaactgacgacaaaggaaccctggccaatgacttttggtctgggaaagacctatcaggcaacaaaaccagaagctgcaaggctcccaaagttgtccgcaaggctgaccgctccaggacgtccattctcatcatttgcatactgatcacgggtttgggaatcatctctgtaatcagtcatttgaccaaaaggaggagaagtcaaaggaatagaagggtaggcaacactttgaagcccttctcgcgtgtcctgactccaaaggaaatggctcctactgaacagatgtgactgaagatttttttaatttagttcataaagtgatgctacaacagaataatcaccatgacaactggcccacacctcagagactgattctgatctcccaggaattctgaaggaccctcta

SEQ ID NO: 114304 - DNA, 537 bp, Artificial Sequence
  derived and/or modified sequence
atggagggcagccctgctggccccatcgagcagaaggaggcccgctgggagagctcctgggaggagcagcctgactggaccctgggctgcctgagccctgagagccacaccaaccacgtggccctgcgggacaccggcaaccagctgattgtgaccatgagctgcctgaccaaggaggacaccggctggtactggtgtggcatccagagggactttgccagagatgacatggacttcacagagctgattgtgacagatgacaagggcaccctggccaatgacttctggagcggcaaggacctgagcggcaacaagaccaggagctgcaaggcccccaaggtggtgaggaaggctgacaggagcaggaccagcatcctgatcatctgcatcctgatcaccggcctgggcatcatcagcgtcatcagccacctgaccaagagaagaagaagccagaggaacagaagagtgggcaacaccctgaagcccttcagccgggtgctgacccccaaggagatggcccccacagagcagatgtag

SEQ ID NO: 114305 - DNA, 348 bp, Artificial Sequence
  derived and/or modified sequence
tgacccagcagccacgtggccctgcacagcaccctgctgggcagccacttcagcaccaaccacgtggccctgcgggacaccggcaaccagctgattgtgaccatgagctgcctgaccaaggaggacaccggctggtactggtgtggcatccagagggactttgccagagatgacatggacttcacagagctgattgtgacagatgacaagggcaccctggccaatgacttctggagcggcaaggacctgagcggcaacaagaccaggagctgcaaggcccccaaggtggtgaggaaggctgacaggagcaggaccagcatcctgatcatctgcatcctgatcacctag

SEQ ID NO: 114306 - DNA, 519 bp, Artificial Sequence
  derived and/or modified sequence
ggccccatcgagcagaaggaggcccgctgggagagctcctgggaggagcagcctgactggaccctgggctgcctgagccctgagagccacaccaaccacgtggccctgcgggacaccggcaaccagctgattgtgaccatgagctgcctgaccaaggaggacaccggctggtactggtgtggcatccagagggactttgccagagatgacatggacttcacagagctgattgtgacagatgacaagggcaccctggccaatgacttctggagcggcaaggacctgagcggcaacaagaccaggagctgcaaggcccccaaggtggtgaggaaggctgacaggagcaggaccagcatcctgatcatctgcatcctgatcaccggcctgggcatcatcagcgtcatcagccacctgaccaagagaagaagaagccagaggaacagaagagtgggcaacaccctgaagcccttcagccgggtgctgacccccaaggagatggcccccacagagcagatgtag

SEQ ID NO: 114307 - DNA, 537 bp, Artificial Sequence
  derived and/or modified sequence
atggagggcagccccgccggccccatcgagcagaaggaggcccggtgggaatcgagttgggaagagcaaccagactggactctgggctgcctgtcccctgagagccatacaaatcatgtggctctgagagatacgggaaaccagttgatcgttactatgtcatgtctgaccaaagaagacaccggttggtactggtgcggaatccagcgtgactttgctcgcgacgacatggacttcaccgaactgattgtaaccgatgataaggggacactagcaaatgatttctggagcggtaaagatctgtccgggaataagacccgtagctgtaaagctcccaaagtggtgagaaaggcagatcgcagcaggacttcaattctcatcatctgcatccttataaccggcttaggaattattagcgtgatttcacacctgacaaagagacggagaagtcagagaaacagacgggtcggaaataccttaaaacctttcagccgggtgcttactcccaaggagatggcccctactgaacaaatgtag

SEQ ID NO: 114308 - DNA, 348 bp, Artificial Sequence
  derived and/or modified sequence
tgacccagcagccacgtggccctgcacagcaccctgctgggcagccattttagcacaaatcacgtggcactgcgagataccggcaatcaactgattgtcacaatgtcgtgcctgacaaaagaggacacgggctggtattggtgtggaatccaacgggactttgcccgagatgacatggacttcactgagctcatcgtgactgacgataagggtactctagctaatgatttctggagcggcaaggacttatccgggaataagacccgctcatgtaaagcaccgaaagtggtgcgaaaagcagaccgctccaggacttccatcctgataatctgcattttaattacatag

SEQ ID NO: 114309 - DNA, 519 bp, Artificial Sequence
  derived and/or modified sequence
ggccccatcgagcagaaggaggcccggtgggagagcagctgggaggagcagccggactggaccctggggtgcctgtcaccagagagccacaccaaccacgtggctctgagggacaccggaaatcaactgatcgtcacaatgtcttgtctcacaaaggaggataccggctggtactggtgcgggatacagcgggacttcgcccgtgacgacatggattttaccgagttgattgtcacagatgacaagggcacactggccaacgacttttggtcaggcaaggatctgtccgggaacaagaccaggtcctgtaaggcccctaaggtcgtgcgaaaggccgacagatcccgtacatccatattgattatttgcattttaattaccggtctggggatcataagcgtgattagtcacctcacgaagcggaggcgaagccaaagaaacaggcgcgtgggtaatacactgaaacccttttctcgtgtactgacacccaaagagatggccccaaccgaacagatgtag

SEQ ID NO: 114310 - DNA, 537 bp, Artificial Sequence
  derived and/or modified sequence
atggaaggttccccagcaggacccatcgaacagaaggaggccaggtgggaaagttcctgggaggagcaaccggactggactttggggtgtctcagccccgaatctcacacgaatcacgtcgccctgcgcgatacgggcaatcagctgatagtaaccatgtcctgcctgacaaaagaggatacgggttggtactggtgtggtatccaaagggacttcgctagagatgatatggacttcactgaactgatcgtaacagacgacaaaggtaccttggctaacgacttctggagcgggaaagatctttctgggaacaagactagaagctgtaaggctcctaaggttgttcgaaaggctgatagatccaggaccagcattctgattatttgcatcctgatcaccgggcttggcataatcagcgtgattagtcatctcaccaagagacggaggagccagagaaaccggagagtgggaaacacactcaagccttttagccgagtcttgacccctaaggagatggctcctacagaacaaatgtag

SEQ ID NO: 114311 - DNA, 348 bp, Artificial Sequence
  derived and/or modified sequence
tagccctctagccacgtagcactccactccactctcctgggctcccatttcagcacaaaccacgttgctctaagagacacaggaaaccaactgatcgtgacaatgtcatgtctgactaaagaagatacgggctggtattggtgtggcatccaacgggactttgccagggacgacatggatttcacagagctcatagtcacggacgacaaaggaacgctggccaacgatttctggagtgggaaagatcttagcgggaacaagacccggtcctgtaaagcacctaaagtcgtgagaaaggccgaccgctctagaacaagtattctaatcatttgcatactcattacctag

SEQ ID NO: 114312 - DNA, 519 bp, Artificial Sequence
  derived and/or modified sequence
gggccaatcgagcagaaagaggcacgttgggagagctcgtgggaggaacagcctgactggacacttgggtgtctcagcccagagtctcacaccaatcacgtcgcactccgcgatacaggaaaccagctgatcgtcacaatgtcatgtctgacaaaagaggatacgggttggtactggtgcggcatacagcgcgattttgcccgtgacgatatggatttcactgagctgatcgtgacagatgacaagggcactctggctaacgatttctggagcggtaaggatttgagcggcaataaaactagatcctgtaaagcacccaaagttgtccgaaaggcggatagaagcagaacgtccatacttataatctgtattttaatcacagggctgggaatcatctcagtcatctcacacctgacaaaaagaagaaggagtcaacgcaatcgacgcgtgggtaacaccctgaagccattcagtagagtgctgacacccaaagaaatggccccaacagaacagatgtag

SEQ ID NO: 114313 - DNA, 537 bp, Artificial Sequence
  derived and/or modified sequence
atggagggcagccccgccggccccatcgagcagaaggaggccagatgggagagcagctgggaggagcagcccgactggaccctgggctgcctgagccccgagagccacaccaaccacgtggccctgagagacaccggcaaccagctgatcgtgaccatgagctgcctgaccaaggaggacaccggctggtactggtgcggcatccagagagacttcgccagagacgacatggacttcaccgagctgatcgtgaccgacgacaagggcaccctggccaacgacttctggagcggcaaggacctgagcggcaacaagaccagaagctgcaaggcccccaaggtggtgagaaaggccgacagaagcagaaccagcatcctgatcatctgcatcctgatcaccggcctgggcatcatcagcgtgatcagccacctgaccaagagaagaagaagccagagaaacagaagagtgggcaacaccctgaagcccttcagcagagtgctgacccccaaggagatggcccccaccgagcagatgtag

SEQ ID NO: 114314 - DNA, 348 bp, Artificial Sequence
  derived and/or modified sequence
tgacccagcagccacgtggccctgcacagcaccctgctgggcagccacttcagcaccaaccacgtggccctgagagacaccggcaaccagctgatcgtgaccatgagctgcctgaccaaggaggacaccggctggtactggtgcggcatccagagagacttcgccagagacgacatggacttcaccgagctgatcgtgaccgacgacaagggcaccctggccaacgacttctggagcggcaaggacctgagcggcaacaagaccagaagctgcaaggcccccaaggtggtgagaaaggccgacagaagcagaaccagcatcctgatcatctgcatcctgatcacctag

SEQ ID NO: 114315 - DNA, 519 bp, Artificial Sequence
  derived and/or modified sequence
ggccccatcgagcagaaggaggccagatgggagagcagctgggaggagcagcccgactggaccctgggctgcctgagccccgagagccacaccaaccacgtggccctgagagacaccggcaaccagctgatcgtgaccatgagctgcctgaccaaggaggacaccggctggtactggtgcggcatccagagagacttcgccagagacgacatggacttcaccgagctgatcgtgaccgacgacaagggcaccctggccaacgacttctggagcggcaaggacctgagcggcaacaagaccagaagctgcaaggcccccaaggtggtgagaaaggccgacagaagcagaaccagcatcctgatcatctgcatcctgatcaccggcctgggcatcatcagcgtgatcagccacctgaccaagagaagaagaagccagagaaacagaagagtgggcaacaccctgaagcccttcagcagagtgctgacccccaaggagatggcccccaccgagcagatgtag

SEQ ID NO: 114316 - protein, 288 aa, Artificial Sequence
  derived and/or modified sequence
EVKDVLPQEPVRSAVGGTGMSSGASRKSWDPGNPWPPDWPITGRKMKVLWAALLVTFLAGCQAKVEQAVETEPEPELRQQTEWQSGQRWELALGRFWDYLRWVQTLSEQVQEELLSSQVTQELRALMDETMKELKAYKSELEEQLTPVAEETRARLSKELQAAQARLGADMEDVCGRLVQYRGEVQAMLGQSTEELRVRLASHLRKLRKRLLRDADDLQKRLAVYQAGAREGAERGLSAIRERLGPLVEQGRVRAATVGSLAGQPLQERAQAWGERLRARMEEMGSRT

SEQ ID NO: 114317 - DNA, 867 bp, Artificial Sequence
  derived and/or modified sequence
gaggtaaaagacgttctgcctcaagagcctgtccggtccgcagtgggtggtacaggcatgtcaagtggtgcctctaggaagtcttgggatccgggcaatccctggccccctgattggccaatcacgggcagaaagatgaaagtgctgtgggccgctctgctggtgacattcctggcgggatgccaggcaaaggttgagcaggcagtcgagaccgagcctgaacccgaattgcgtcagcagaccgagtggcaatctggacaaagatgggagctggcactgggtaggttctgggattacctgcggtgggttcaaaccctctccgagcaagtgcaggaagagctgttgtctagtcaagtgacgcaagaactccgcgctcttatggacgaaaccatgaaggaactgaaggcgtacaagtctgaacttgaggagcagctcacaccggtggccgaggaaacgcgggcacgtcttagcaaggagttacaggccgcacaggcccgactgggcgcagatatggaggacgtgtgtggcagactggtgcaatataggggtgaagtgcaagctatgctgggccaatctacggaggagttgagagttagacttgccagtcacttgcgaaaattgcggaagaggctcctgagggacgctgatgacttacagaaacgccttgcggtatatcaagcaggcgcgcgtgaaggggccgagaggggactgtccgccattagggaacggctcgggcccctggtggagcagggccgtgttagagcagctactgtggggtccctggcaggacagccactgcaggagagagctcaggcctggggcgagcggttgagggcacgcatggaagagatgggttcaagaacatag

SEQ ID NO: 114318 - DNA, 867 bp, Artificial Sequence
  derived and/or modified sequence
gaggtgaaggatgtgctgccccaggagcctgtgcgctctgctgtgggcggcaccggcatgagcagcggggccagcaggaagtcctgggaccccggcaacccctggcccccagactggcccatcaccggcaggaagatgaaggtgctgtgggccgccctgctggtgaccttcctggccggctgccaggccaaggtggagcaggccgtggagacagagcctgagcctgagctgcggcagcagacagagtggcagagcggccagcgctgggagctggccctgggccgcttctgggactacctgcgctgggtgcagaccctgtctgagcaggtgcaggaggagctgctgagcagccaggtgacccaggagctgcgggccctgatggatgagaccatgaaggagctgaaggcctacaagtctgagctggaggagcagctgacccctgtggccgaggagacccgggcccggctgagcaaggagctgcaggccgcccaggcccggctgggcgctgacatggaggatgtgtgtggccgcctggtgcagtacagaggagaggtgcaggccatgctgggccagagcacagaggagctgcgggtgcggctggccagccacctgaggaagctgaggaagaggctgctgagagatgctgatgacctgcagaagaggctggccgtgtaccaggccggggcccgggagggcgctgagcggggcctgagcgccatccgggagcggctgggccccctggtggagcagggccgggtgcgggccgccaccgtgggcagcctggccggccagcccctgcaggagcgggcccaggcctggggcgagcggctgcgggccaggatggaggagatgggcagcaggacatag

SEQ ID NO: 114319 - DNA, 867 bp, Artificial Sequence
  derived and/or modified sequence
gaggtgaaggacgtgctgccccaggagcccgtgcggagcgccgtgggggggacagggatgtcgtccggcgcttcccgaaagtcctgggatccaggaaatccctggccaccagattggcctatcaccggtagaaaaatgaaggtgctgtgggctgccctgctggtgaccttcctggcaggctgccaggcaaaggtggaacaggctgtggaaacggaacccgaacccgagctcaggcaacagaccgaatggcagtccggtcagcgctgggagcttgcactgggccgtttttgggactatctgcggtgggtgcaaacgttgtcggaacaagtgcaggaagaactgctttcgtctcaagtcacgcaagagctcagagccctgatggatgagaccatgaaggagcttaaggcatacaagtcagagctagaggagcagctgacccctgtcgcagaggaaacacgagccagattgagcaaagaactccaagcagcccaggcacggctgggagccgatatggaagacgtgtgcggtcgccttgttcagtacaggggcgaggttcaggcaatgttagggcagtcaacggaagagctccgggtccggttagccagtcacctccggaaattgaggaagcgtctcctgagagacgcagatgatctgcagaagcgacttgcggtttaccaagcgggtgccagggaaggtgctgaacgcggactgtctgccatcagagagaggcttgggcctttagtggaacagggcagggttcgggctgccactgtgggcagcctcgccggtcagccactccaggagcgggcccaagcttggggagagcgtttaagagcgcgtatggaggagatgggcagcagaacctag

SEQ ID NO: 114320 - DNA, 867 bp, Artificial Sequence
  derived and/or modified sequence
gaagtaaaggacgtgctgccccaggaacctgttaggtcagctgtgggcggaaccggaatgtccagtggggcaagcaggaagtcctgggaccccggaaatccttggccacccgattggcccatcactggccgtaagatgaaggtgttgtgggccgcactgttggtgacttttttagccggttgccaagctaaagttgagcaagccgtcgaaaccgagcctgagccggagctgagacagcaaacagaatggcagtccggccagcgttgggagctggctctcgggcgtttctgggattaccttcggtgggtgcaaaccctgagcgaacaggtgcaggaggaattgttgagctcgcaggtcacccaggaattgagagccctgatggacgagactatgaaagagctcaaggcctataagagcgagctggaagaacaattgactcccgtggcagaggaaacgcgtgccaggttgagtaaggagctccaggcagctcaggcccgactcggtgcagacatggaggacgtatgtggcagactggttcagtataggggcgaagtacaggccatgcttggtcagtcaaccgaagagcttagagtccggttagcctcccaccttcgaaagttaagaaagcggctgctgagggacgcagacgatcttcagaaacggctcgccgtgtaccaggccggagccagggaaggagctgagcgaggcctctctgccattagggagcgcctcggcccactggtagaacagggtagagtgagggccgctactgttggttctctagcaggccagcctctgcaggaacgtgcccaagcctggggggaacgcctgagagctagaatggaggagatgggcagtcgcacgtag

SEQ ID NO: 114321 - DNA, 1263 bp, Artificial Sequence
  derived and/or modified sequence
cctcgtgactgggggctggcccagcccgccctatccctgggggagggggcgggacagggggagccctataattggacaagtctgggatccttgagtcctactcagccccagcggaggtgaaggacgtccttccccaggagccgactggccaatcacaggcaggaagatgaaggttctgtgggctgcgttgctggtcacattcctggcaggatgccaggccaaggtggagcaagcggtggagacagagccggagcccgagctgcgccagcagaccgagtggcagagcggccagcgctgggaactggcactgggtcgcttttgggattacctgcgctgggtgcagacactgtctgagcaggtgcaggaggagctgctcagctcccaggtcacccaggaactgagggcgctgatggacgagaccatgaaggagttgaaggcctacaaatcggaactggaggaacaactgaccccggtggcggaggagacgcgggcacggctgtccaaggagctgcaggcggcgcaggcccggctgggcgcggacatggaggacgtgtgcggccgcctggtgcagtaccgcggcgaggtgcaggccatgctcggccagagcaccgaggagctgcgggtgcgcctcgcctcccacctgcgcaagctgcgtaagcggctcctccgcgatgccgatgacctgcagaagcgcctggcagtgtaccaggccggggcccgcgagggcgccgagcgcggcctcagcgccatccgcgagcgcctggggcccctggtggaacagggccgcgtgcgggccgccactgtgggctccctggccggccagccgctacaggagcgggcccaggcctggggcgagcggctgcgcgcgcggatggaggagatgggcagccggacccgcgaccgcctggacgaggtgaaggagcaggtggcggaggtgcgcgccaagctggaggagcaggcccagcagatacgcctgcaggccgaggccttccaggcccgcctcaagagctggttcgagcccctggtggaagacatgcagcgccagtgggccgggctggtggagaaggtgcaggctgccgtgggcaccagcgccgcccctgtgcccagcgacaatcactgaacgccgaagcctgcagccatgcgaccccacgccaccccgtgcctcctgcctccgcgcagcctgcagcgggagaccctgtccccgccccagccgtcctcctggggtggaccctagtttaataaagattcaccaagtttcacgca

SEQ ID NO: 114322 - DNA, 923 bp, Artificial Sequence
  derived and/or modified sequence
ccgggagaggaagatggaattttctatggaggccgacctggggatggggagataagagaagaccaggagggagttaaatagggaatgggttgggggcggcttggtaaatgtgctgggattaggctgttgcagataatgcaacaaggcttggaaggctaacctggggtgaggccgggttggggccgggctgggggtgggaggagtcctcactggcggttgattgacagtttctccttccccagactggccaatcacaggcaggaagatgaaggttctgtgggctgcgttgctggtcacattcctggcaggatgccaggccaaggtggagcaagcggtggagacagagccggagcccgagctgcgccagcagaccgagtggcagagcggccagcgctgggaactggcactgggtcgcttttgggattacctgcgctgggtgcagacactgtctgagcaggtgcaggaggagctgctcagctcccaggtcacccaggaactgagggcgctgatggacgagaccatgaaggagttgaaggcctacaaatcggaactggaggaacaactgaccccggtggcggaggagacgcgggcacggctgtccaaggagctgcaggcggcgcaggcccggctgggcgcggacatggaggacgtgtgcggccgcctggtgcagtaccgcggcgaggtgcaggccatgctcggccagagcaccgaggagctgcgggtgcgcctcgcctcccacctgcgcaagctgcgtaagcggctcctccgcgatgccgatgacctgcagaagcgcctggcagtgtaccaggccggggcccgcgagggcgccgagcgcggcctcagcgccatccgcgagcgcctggggcccctggtggaacagggccgcgtgcgggccgccactgtgggctccctggccggccagc

SEQ ID NO: 114323 - DNA, 864 bp, Artificial Sequence
  derived and/or modified sequence
gaggtgaaggacgtccttccccaggagccggtgagaagcgcagtcgggggcacggggatgagctcaggggcctctagaaagagctgggaccctgggaacccctggcctccagactggccaatcacaggcaggaagatgaaggttctgtgggctgcgttgctggtcacattcctggcaggatgccaggccaaggtggagcaagcggtggagacagagccggagcccgagctgcgccagcagaccgagtggcagagcggccagcgctgggaactggcactgggtcgcttttgggattacctgcgctgggtgcagacactgtctgagcaggtgcaggaggagctgctcagctcccaggtcacccaggaactgagggcgctgatggacgagaccatgaaggagttgaaggcctacaaatcggaactggaggaacaactgaccccggtggcggaggagacgcgggcacggctgtccaaggagctgcaggcggcgcaggcccggctgggcgcggacatggaggacgtgtgcggccgcctggtgcagtaccgcggcgaggtgcaggccatgctcggccagagcaccgaggagctgcgggtgcgcctcgcctcccacctgcgcaagctgcgtaagcggctcctccgcgatgccgatgacctgcagaagcgcctggcagtgtaccaggccggggcccgcgagggcgccgagcgcggcctcagcgccatccgcgagcgcctggggcccctggtggaacagggccgcgtgcgggccgccactgtgggctccctggccggccagccgctacaggagcgggcccaggcctggggcgagcggctgcgcgcgcggatggaggagatgggcagccggacc

SEQ ID NO: 114324 - DNA, 737 bp, Artificial Sequence
  derived and/or modified sequence
gagtcctactcagccccagcggaggtgaaggacgtccttccccaggagccgtttctccttccccagactggccaatcacaggcaggaagatgaaggttctgtgggctgcgttgctggtcacattcctggcaggatgccaggccaaggtggagcaagcggtggagacagagccggagcccgagctgcgccagcagaccgagtggcagagcggccagcgctgggaactggcactgggtcgcttttgggattacctgcgctgggtgcagacactgtctgagcaggtgcaggaggagctgctcagctcccaggtcacccaggaactgagggcgctgatggacgagaccatgaaggagttgaaggcctacaaatcggaactggaggaacaactgaccccggtggcggaggagacgcgggcacggctgtccaaggagctgcaggcggcgcaggcccggctgggcgcggacatggaggacgtgtgcggccgcctggtgcagtaccgcggcgaggtgcaggccatgctcggccagagcaccgaggagctgcgggtgcgcctcgcctcccacctgcgcaagctgcgtaagcggctcctccgcgatgccgatgacctgcagaagcgcctggcagtgtaccaggccggggcccgcgagggcgccgagcgcggcctcagcgccatccgcgagcgcctggggcccctggtggaacagggccgcgtgcgggccgccactgtgggctccctg

SEQ ID NO: 114325 - DNA, 867 bp, Artificial Sequence
  derived and/or modified sequence
gaagtcaaagatgtgctaccgcaggagccagtgcgatccgcagtgggcggcacaggaatgtcctcaggcgctagccgcaaatcatgggatcccggcaatccatggccaccggactggccgattacgggccgcaaaatgaaagtgctttgggcagccctactggtcacattcctggctggctgccaggccaaggtcgagcaggcagtcgagacggagcccgaaccagagctgagacaacagaccgaatggcaatcaggacagaggtgggaactagcgttggggcggttttgggattatttgcgatgggtccagacactctccgagcaggtacaagaggaactactgtcaagtcaggtaacgcaggaattgcgcgctctgatggatgaaaccatgaaggagctgaaggcatataagtccgagctggaggaacaactcactccggtcgctgaagaaactcgcgcgagactgagcaaggagcttcaggcggcccaagccagacttggtgccgatatggaggatgtgtgtggcagactagtccaatacagaggcgaggtgcaggcaatgctgggtcagagcacggaagagctccgcgttaggctggcctcccatctgaggaagcttagaaagagactactacgggatgccgatgatcttcagaaaaggttggccgtatatcaggctggcgcgcgggaaggagccgagagaggactctctgcaataagagagagattgggccctctggtggaacaggggcgggtcagggctgctaccgtgggttctttggcggggcagcccttacaagaacgggcacaggcttggggcgagcgtttgcgggccagaatggaagagatgggctcaagaacatag

SEQ ID NO: 114326 - DNA, 867 bp, Artificial Sequence
  derived and/or modified sequence
gaagttaaggatgtgctgccacaggaacccgtccggagtgcagttggcgggacaggcatgtcctccggcgcttcaagaaagtcctgggaccctgggaatccttggcccccagattggcctatcaccgggcgcaaaatgaaggtgttgtgggctgcgctcctggtgaccttccttgccggatgtcaggctaaggtcgaacaagctgtcgagacagaaccggaacctgaattgcgtcaacagaccgaatggcaatcaggccagaggtgggaactcgctcttggaagattttgggactacctgcgatgggtacagacattgagtgagcaggtgcaagaagagctcttgtccagccaggttacccaagagcttagggctttaatggatgaaacaatgaaagaacttaaggcatacaaatccgaacttgaggaacagctgacccctgtcgcagaagaaaccagagcccggctgagtaaggaactccaggctgcacaggcaagactgggggctgatatggaagacgtgtgcggtcgactcgtgcaatatcgtggagaggttcaagcgatgctgggacagtctaccgaggagttaagggtacgcctcgcttcccacttgcgcaaactaaggaaacgtcttctcagagacgccgacgacttacaaaagcgactcgccgtgtatcaggccggagcccgagagggggctgagcgaggcctgagcgctattcgggaaagactgggacccttggtagaacaagggagggtgcgcgctgcaactgtagggagcctggctggtcaacccttacaggaaagagcacaggcatggggggagagacttagggcacggatggaggaaatggggtcacgcacttag

SEQ ID NO: 114327 - DNA, 867 bp, Artificial Sequence
  derived and/or modified sequence
gaggtgaaggacgtgctgccccaggagcccgtgagaagcgccgtgggcggcaccggcatgagcagcggcgccagcagaaagagctgggaccccggcaacccctggccccccgactggcccatcaccggcagaaagatgaaggtgctgtgggccgccctgctggtgaccttcctggccggctgccaggccaaggtggagcaggccgtggagaccgagcccgagcccgagctgagacagcagaccgagtggcagagcggccagagatgggagctggccctgggcagattctgggactacctgagatgggtgcagaccctgagcgagcaggtgcaggaggagctgctgagcagccaggtgacccaggagctgagagccctgatggacgagaccatgaaggagctgaaggcctacaagagcgagctggaggagcagctgacccccgtggccgaggagaccagagccagactgagcaaggagctgcaggccgcccaggccagactgggcgccgacatggaggacgtgtgcggcagactggtgcagtacagaggcgaggtgcaggccatgctgggccagagcaccgaggagctgagagtgagactggccagccacctgagaaagctgagaaagagactgctgagagacgccgacgacctgcagaagagactggccgtgtaccaggccggcgccagagagggcgccgagagaggcctgagcgccatcagagagagactgggccccctggtggagcagggcagagtgagagccgccaccgtgggcagcctggccggccagcccctgcaggagagagcccaggcctggggcgagagactgagagccagaatggaggagatgggcagcagaacctag

SEQ ID NO: 114328 - protein, 317 aa, Artificial Sequence [sequence omitted]

SEQ ID NO: 114329 - protein, 219 aa, Artificial Sequence
  derived and/or modified sequence
MKVLWAALLVTFLAGCQAKVEQAVETEPEPELRQQTEWQSGQRWELALGRFWDYLRWVQTLSEQVQEELLSSQVTQELRALMDETMKELKAYKSELEEQLTPVAEETRARLSKELQAAQARLGADMEDVCGRLVQYRGEVQAMLGQSTEELRVRLASHLRKLRKRLLRDADDLQKRLAVYQAGAREGAERGLSAIRERLGPLVEQGRVRAATVGSLAGQ

SEQ ID NO: 114330 - protein, 216 aa, Artificial Sequence
  derived and/or modified sequence
MKVLWAALLVTFLAGCQAKVEQAVETEPEPELRQQTEWQSGQRWELALGRFWDYLRWVQTLSEQVQEELLSSQVTQELRALMDETMKELKAYKSELEEQLTPVAEETRARLSKELQAAQARLGADMEDVCGRLVQYRGEVQAMLGQSTEELRVRLASHLRKLRKRLLRDADDLQKRLAVYQAGAREGAERGLSAIRERLGPLVEQGRVRAATVGSL

SEQ ID NO: 114331 - DNA, 954 bp, Artificial Sequence
  derived and/or modified sequence
atgaaggtgctgtgggccgctcttttggtgacattccttgcaggctgtcaagctaaggtggagcaggctgtggagacagagcctgaaccagagttgagacagcagaccgaatggcagtccgggcagcggtgggagttggccttgggaaggttttgggattacctgcggtgggtgcagaccttaagcgagcaagttcaagaggaactcctgtcctctcaagttacccaggagcttcgggccttaatggatgaaacaatgaaagagcttaaggcctacaagagcgagctcgaggagcagctgacgccagtggccgaggagacacgggcacgactctctaaagagctgcaggcagcacaggcccgactaggagcggacatggaggatgtatgcgggcgcttagtgcaatatagaggtgaggtccaggctatgctcggccagagcacagaggagcttcgagtaagactcgcctcacatttaaggaagctccggaagcgcctcttgcgcgacgccgacgacctgcaaaaaagactagcggtgtatcaagcaggggcgagagaaggcgccgagcgcgggctctcagccatccgtgaacgcctggggccccttgttgagcagggaagggtgcgtgcagccacagtagggtctctggctgggcaaccactgcaggagcgagctcaagcttggggtgagcgtcttcgcgcccgcatggaagaaatgggttctaggacacgggataggcttgatgaagtgaaagagcaggtggcggaagtccgggccaagctcgaagagcaagcacaacagattagactccaggcagaggcattccaggctcggctgaaatcttggttcgaaccattagtggaggacatgcagcggcagtgggccggattggtggagaaggtgcaggcagccgtgggtacatcggctgccccggtgcccagcgacaatcactag

SEQ ID NO: 114332 - DNA, 660 bp, Artificial Sequence
  derived and/or modified sequence
atgaaggtgttatgggccgctctgctcgtcaccttcctggccggatgccaggccaaggtggaacaggccgtggaaacagaacccgagcccgaactccggcaacagactgaatggcagagcgggcagcggtgggagctggcgcttgggcggttctgggattacctcaggtgggtgcagactctgtccgagcaggtgcaggaggagcttctgagctcccaggtgacccaagagctccgggcattgatggacgaaaccatgaaggagctgaaggcttataaaagcgaattggaagagcagttgacacccgtagccgaagaaacccgagcaaggctaagcaaagagctgcaggctgcccaggcacgactcggcgcggatatggaagatgtctgcggcagacttgtgcagtacaggggagaagtccaggcaatgctgggacaatctacagaggaattacgggttagacttgcaagtcacttgcgcaagttgagaaagcgtctcctgcgcgacgctgatgacctgcaaaaacggcttgccgtttatcaagctggggccagagagggggcagagcgggggctgagtgccatacgagagaggctggggccactcgtggaacaggggcgggttagggccgccaccgtggggagtttagcaggacagtag

SEQ ID NO: 114333 - DNA, 651 bp, Artificial Sequence
  derived and/or modified sequence
atgaaggtgctctgggcggctttgctcgtgacatttcttgctggctgccaggcaaaggttgagcaggccgtcgagacagaaccggaacccgaacttagacaacaaactgagtggcaatctggacagagatgggagctcgcattgggacggttctgggattacctccggtgggtgcaaaccctgtccgagcaggtgcaggaagagcttctctcttcccaagtgactcaggaactccgggctcttatggacgaaactatgaaggaattaaaagcttacaaaagcgagcttgaggaacagctcactcccgtggcggaggagactagagcccgcttgtccaaagagctacaggcggcacaagcacgccttggcgcagacatggaggatgtgtgtggaagactcgttcagtatcggggtgaagtacaggctatgctgggacagtcaactgaagaactccgagttagactcgcaagccatctcaggaagctgaggaagagacttttacgcgatgcagatgacctccagaagcgcttggccgtataccaggccggcgctagagagggtgccgaaaggggcctgtcggcaattcgggagcgcctgggaccattagtagagcagggtagggttcgagctgccacagtggggtcactgtag

SEQ ID NO: 114334 - DNA, 954 bp, Artificial Sequence
  derived and/or modified sequence
atgaaggtgctgtgggccgccctgctggtgaccttcctggccggctgccaggccaaggtggagcaggccgtggagacagagcctgagcctgagctgcggcagcagacagagtggcagagcggccagcgctgggagctggccctgggccgcttctgggactacctgcgctgggtgcagaccctgtctgagcaggtgcaggaggagctgctgagcagccaggtgacccaggagctgcgggccctgatggatgagaccatgaaggagctgaaggcctacaagtctgagctggaggagcagctgacccctgtggccgaggagacccgggcccggctgagcaaggagctgcaggccgcccaggcccggctgggcgctgacatggaggatgtgtgtggccgcctggtgcagtacagaggagaggtgcaggccatgctgggccagagcacagaggagctgcgggtgcggctggccagccacctgaggaagctgaggaagaggctgctgagagatgctgatgacctgcagaagaggctggccgtgtaccaggccggggcccgggagggcgctgagcggggcctgagcgccatccgggagcggctgggccccctggtggagcagggccgggtgcgggccgccaccgtgggcagcctggccggccagcccctgcaggagcgggcccaggcctggggcgagcggctgcgggccaggatggaggagatgggcagcaggacccgggaccggctggatgaggtgaaggagcaggtggccgaggtgcgggccaagctggaggagcaggcccagcagatccggctgcaggccgaggccttccaggcccggctgaagtcctggtttgagcccctggtggaggacatgcagaggcagtgggccggcctggtggagaaggtgcaggccgctgtgggcaccagcgctgcccctgtgcccagcgacaaccactag

SEQ ID NO: 114335 - DNA, 660 bp, Artificial Sequence
  derived and/or modified sequence
atgaaggtgctgtgggccgccctgctggtgaccttcctggccggctgccaggccaaggtggagcaggccgtggagacagagcctgagcctgagctgcggcagcagacagagtggcagagcggccagcgctgggagctggccctgggccgcttctgggactacctgcgctgggtgcagaccctgtctgagcaggtgcaggaggagctgctgagcagccaggtgacccaggagctgcgggccctgatggatgagaccatgaaggagctgaaggcctacaagtctgagctggaggagcagctgacccctgtggccgaggagacccgggcccggctgagcaaggagctgcaggccgcccaggcccggctgggcgctgacatggaggatgtgtgtggccgcctggtgcagtacagaggagaggtgcaggccatgctgggccagagcacagaggagctgcgggtgcggctggccagccacctgaggaagctgaggaagaggctgctgagagatgctgatgacctgcagaagaggctggccgtgtaccaggccggggcccgggagggcgctgagcggggcctgagcgccatccgggagcggctgggccccctggtggagcagggccgggtgcgggccgccaccgtgggcagcctggccggccagtag

SEQ ID NO: 114336 - DNA, 651 bp, Artificial Sequence
  derived and/or modified sequence
atgaaggtgctgtgggccgccctgctggtgaccttcctggccggctgccaggccaaggtggagcaggccgtggagacagagcctgagcctgagctgcggcagcagacagagtggcagagcggccagcgctgggagctggccctgggccgcttctgggactacctgcgctgggtgcagaccctgtctgagcaggtgcaggaggagctgctgagcagccaggtgacccaggagctgcgggccctgatggatgagaccatgaaggagctgaaggcctacaagtctgagctggaggagcagctgacccctgtggccgaggagacccgggcccggctgagcaaggagctgcaggccgcccaggcccggctgggcgctgacatggaggatgtgtgtggccgcctggtgcagtacagaggagaggtgcaggccatgctgggccagagcacagaggagctgcgggtgcggctggccagccacctgaggaagctgaggaagaggctgctgagagatgctgatgacctgcagaagaggctggccgtgtaccaggccggggcccgggagggcgctgagcggggcctgagcgccatccgggagcggctgggccccctggtggagcagggccgggtgcgggccgccaccgtgggcagcctgtag

SEQ ID NO: 114337 - DNA, 954 bp, Artificial Sequence
  derived and/or modified sequence
atgaaggtgctgtgggccgccctgctggtgaccttcctggccggctgccaggctaaggtggagcaggctgtcgagaccgagcccgaacctgaactccggcagcagaccgagtggcagagcgggcagcggtgggaactggccttgggcaggttttgggattacctcagatgggtccagactctaagtgaacaggtgcaagaggaactgctgtcatcacaggtaacacaggaactgagggcgcttatggatgagaccatgaaagagctgaaagcttataaaagcgaactagaagagcagctcacccctgtagccgaagagacaagggccagactgtcaaaggaattgcaggctgctcaggctcggttaggcgccgatatggaggatgtgtgtggtcgcctggtccagtatcgcggggaagtgcaggcgatgctggggcaatccacggaggagttgcgtgtgcgtctggccagccatttgaggaagctgcggaaacgtctgctgagggatgccgatgacttgcagaaaaggctagcagtgtaccaagcgggagccagagagggagcggagcgtgggctgagcgctatccgcgagcgcctcggcccactcgtagagcaagggcgcgtgcgcgctgctactgtggggagcttggctggccagccactgcaggaacgcgcccaggcctggggggagcgcctgcgggcccgcatggaggagatgggtagtagaacccgcgaccgtctcgatgaggtaaaggaacaagtggcagaagttagagccaagctggaggaacaggcccaacagatccgactccaagcagaagcattccaggcaagactgaagtcatggttcgaacccctggtagaagacatgcaaaggcaatgggctgggttagttgaaaaagtgcaggccgccgttggaacatccgccgcacctgtgccttctgataatcattag

SEQ ID NO: 114338 - DNA, 660 bp, Artificial Sequence
  derived and/or modified sequence
atgaaggtgctgtgggccgccctgctggtgaccttcctggccggctgccaagccaaagtagagcaggcagtggaaactgagcccgaaccagaattgcgacaacagaccgagtggcagagcggccagcgctgggagctcgctcttgggcggttctgggactatctccggtgggtgcagacgctttccgagcaggtgcaggaagaactgctttcaagccaggtaactcaggagttgcgggcactcatggacgaaaccatgaaggagctgaaagcttataaaagtgagctggaggagcagttgactccagtagcggaagagacacgagctcggctgtccaaggagctacaggccgcacaggcgcgtttgggggccgacatggaggatgtgtgcgggcggttggtgcagtatcggggagaagtgcaggcaatgttgggccaaagcacagaggagctccgagtgcgcctggctagtcacctgcggaaactgcggaagaggctccttcgcgatgcagatgacctgcaaaagagactggccgtgtaccaggccggggcccgcgagggggccgaacgcggcttgtctgcaatccgggagaggctgggaccgctagtggaacagggacgggtgagagctgccacagtggggagtctggcaggtcagtag

SEQ ID NO: 114339 - DNA, 651 bp, Artificial Sequence
  derived and/or modified sequence
atgaaggtgctgtgggccgccctgctggtgaccttcctggccggctgtcaggctaaggtcgagcaggcagtagagactgagccagagccagaactgcgccagcagacagaatggcagagtggtcagaggtgggagttggctctcggaagattttgggattacctccgatgggttcagactctcagtgagcaagtgcaagaggaactccttagctctcaggtcacacaggagctgcgggccctgatggacgaaacaatgaaggaactgaaagcatataaaagtgaattagaagaacagctgacgccagtggcagaggagaccagggccagactgagtaaggaactacaggccgcccaagcaagactgggtgccgacatggaagatgtgtgtgggaggctcgtgcaatatcggggcgaggttcaggctatgctgggacaatcaacagaagaactgagagtccggcttgcgagccaccttcgcaagcttcgcaaacgcttattacgcgacgccgacgatctgcagaaaagactcgccgtgtaccaggccggtgcgagggaaggagccgagcgtggtctgtcagccatcagggaaaggttaggaccactagtggaacagggtcgggtccgagctgctactgtcgggtccctgtag

SEQ ID NO: 114340 - DNA, 954 bp, Artificial Sequence
  derived and/or modified sequence
atgaaagtgttatgggccgcactgctggtaaccttccttgctggttgccaagcaaaggtcgagcaggctgtggagaccgagccagagcctgaactgaggcagcagacagagtggcaaagtggccagcgttgggagctggccttaggcagattctgggactacttacgctgggtgcaaaccctgagcgaacaggtacaggaagagctcttgagttctcaggtcacccaggagctccgcgcattgatggacgagacgatgaaggagctcaaggcttataaatcagaactggaagagcagctcaccccagtcgccgaagaaacgagggcacggctatctaaagaacttcaggccgctcaggctcgtctgggcgcagatatggaggacgtgtgtgggaggctggtgcagtaccgtggcgaggttcaggccatgctggggcagtctacggaggagctacgggtgagactggcctcacatctgcggaagttgaggaaaagattgttgcgagacgccgatgaccttcagaaacgactggctgtgtaccaagccggagcacgggaaggcgctgaacggggattaagcgcgatccgagaaaggctgggccctttagttgagcaggggagggtgcgagccgcaactgtgggctcgctggcaggacagccgttgcaggagagggcacaggcatggggagaacggttgcgggctaggatggaggaaatggggtcacgtacgagagatagacttgatgaggttaaagaacaggtcgccgaggtccgggctaagctggaggagcaggctcagcaaattagattacaggccgaggcttttcaggctagactgaagagctggtttgaacccctggtggaagacatgcaaagacaatgggctggattggtggagaaggtacaggctgctgttggaaccagtgctgctccagtaccttccgacaaccattag

SEQ ID NO: 114341 - DNA, 660 bp, Artificial Sequence
  derived and/or modified sequence
atgaaagtgctgtgggccgctctgctagtgacattcctggctggttgccaggctaaggtggaacaggccgtggagaccgaacccgaaccagaactccgtcagcagacagagtggcaatccggtcaaaggtgggaactggccctaggcagattctgggattatttgcgctgggttcaaacactgtccgaacaggtgcaggaggaactgctgtcctctcaggtcacacaggagcttagagcactaatggatgagacaatgaaggagctcaaagcctataagtctgagctcgaagaacagctcacccctgttgcagaagagactagggccagactatccaaggaactccaggctgcccaggccagattgggggcagacatggaagatgtgtgcggcaggctagtgcagtaccgaggcgaggttcaagccatgctgggacagtccactgaagaattgagagtgagactggcgtctcatctgcgcaaactgcgaaagcggctgttgcgggatgccgacgatcttcagaaaagactagctgtgtatcaggctggtgctcgggagggcgctgaacgcggtcttagcgcaattcgggaacgtctgggaccactcgtcgagcagggacgtgtgcgggctgctaccgtagggtctttagcgggtcagtag

SEQ ID NO: 114342 - DNA, 651 bp, Artificial Sequence
  derived and/or modified sequence
atgaaggtactgtgggccgcactcttggttacattcctggcaggctgccaggccaaggtggagcaagccgtggaaacagagcccgaacctgagcttcggcagcagacagagtggcaaagtggacaacgctgggagctcgctctcgggaggttctgggactatcttcgttgggtgcaaaccctttccgaacaggtgcaggaagaactgctatcctcgcaagtgacacaggagcttagggctctgatggatgaaaccatgaaggaattgaaagcctataaatctgagttagaggaacagcttacaccagtggccgaggagacccgcgcacgactcagcaaggagctacaggccgctcaggctcgcctgggagcagacatggaggatgtttgcggccgtctggtgcagtaccgtggtgaggttcaggcaatgctgggacaaagcacggaagaactcagggtgcggctcgcttctcacctgagaaaattgcgcaagcgtctgctccgcgatgccgatgatctgcagaaaagactggctgtgtaccaggcaggtgccagagagggtgctgagcgcggtctgtcggccatcagagagagattaggaccactcgtcgaacagggccgagtgagggctgccaccgtaggctctctgtag

SEQ ID NO: 114343 - DNA, 954 bp, Artificial Sequence
  derived and/or modified sequence
atgaaggtcctctgggcagcactgctggtgacattcctggctggctgtcaggctaaagttgagcaagctgtcgagacagaacctgagcccgagctgaggcagcagaccgagtggcagtcaggccagagatgggagttagccctggggaggttttgggattacctgcggtgggtacagacactgagtgaacaggtccaggaggaattgctgtcgtcacaggtgacacaggagcttagagcactgatggatgaaacgatgaaggagctaaaggcgtacaagagcgagcttgaagagcaactgacccccgtcgccgaagagaccagggcccggctttccaaggagctacaagcggcccaggccagactcggagccgatatggaggacgtgtgcggacgactggtgcagtacaggggcgaagtgcaagcgatgctcgggcagtctaccgaggaactgcgggtcagactggcaagtcacctgcgaaaacttagaaaaagattattgagagatgccgacgacctgcagaagagactcgccgtttatcaggctggcgctagggaaggcgctgaaagaggactcagcgcaattcgggagagactggggcctttggtggagcagggaagagttagagcagcgaccgtgggatcgctcgcgggacagcctctccaggagagagcccaggcctggggtgagagattacgggccaggatggaggagatgggcagccggacaagagatcgcttggacgaagtgaaggagcaggtcgcggaagtcagagctaaattggaagagcaggctcagcagattaggctacaggccgaagcctttcaggcgagactgaaaagttggttcgagccccttgtggaggacatgcagagacaatgggctggattagtggaaaaagtgcaagctgcagtgggaacctcagctgctcccgtcccctctgacaaccactag

SEQ ID NO: 114344 - DNA, 660 bp, Artificial Sequence
  derived and/or modified sequence
atgaaggtactttgggcagcattattagttacgttcctggcgggatgccaggccaaggtcgaacaagccgttgagacagaaccggagccagaactgcgtcagcagactgaatggcagagtggtcagcgttgggagctagcactaggcagattttgggactacctgcgctgggtgcagactttatcggaacaggtccaggaggagctcttatcctcacaagtcacccaggaactcagggccctgatggacgagacaatgaaggaactgaaggcctataaatccgaactcgaggagcaacttacaccagtggctgaggagacgagggccagactgtccaaggaactgcaggcagcccaagcacgtctgggagcagatatggaagacgtatgtggacggcttgtccaatatcgcggggaggtccaagccatgctggggcagtctaccgaggagcttagggtgcgattagccagccacctgaggaaactgcgaaaaaggttactcagagacgccgacgacttgcagaaaaggcttgccgtctaccaggccggagcacgcgaaggggccgaaaggggcctgagcgcaatcagggaacgcctgggtccactagtggagcagggccgcgtcagagccgcgaccgtcgggtccctggcagggcagtag

SEQ ID NO: 114345 - DNA, 651 bp, Artificial Sequence
  derived and/or modified sequence
atgaaagtactgtgggcagccttgctcgtgacgtttttggcgggttgccaagccaaagtcgaacaagcagtcgagacagagcctgaacctgagcttcgacagcagaccgagtggcagagtggccagaggtgggaacttgctctcggacgtttctgggattatttgcgttgggttcagacgctaagtgaacaagttcaggaagagcttttaagctcccaggtgactcaggagttgcgtgccttgatggatgaaacaatgaaggaactgaaggcatataagagcgagttggaagaacagttgaccccagtggctgaggaaactcgggcccgattgtctaaggaactgcaggccgcccaagcaagactcggcgctgacatggaagacgtctgcgggcgtctagtgcagtatagaggtgaggtgcaagctatgcttggccagtccactgaagagttaagagtgagactagcaagtcacttgaggaaactgagaaaacgccttctgcgcgatgctgacgatctgcaaaaacgattggctgtgtaccaggcaggagcgagagagggcgctgaacgcgggctgtctgcaattagggagagactcggtcccttagtagaacaagggagggtccgggcggctacggttggttcattgtag

SEQ ID NO: 114346 - DNA, 954 bp, Artificial Sequence
  derived and/or modified sequence
atgaaagttctgtgggccgctctgttggtaacctttctggccggatgtcaagccaaggttgagcaagctgtggaaaccgaaccagaaccagaacttagacagcaaaccgagtggcaatcgggacagcgctgggagctggcccttggccgcttttgggactatctacgctgggtacagaccctatcagaacaggtgcaagaagaactgcttagctcccaggtgacacaagaactgagagccctgatggatgagaccatgaaagagctgaaggcatataaatctgaattggaggagcaactaacgcccgtagccgaagagacacgggctagactcagcaaggagctacaggctgcccaagcgaggttgggggcagatatggaggatgtttgtggacgactggtgcagtatagaggagaagtgcaggctatgttgggacagtctactgaagaattgcgggtaagactcgccagccacctcagaaaactgcggaagagactgttaagagatgcagatgatctccagaaacgcttggctgtctaccaggccggggcacgggaaggcgccgaacgcggcttaagtgctatcagagaacgcttagggcctttggtggagcagggaagagttagagcagcgaccgtgggatcgctcgcgggacagcctctccaggagagagcccaggcctggggtgagagattacgggccaggatggaggagatgggcagccggacaagagatcgcttggacgaagtgaaggagcaggtcgcggaagtcagagctaaattggaagagcaggctcagcagattaggctacaggccgaagcctttcaggcgagactgaaaagttggttcgagccccttgtggaggacatgcagagacaatgggctggattagtggaaaaagttcaagccgccgtaggtacctccgcagcacccgtgccaagtgacaatcattag

SEQ ID NO: 114347 - DNA, 660 bp, Artificial Sequence
  derived and/or modified sequence
atgaaggtactttgggcagcattattagttacgttcctggcgggatgccaggccaaggtcgaacaagccgttgagacagaaccggagccagaactgcgtcagcagactgaatggcagagtggtcagcgttgggagctagcactaggcagattttgggactacctgcgctgggtgcagactttatcggaacaggtccaggaggagctcttatcctcacaagtcacccaggaactcagggccctgatggacgagacaatgaaggaactgaaggcctataaatccgaactcgaggagcaacttacacctgttgccgaagaaacacgagccagactcagtaaagagctgcaagctgcacaggcccgacttggagcagacatggaggacgtgtgcggtcgtctagtacaatacagaggcgaagttcaagcaatgctgggtcagagcacagaagagttacgagtgagactggcttctcacctgcggaagctgcgaaaaagacttctgcgcgacgccgacgacctgcaaaagaggctggcggtctaccaagcaggagcgcgggaaggtgccgagagagggttaagtgcaatcagggagcggctgggcccacttgtggagcagggaagggtaagagcagcaacagtgggatctctagctgggcagtag

SEQ ID NO: 114348 - DNA, 651 bp, Artificial Sequence
  derived and/or modified sequence
atgaaagtgctgtgggcagccctgttggtaaccttcttggcaggctgtcaggccaaggtcgaacaagccgtcgaaaccgaacccgagcccgaactccgacagcagactgagtggcagagtggacagaggtgggaactagccctgggacgcttttgggactatttgagatgggtacagaccctgtcagaacaagtccaggaagagctcctaagctctcaggtgacgcaagaactgagagctctgatggatgagacaatgaaagaattgaaagcatataaaagtgaactagaagaacagttaacccctgtggccgaagagacgagggccaggctgtctaaagaattacaggccgcccaggccaggctcggggccgacatggaggacgtctgtggccgtttagtccagtataggggcgaagtgcaggcgatgttaggccaatctactgaggagctgcgcgtaaggttggctagccacctcagaaaactgcggaaaagactcttgcgcgacgctgatgatctgcagaaacgactcgctgtataccaggccggtgctagagagggagcagagagagggctgtccgcgatcagggagagacttggccctcttgtagagcagggccgcgtgagagccgccaccgttggatcattgtag

SEQ ID NO: 114349 - DNA, 954 bp, Artificial Sequence
  derived and/or modified sequence
atgaaggtgctgtgggccgccctgctggtgaccttcctggccggctgccaggccaaggtggagcaggccgtggagaccgagcccgagcccgagctgagacagcagaccgagtggcagagcggccagagatgggagctggccctgggcagattctgggactacctgagatgggtgcagaccctgagcgagcaggtgcaggaggagctgctgagcagccaggtgacccaggagctgagagccctgatggacgagaccatgaaggagctgaaggcctacaagagcgagctggaggagcagctgacccccgtggccgaggagaccagagccagactgagcaaggagctgcaggccgcccaggccagactgggcgccgacatggaggacgtgtgcggcagactggtgcagtacagaggcgaggtgcaggccatgctgggccagagcaccgaggagctgagagtgagactggccagccacctgagaaagctgagaaagagactgctgagagacgccgacgacctgcagaagagactggccgtgtaccaggccggcgccagagagggcgccgagagaggcctgagcgccatcagagagagactgggccccctggtggagcagggcagagtgagagccgccaccgtgggcagcctggccggccagcccctgcaggagagagcccaggcctggggcgagagactgagagccagaatggaggagatgggcagcagaaccagagacagactggacgaggtgaaggagcaggtggccgaggtgagagccaagctggaggagcaggcccagcagatcagactgcaggccgaggccttccaggccagactgaagagctggttcgagcccctggtggaggacatgcagagacagtgggccggcctggtggagaaggtgcaggccgccgtgggcaccagcgccgcccccgtgcccagcgacaaccactag

SEQ ID NO: 114350 - DNA, 660 bp, Artificial Sequence
  derived and/or modified sequence
atgaaggtgctgtgggccgccctgctggtgaccttcctggccggctgccaggccaaggtggagcaggccgtggagaccgagcccgagcccgagctgagacagcagaccgagtggcagagcggccagagatgggagctggccctgggcagattctgggactacctgagatgggtgcagaccctgagcgagcaggtgcaggaggagctgctgagcagccaggtgacccaggagctgagagccctgatggacgagaccatgaaggagctgaaggcctacaagagcgagctggaggagcagctgacccccgtggccgaggagaccagagccagactgagcaaggagctgcaggccgcccaggccagactgggcgccgacatggaggacgtgtgcggcagactggtgcagtacagaggcgaggtgcaggccatgctgggccagagcaccgaggagctgagagtgagactggccagccacctgagaaagctgagaaagagactgctgagagacgccgacgacctgcagaagagactggccgtgtaccaggccggcgccagagagggcgccgagagaggcctgagcgccatcagagagagactgggccccctggtggagcagggcagagtgagagccgccaccgtgggcagcctggccggccagtag

SEQ ID NO: 114351 - DNA, 651 bp, Artificial Sequence
  derived and/or modified sequence
atgaaggtgctgtgggccgccctgctggtgaccttcctggccggctgccaggccaaggtggagcaggccgtggagaccgagcccgagcccgagctgagacagcagaccgagtggcagagcggccagagatgggagctggccctgggcagattctgggactacctgagatgggtgcagaccctgagcgagcaggtgcaggaggagctgctgagcagccaggtgacccaggagctgagagccctgatggacgagaccatgaaggagctgaaggcctacaagagcgagctggaggagcagctgacccccgtggccgaggagaccagagccagactgagcaaggagctgcaggccgcccaggccagactgggcgccgacatggaggacgtgtgcggcagactggtgcagtacagaggcgaggtgcaggccatgctgggccagagcaccgaggagctgagagtgagactggccagccacctgagaaagctgagaaagagactgctgagagacgccgacgacctgcagaagagactggccgtgtaccaggccggcgccagagagggcgccgagagaggcctgagcgccatcagagagagactgggccccctggtggagcagggcagagtgagagccgccaccgtgggcagcctgtag

SEQ ID NO: 114352 - protein, 127 aa, Artificial Sequence
  derived and/or modified sequence
MQQPFNYPYPQIYWVDSSASSPWAPPGTVLPCPTSVPRRPGQRRPPPPPPPPPLPPPPPPPPLPPLPLPPLKKRGNHSTGLCLLVMFFMVLVALVGLGLGMFQLFHLQKELAELREATPVHPLKKRS

SEQ ID NO: 114353 - DNA, 384 bp, Artificial Sequence
  derived and/or modified sequence
atgcagcagcccttcaactacccctacccccagatctactgggtggacagcagcgccagcagcccctgggccccccccggcaccgtgctgccctgccccaccagcgtgcccagaagacccggccagagaagacccccccccccccccccccccccccccctgccccccccccccccccccccccccctgccccccctgcccctgccccccctgaagaagagaggcaaccacagcaccggcctgtgcctgctggtgatgttcttcatggtgctggtggccctggtgggcctgggcctgggcatgttccagctgttccacctgcagaaggagctggccgagctgagagaggccacccccgtgcaccccctgaagaagagaagctag

SEQ ID NO: 114354 - DNA, 384 bp, Artificial Sequence
  derived and/or modified sequence
atgcaacagccctttaactacccctacccacagatttactgggtcgacagttcagccagcagtccttgggcgccgcctggcacagtcctcccttgcccaacttcagttcccagacggccaggccagcgacgcccacctcctcctcctcctcctccaccattgcccccccctccacctccaccacctctgccacctcttcccctcccacccctgaaaaaacgcggaaatcacagcacaggcctgtgcttgttggtcatgttctttatggtactggtggccctggtgggtttggggttgggtatgtttcagctgtttcacctgcaaaaagaactggcggagctgagagaagccaccccagtgcatcctctcaagaaacgaagctag

SEQ ID NO: 114355 - DNA, 384 bp, Artificial Sequence
  derived and/or modified sequence
atgcagcagcccttcaactacccctacccccagatctactgggtggacagcagcgccagcagcccctgggcccctcctggcaccgtgctgccctgccccacctctgtgccccggcggcccggccagaggaggcctcctcctcctcctcctcctccacccctgcccccacctcctcctcctccacccctgccccccctgcccctgccccccctgaagaagaggggcaaccacagcacaggcctgtgcctgctggtgatgttcttcatggtgctggtggccctggtgggcctgggcctgggcatgttccagctgttccacctgcagaaggagctggccgagctgcgggaggccacccctgtgcaccccctgaagaagaggagctag

SEQ ID NO: 114356 - DNA, 384 bp, Artificial Sequence
  derived and/or modified sequence
atgcagcagcccttcaactacccctacccccagatctactgggtggactcttctgcttccagtccttgggccccccccggaactgtactcccctgccccacttctgtgcctagacgcccagggcaaaggcgtccaccccctccgccgcccccacctccactgcctccgccccctcccccaccacctttaccgcctttacccttgccaccactgaaaaagcggggtaaccacagtacagggttgtgtctactcgtgatgttttttatggtgttggtggccttagtggggctcgggctgggaatgttccagcttttccacctgcaaaaggagttggccgagctgagagaggccactccggtgcatccgcttaagaagagaagctag

SEQ ID NO: 114357 - DNA, 384 bp, Artificial Sequence
  derived and/or modified sequence
atgcaacaaccctttaactatccctaccctcagatttactgggtggatagcagtgctagctctccttgggcacctccaggaacagtgctgccatgtcctacctctgtccctcgcagacccggtcaacgacgtcctccccctcccccacctcccccacctcttccgcctccaccaccccctccacctttgccacccctgcccctgcctcctctgaaaaaacgcggaaaccattccaccggcctttgcctgctggtaatgtttttcatggtgttagtggcactcgtggggctggggctcggcatgtttcagctgttccaccttcagaaggagctggccgagctaagagaggctacgcccgtccatcccttaaaaaaacggtcctag

SEQ ID NO: 114358 - DNA, 384 bp, Artificial Sequence
  derived and/or modified sequence
atgcagcagcccttcaactacccctatccccaaatctattgggtagactcatctgcctcctctccatgggcccccccaggcaccgtattgccgtgccctacctccgtacccagacggccagggcagcgacgaccgccaccaccacctcctcctccacctctccccccgccacctcccccacccccacttccacccttacctctaccacctctcaaaaagcgcggaaaccatagcaccggattgtgcctcttagtaatgttctttatggttttagttgcactggtgggtctgggattaggcatgttccagctctttcacctgcagaaggaacttgcagaactccgagaagccacccctgtccatccattgaaaaaacgatcatag

SEQ ID NO: 114359 - RNA, 384 nt, Artificial Sequence
  derived and/or modified sequence
augcagcagcccuucaacuaccccuauccccaaaucuauuggguagacucaucugccuccucuccaugggcccccccaggcaccguauugccgugcccuaccuccguacccagacggccagggcagcgacgaccgccaccaccaccuccuccuccaccucuccccccgccaccucccccacccccacuuccacccuuaccucuaccaccucucaaaaagcgcggaaaccauagcaccggauugugccucuuaguaauguucuuuaugguuuuaguugcacuggugggucugggauuaggcauguuccagcucuuucaccugcagaaggaacuugcagaacuccgagaagccaccccuguccauccauugaaaaaacgaucauag

SEQ ID NO: 114360 - protein, 78 aa, Artificial Sequence
  derived and/or modified sequence
GIACWSCRKILQKLEDLVGEQPNEATINEAASRVCRNLGLLRGACKKIMRTCLRLISRDILAGKKPQEVCVDIKLCKH

SEQ ID NO: 114361 - protein, 123 aa, Artificial Sequence
  derived and/or modified sequence
RLSPEYYDLARAHLRDEEKSCPCLAQEGPQGDLLTKTQELGRDYRTCLTIVQKLKKMVDKPTQRSVSNAATRVCRTGRSRWRDVCRNFMRRYQSRVTQGLVAGETAQQICEDLRLCIPSTGPL

SEQ ID NO: 114362 - protein, 77 aa, Artificial Sequence
  derived and/or modified sequence
LICESCRKIIQKLEDMVGPQPNEDTVTQAASRVCDKMKILRGVCKKIMRTFLRRISKDILTGKKPQAICVDIKICKE

SEQ ID NO: 114363 - protein, 78 aa, Artificial Sequence
  derived and/or modified sequence
GLICESCRKIIQKLEDMVGPQPNEDTVTQAASRVCDKMKILRGVCKKIMRTFLRRISKDILTGKKPQAICVDIKICKE

SEQ ID NO: 114364 - protein, 130 aa, Artificial Sequence
  derived and/or modified sequence
MEGLVFSRLSPEYYDLARAHLRDEEKSCPCLAQEGPQGDLLTKTQELGRDYRTCLTIVQKLKKMVDKPTQRSVSNAATRVCRTGRSRWRDVCRNFMRRYQSRVTQGLVAGETAQQICEDLRLCIPSTGPL

SEQ ID NO: 114365 - protein, 75 aa, Artificial Sequence
  derived and/or modified sequence
MGRDYRTCLTIVQKLKKMVDKPTQRSVSNAATRVCRTGRSRWRDVCRNFMRRYQSRVTQGLVAGETAQQICEDLR

SEQ ID NO: 114366 - DNA, 858 bp, Artificial Sequence
  derived and/or modified sequence
cctgggccctcctgctccttgcagccatgctcctgggcaacccagcccctgcctccgcatctgcgtggtgaaggccattggccctcatcggtggatctgcgtttcctcgggcctacactgtctaggattgtgcggggctggtgagagaacaagatctcttctgtgttcaaggcagacttcctgccccctgcaccctgctctctcccaggccttgaggtcagtgtgagccccaagggcaagaacacttctggaagggagagtggatttggctgggccatctggatggaaggtctggtcttctctcgtctgagccctgagtactacgacctggcaagagcccacctgcgtgatgaggagaaatcctgcccgtgcctggcccaggagggcccccagggtgacctgttgaccaaaacacaggagctgggccgtgactacaggacctgtctgacgatagtccaaaaactgaagaagatggtggataagcccacccagagaagtgtttccaatgctgcgacccgggtgtgtaggacggggaggtcacgatggcgcgacgtctgcagaaatttcatgaggaggtatcagtctagagttacccagggcctcgtggccggagaaactgcccagcagatctgtgaggacctcaggttgtgtataccttctacaggtcccctctgagccctctcaccttgtcctgtggaagaagcacaggctcctgtcctcagatcccgggaacctcagcaacctctgccggctcctcgcttcctcgatccagaatccactctccagtctccctcccctgactccctctgctgtcctcccctctcacgagaataaagtgtcaagcaagattttagccgc

SEQ ID NO: 114367 - protein, 1205 aa, Artificial Sequence
  derived and/or modified sequence
MKVTVCFGRTGIVVPCKEGQLRVGELTQQALQRYLKTREKGPGYWVKIHHLEYTDGGILDPDDVLADVVEDKDKLIAVFEEQEPLHKIESPSGNPADRQSPDAFETEVAAQLAAFKPIGGEIEVTPSALKLGTPLLVRRSSDPVPGPPADTQPSASHPGGQSLKLVVPDSTQNLEDREVLNGVQTELLTSPRTKDTLSDMTRTVEISGEGGPLGIHVVPFFSSLSGRILGLFIRGIEDNSRSKREGLFHENECIVKINNVDLVDKTFAQAQDVFRQAMKSPSVLLHVLPPQNREQYEKSVIGSLNIFGNNDGVLKTKVPPPVHGKSGLKTANLTGTDSPETDASASLQQNKSPRVPRLGGKPSSPSLSPLMGFGSNKNAKKIKIDLKKGPEGLGFTVVTRDSSIHGPGPIFVKNILPKGAAIKDGRLQSGDRILEVNGRDVTGRTQEELVAMLRSTKQGETASLVIARQEGHFLPRELKGEPDCCALSLETSEQLTFEIPLNDSGSAGLGVSLKGNKSRETGTDLGIFIKSIIHGGAAFKDGRLRMNDQLIAVNGESLLGKSNHEAMETLRRSMSMEGNIRGMIQLVILRRPERPMEDPAECGAFSKPCFENCQNAVTTSRRNDNSILHPLGTCSPQDKQKGLLLPNDGWAESEVPPSPTPHSALGLGLEDYSHSSGVDSAVYFPDQHINFRSVTPARQPESINLKASKSMDLVPDESKVHSLAGQKSESPSKDFGPTLGLKKSSSLESLQTAVAEVRKNDLPFHRPRPHMVRGRGCNESFRAAIDKSYDGPEEIEADGLSDKSSHSGQGALNCESAPQGNSELEDMENKARKVKKTKEKEKKKEKGKLKVKEKKRKEENEDPERKIKKKGFGAMLRFGKKKEDKGGKAEQKGTLKHGGLREEELEKMKEERERIGAKHQELREKQARGLLDYATGAIGSVYDMDDDEMDPNYARVNHFREPCTSANVFRSPSPPRAGPFGYPRDGHPLSPERDHLEGLYAKVNKPYHPLVPADSGRPTGGSTDRIQKLRKEYYQARREGFPLYEDDEGRARPSEYDLLWVPGRGPDGNAHNLRFEGMERQYASLPRGGPADPVDYLPAAPRGLYKERELPYYPGAHPMHPPKGSYPRPTELRVADLRYPQHYPPPPAPQHKGPFRQDVPPSPPQHQRMPAYQETGRPGPRGGSPDQYPYRTQDSRQKNPMTAAV

SEQ ID NO: 114368 - DNA, 3618 bp, Artificial Sequence
  derived and/or modified sequence
atgaaggtgaccgtgtgcttcggcagaaccggcatcgtggtgccctgcaaggagggccagctgagagtgggcgagctgacccagcaggccctgcagagatacctgaagaccagagagaagggccccggctactgggtgaagatccaccacctggagtacaccgacggcggcatcctggaccccgacgacgtgctggccgacgtggtggaggacaaggacaagctgatcgccgtgttcgaggagcaggagcccctgcacaagatcgagagccccagcggcaaccccgccgacagacagagccccgacgccttcgagaccgaggtggccgcccagctggccgccttcaagcccatcggcggcgagatcgaggtgacccccagcgccctgaagctgggcacccccctgctggtgagaagaagcagcgaccccgtgcccggcccccccgccgacacccagcccagcgccagccaccccggcggccagagcctgaagctggtggtgcccgacagcacccagaacctggaggacagagaggtgctgaacggcgtgcagaccgagctgctgaccagccccagaaccaaggacaccctgagcgacatgaccagaaccgtggagatcagcggcgagggcggccccctgggcatccacgtggtgcccttcttcagcagcctgagcggcagaatcctgggcctgttcatcagaggcatcgaggacaacagcagaagcaagagagagggcctgttccacgagaacgagtgcatcgtgaagatcaacaacgtggacctggtggacaagaccttcgcccaggcccaggacgtgttcagacaggccatgaagagccccagcgtgctgctgcacgtgctgcccccccagaacagagagcagtacgagaagagcgtgatcggcagcctgaacatcttcggcaacaacgacggcgtgctgaagaccaaggtgcccccccccgtgcacggcaagagcggcctgaagaccgccaacctgaccggcaccgacagccccgagaccgacgccagcgccagcctgcagcagaacaagagccccagagtgcccagactgggcggcaagcccagcagccccagcctgagccccctgatgggcttcggcagcaacaagaacgccaagaagatcaagatcgacctgaagaagggccccgagggcctgggcttcaccgtggtgaccagagacagcagcatccacggccccggccccatcttcgtgaagaacatcctgcccaagggcgccgccatcaaggacggcagactgcagagcggcgacagaatcctggaggtgaacggcagagacgtgaccggcagaacccaggaggagctggtggccatgctgagaagcaccaagcagggcgagaccgccagcctggtgatcgccagacaggagggccacttcctgcccagagagctgaagggcgagcccgactgctgcgccctgagcctggagaccagcgagcagctgaccttcgagatccccctgaacgacagcggcagcgccggcctgggcgtgagcctgaagggcaacaagagcagagagaccggcaccgacctgggcatcttcatcaagagcatcatccacggcggcgccgccttcaaggacggcagactgagaatgaacgaccagctgatcgccgtgaacggcgagagcctgctgggcaagagcaaccacgaggccatggagaccctgagaagaagcatgagcatggagggcaacatcagaggcatgatccagctggtgatcctgagaagacccgagagacccatggaggaccccgccgagtgcggcgccttcagcaagccctgcttcgagaactgccagaacgccgtgaccaccagcagaagaaacgacaacagcatcctgcaccccctgggcacctgcagcccccaggacaagcagaagggcctgctgctgcccaacgacggctgggccgagagcgaggtgccccccagccccaccccccacagcgccctgggcctgggcctggaggactacagccacagcagcggcgtggacagcgccgtgtacttccccgaccagcacatcaacttcagaagcgtgacccccgccagacagcccgagagcatcaacctgaaggccagcaagagcatggacctggtgcccgacgagagcaaggtgcacagcctggccggccagaagagcgagagccccagcaaggacttcggccccaccctgggcctgaagaagagcagcagcctggagagcctgcagaccgccgtggccgaggtgagaaagaacgacctgcccttccacagacccagaccccacatggtgagaggcagaggctgcaacgagagcttcagagccgccatcgacaagagctacgacggccccgaggagatcgaggccgacggcctgagcgacaagagcagccacagcggccagggcgccctgaactgcgagagcgccccccagggcaacagcgagctggaggacatggagaacaaggccagaaaggtgaagaagaccaaggagaaggagaagaagaaggagaagggcaagctgaaggtgaaggagaagaagagaaaggaggagaacgaggaccccgagagaaagatcaagaagaagggcttcggcgccatgctgagattcggcaagaagaaggaggacaagggcggcaaggccgagcagaagggcaccctgaagcacggcggcctgagagaggaggagctggagaagatgaaggaggagagagagagaatcggcgccaagcaccaggagctgagagagaagcaggccagaggcctgctggactacgccaccggcgccatcggcagcgtgtacgacatggacgacgacgagatggaccccaactacgccagagtgaaccacttcagagagccctgcaccagcgccaacgtgttcagaagccccagcccccccagagccggccccttcggctaccccagagacggccaccccctgagccccgagagagaccacctggagggcctgtacgccaaggtgaacaagccctaccaccccctggtgcccgccgacagcggcagacccaccggcggcagcaccgacagaatccagaagctgagaaaggagtactaccaggccagaagagagggcttccccctgtacgaggacgacgagggcagagccagacccagcgagtacgacctgctgtgggtgcccggcagaggccccgacggcaacgcccacaacctgagattcgagggcatggagagacagtacgccagcctgcccagaggcggccccgccgaccccgtggactacctgcccgccgcccccagaggcctgtacaaggagagagagctgccctactaccccggcgcccaccccatgcacccccccaagggcagctaccccagacccaccgagctgagagtggccgacctgagatacccccagcactacccccccccccccgccccccagcacaagggccccttcagacaggacgtgccccccagccccccccagcaccagagaatgcccgcctaccaggagaccggcagacccggccccagaggcggcagccccgaccagtacccctacagaacccaggacagcagacagaagaaccccatgaccgccgccgtgtag

SEQ ID NO: 114369 - DNA, 3618 bp, Artificial Sequence
  derived and/or modified sequence
atgaaggtcacagtctgcttcggccgcaccggcattgtggtgccctgtaaagaagggcagctccgcgtgggcgagctgactcaacaggcacttcagcgttacttgaaaacacgggagaaaggccccggctattgggtgaagatacaccacttagagtatacggacggaggtattctggatcccgacgatgttctagcagatgtggttgaagacaaagacaaactgattgctgttttcgaggaacaagaacccctccataagatcgagtccccgagcgggaatcctgccgatcgccaaagccctgacgcctttgaaaccgaagtagccgctcagctagccgcgttcaaacctattggcggggagatcgaggtaacaccaagtgcactgaagctgggcaccccgctgctcgtgcgacggtcctccgatcccgtcccaggtccccccgctgacacacagccttcagcttcacatccgggtgggcaatccctcaaactggtggttcctgattcaactcagaatctggaggatagggaggtgctgaacggggtgcaaacagagctgttaacatccccccggaccaaagacactctgtctgatatgacaaggacagtagagatctccggtgaaggagggccactgggcatccatgtggtcccattcttttcatcactctctgggagaatcctgggactcttcatccggggcattgaagacaattccaggtctaagcgagagggactgttccatgagaatgagtgcatagtcaaaatcaataacgtcgacctggtcgataagaccttcgctcaggctcaagatgtgtttcgccaggccatgaagtctccttctgtgcttctgcacgtgttaccaccccagaaccgcgagcagtacgagaaaagtgtcatagggagccttaacattttcggaaacaatgatggagtcctcaaaactaaagtccctcctccggtgcatggtaagtctgggttgaagacggcaaacctgacgggcacagactctccggagacagacgccagcgctagcctacagcagaataagtccccgcgggtccccaggttgggtggtaagccatcaagcccatctctttcaccattaatgggattcggtagtaacaagaacgctaagaagattaagattgatctgaaaaaagggcctgagggactaggatttacagtcgtcacacgcgattccagcattcatggaccaggaccaattttcgtgaaaaatattttgccaaaaggtgcagccattaaagacgggcgtcttcagtcaggcgatagaattctcgaggttaacggacgtgatgtgactgggcgtacccaggaagagctcgtagccatgctgaggagcacgaagcagggggagaccgcctccttggttatcgccaggcaggagggacatttccttccccgagagctaaaaggggagcccgattgctgcgctcttagcctggagacctcagagcagcttaccttcgagatcccgctgaatgatagtggttcagccgggctgggagtgtctctcaaaggtaacaagagtcgggagaccggaactgacttgggaatattcatcaagtcaattatccacgggggcgcagcctttaaggacggaaggctcaggatgaatgatcagttaattgctgtcaatggcgaaagcctactgggtaaatctaatcatgaggcaatggaaaccctgaggcgatccatgagcatggaaggcaatatccgcggcatgatacagctagtgatactgcggagacctgagagacctatggaagaccctgcagagtgcggggccttctctaaaccctgtttcgagaattgtcagaacgcagtcaccacatcacgccgtaatgacaattcaatcttgcaccccctcggcacttgctccccgcaggataaacagaaaggccttctgcttcctaacgacgggtgggctgagtccgaggtgccccccagccctactccgcattcggccctcgggctgggcctcgaggactattcccattcctctggagtcgactccgccgtgtactttccagaccaacatatcaacttccgcagcgtgacgcccgcacgacagccagagtccatcaacttaaaggccagcaaatccatggacctggtgcccgacgagtccaaggtacattctcttgctggacagaaatcagagagcccctctaaggacttcgggccaactctggggctgaagaagtccagtagcctggagtccttgcagaccgcggtagccgaggtgaggaagaacgacctgccattccaccggcccagacctcatatggtgcgcggacgcggctgtaacgagagctttcgggccgctattgataaaagctacgacggccctgaggagattgaggccgatgggcttagcgacaagtcaagtcatagtggtcagggagctcttaattgtgagtctgctccccaggggaattccgaactggaagatatggaaaataaggcgagaaaagtaaagaagaccaaggagaaagaaaaaaagaaagaaaagggaaaattaaaggtgaaagagaagaagcggaaagaggaaaacgaggatccagagcgaaagatcaagaaaaagggcttcggcgcgatgttgcggtttggcaaaaaaaaggaagacaaggggggaaaggcagagcagaaaggaactttgaaacacggggggctgagagaagaggaacttgaaaagatgaaggaggagcgagaacggatcggagctaagcaccaggagctgcgggagaagcaggcacgcggacttttggattacgctaccggagccatcggcagcgtgtacgatatggacgacgatgagatggatcccaactacgccagggtgaatcactttcgggagccatgcacttctgcaaatgtctttagatctcctagtcctcccagggcgggccctttcgggtatccccgggatggacaccccctgtcacctgagagagaccatttagaggggctgtatgccaaagttaacaagccataccatcccctggtgccagctgactctgggcggccaactggaggctccacagatcgcatccagaaactcagaaaggagtattaccaggctcggagagaggggttcccgctgtatgaagatgacgaggggcgggcaagaccatccgagtacgacctcctgtgggtgccaggtcggggacccgatggcaacgcgcacaatctgcgcttcgaagggatggagagacaatatgctagtctgcctcgtggcgggccagctgatcccgtggactacttgcccgcggccccacgcgggctctataaggaacgggagctcccgtattatccaggggcacatcccatgcatccgcctaaggggtcttacccgcgccccaccgaattgagggtggcggatctgcggtacccacagcattacccccccccgcccgcacctcaacataagggaccttttcgccaggacgttcccccctctcctccacagcatcaaaggatgcccgcataccaggagaccgggaggcccggcccacggggtggtagcccagaccagtacccgtacagaacccaagactccagacagaagaatccaatgaccgcagcggtgtag

SEQ ID NO: 114370 - DNA, 3618 bp, Artificial Sequence
  derived and/or modified sequence
atgaaggtgacagtgtgctttggaagaacaggcatcgtggtgccctgcaaggagggccagctgcgggtgggggagctgacccagcaggccctgcagcgctacctgaagacccgggagaagggccctggctactgggtgaagatccaccacctggagtacacagatggcggcatcctggaccctgatgatgtgctggctgatgtggtggaggacaaggacaagctgattgctgtgtttgaggagcaggagcccctgcacaagattgagagccccagcggcaacccagctgaccggcagagcccagatgcctttgaaacagaggtggccgcccagctggccgccttcaagcccatcggcggggagattgaggtgaccccatctgccctgaagctgggcacccccctgctggtgcggcgcagcagtgaccctgtgcccggccccccagctgacacccagcccagcgccagccaccctgggggccagagcctgaagctggtggtgcctgacagcacccagaacctggaggaccgggaggtgctgaatggagtgcagacagagctgctgaccagccccaggaccaaggacaccctgagtgacatgaccaggacagtggagatctctggagagggcggccccctgggcatccacgtggtgcccttcttcagcagcctgagcggccgcatcctgggcctcttcatccggggcatcgaggacaacagccgcagcaagcgggagggcctcttccatgaaaatgaatgcatcgtgaagatcaacaacgtggacctggtggacaagacctttgcccaggcccaggatgtgttccggcaggccatgaagagccccagcgtgctgctgcacgtgctgcccccccagaaccgggagcagtatgagaagtctgtgattggcagcctgaacatctttggaaataatgatggagtgctgaagaccaaggtgcccccacctgtgcacggcaagagcggcctgaagacagccaacctgaccggcacagacagccctgagacagatgccagcgccagcctgcagcagaacaagagcccccgggtgccccggctgggcggcaagcccagcagccccagcctgagccccctgatgggcttcggcagcaacaagaatgccaagaagatcaagattgacctgaagaagggccctgagggcctgggcttcaccgtggtgacccgggacagcagcatccacggccctggccccatctttgtgaagaacatcctgcccaagggggccgccatcaaggatggccgcctgcagagcggggaccgcatcctggaggtgaatggaagagatgtgacaggccgcacccaggaggagctggtggccatgctgcggagcaccaagcagggcgagacagccagcctggtgattgcccggcaggagggccacttcctgccccgggagctgaagggggagccagactgctgtgccctgagcctggagaccagcgagcagctgacctttgagatccccctgaatgacagcggcagcgctggcctgggcgtgtccctgaagggcaacaagagccgggagactggaacagacctgggcatcttcatcaagagcatcatccacggcggggccgccttcaaggatggccgcctgaggatgaatgaccagctgattgctgtgaatggagagagcctgctgggcaagagcaaccacgaggccatggagaccctgcggcgctccatgtccatggagggcaacatccggggcatgatccagctggtgatcctgcggcggcctgagcggcccatggaggaccctgcagaatgtggggccttcagcaagccctgctttgagaactgccagaatgctgtgaccaccagcagaagaaatgacaacagcatcctgcaccccctgggcacctgcagcccccaggacaagcagaagggcctgctgctgcccaatgatggctgggccgagagcgaggtgccccccagccccaccccccacagcgccctgggcctgggcctggaggactacagccacagcagcggcgtggacagcgctgtgtacttcccagaccagcacatcaacttccgctctgtgaccccagcccggcagcctgagagcatcaacctgaaggccagcaagtccatggacctggtgcctgatgagagcaaggtgcacagcctggccggccagaagtctgagagccccagcaaggactttggccccaccctgggcctgaagaagagcagcagcctggagagcctgcagacagctgtggccgaggtgaggaagaatgacctgcccttccaccggccccggccccacatggtgcggggccggggctgcaatgaaagcttccgggccgccatcgacaagagctatgatggccctgaggagattgaagcagatggcctgagtgacaagagcagccacagcggccagggcgccctgaactgtgagagcgccccccagggcaacagcgagctggaggacatggagaacaaggccaggaaggtgaagaagaccaaggagaaggagaagaagaaggagaagggcaagctgaaggtgaaggagaagaagaggaaggaggagaatgaagatcctgagaggaagatcaagaagaagggctttggagccatgctgcgctttgggaagaagaaggaggacaagggcggcaaggccgagcagaagggcaccctgaagcatggaggcctgcgggaggaggagctggagaagatgaaggaggagcgggagagaattggagccaagcaccaggagctgcgggagaagcaggcccggggcctgctggactatgccactggagccatcggctctgtgtatgacatggatgatgatgagatggaccccaactatgcccgggtgaaccacttccgggagccctgcaccagcgccaacgtgttccgcagccccagcccccccagggctggccccttcggctaccccagagatggccaccccctgagccctgagcgggaccacctggagggcctgtatgccaaggtgaacaagccctaccaccccctggtgcctgctgacagcggccggcccactggaggcagcacagaccgcatccagaagctgaggaaggagtactaccaggcccggcgggagggcttccccctgtatgaagatgatgagggccgggcccggcccagtgaatatgacctgctgtgggtgcccggccggggcccagatggaaatgcccacaacctgcgctttgagggcatggagcggcagtatgccagcctgccccggggcggccctgctgaccctgtggactacctgcctgctgccccccggggcctgtacaaggagcgggagctgccctactacccaggggcccaccccatgcacccccccaagggcagctacccccggcccacagagctgcgggtggccgacctgcgctacccccagcactacccacctcctccagccccccagcacaagggccccttccggcaggatgtgccccccagccccccccagcaccagaggatgcctgcctaccaggagaccggccggcccggcccccggggcggcagcccagaccagtacccctaccgcacccaggacagccggcagaagaaccccatgacagctgctgtgtag

SEQ ID NO: 114371 - DNA, 3618 bp, Artificial Sequence
  derived and/or modified sequence
atgaaggtgaccgtgtgcttcggccggaccggcatcgtggtgccctgcaaggagggacagctgcgcgtgggggagctcactcagcaggctctgcaacggtacttaaaaacgagggagaaggggccagggtactgggttaaaatacaccacctggaatacaccgacggaggtatactcgatcccgacgacgtgctggcagacgtcgtggaagacaaggacaagctgatcgccgtttttgaggaacaggaacccctccataaaatagagagcccatcaggaaatcccgcagatagacagagcccggacgccttcgaaacagaggtggccgcccaactagctgcttttaaaccaattggcggggagatcgaggtaacgccatccgctttgaagctcggaaccccgctgcttgtgaggagatccagcgacccagtgcccggaccccccgcggatacccaacctagtgcatcccaccctggcggccaatcgctcaagttggtcgtgccagatagtacgcagaacctggaagatagagaggtcttgaatggagtgcagacagagctgcttacatcccccaggaccaaggacacactgtcagatatgaccaggactgtggagatctcaggggaaggagggccattaggaatccatgtggttcccttcttctccagtctgtccggtcggatactgggattattcatccgaggaatagaagataatagccggagtaagcgtgagggtctgttccacgagaatgagtgtattgtgaaaattaataacgtcgacctggtcgacaaaacatttgcgcaggcgcaggacgtgttcagacaagcaatgaaaagtccgtctgttctgctgcacgtcctgccacctcagaacagggagcagtatgaaaaaagcgtgatcgggtcgctgaatatcttcggtaataacgatggagtgttgaaaacaaaggttccgccaccagtgcatggtaagtctgggctgaaaaccgccaatctgacaggcaccgactcacccgaaactgacgcctctgcgtccctacagcagaacaagagtcctagagtgccaaggctcggggggaagccctcttctccttcactgtccccactgatgggattcggcagcaataaaaatgccaagaagatcaaaatcgatctgaaaaaagggcccgaaggcctgggctttaccgtggtaactagagactcatctatccacggccctggccctatcttcgtcaagaatatcttacctaagggggctgccatcaaggacggaagactgcagtcgggggatcggatattggaagttaacggccgcgacgtaacaggtcgaacgcaggaagaactggtggcgatgctgcgcagcaccaaacagggggagacagcttctctggtcatcgccaggcaggagggccacttcctccctagagagttgaaaggcgagcctgattgttgcgccctgtctctggagacttccgagcaacttacgttcgaaattcctttaaacgattcaggtagcgctgggcttggtgtcagcctgaaggggaataagagccgcgaaacaggtaccgacctgggaatattcataaaatccattattcacggaggggcagctttcaaggatgggcgtctgaggatgaacgatcaactcatcgcagtgaatggagaaagtttgcttggtaagagcaaccacgaggccatggagacactgcggcgcagtatgagcatggagggcaatataagagggatgatccagctggtgattttaagacggcccgagcgtcctatggaggatcctgctgaatgcggagccttttcaaaaccatgcttcgaaaactgtcagaatgccgtgaccacctctagaagaaatgacaacagtattctgcatccacttggcacctgttctccgcaggacaagcagaaggggctgcttcttcctaacgacggatgggctgagtccgaggtgccgcctagcccgacaccacacagcgcactaggtctggggctggaggactactcacattcgtctggcgttgatagcgcagtgtattttcctgaccagcatatcaacttccgaagcgttacgcccgcccggcagccagagtccatcaacttgaaggcgtccaagtcaatggatctagtccccgacgaaagcaaggtgcactctctcgcaggccagaaatcagagtcccctagtaaagacttcggccccacattgggtttgaaaaagagtagtagtctggaaagtttgcaaaccgctgttgcagaggtcagaaagaacgatctcccgttccatagaccccgtccccatatggtgcgaggcagagggtgcaatgagagcttcagggcagctattgacaagagctacgatgggcctgaggaaattgaggcagacggactcagtgacaaaagcagccactcgggtcagggtgcactaaattgtgagtcggcgccacagggcaactccgagttggaagatatggagaataaggcccgaaaagtcaagaaaaccaaggaaaaagaaaagaagaaggagaaaggtaagctgaaggtcaaagaaaagaaaaggaaggaggaaaatgaggaccccgaacgaaagatcaagaaaaaggggtttggagctatgctccgttttggaaagaagaaagaggacaagggtggtaaagctgaacagaagggtacactgaagcatggcggattgagggaagaggagctggagaagatgaaggaggagagggagaggatcggtgccaaacaccaggaactgcgtgagaagcaggcccgtggacttctggattacgctacaggagcgatcggcagtgtgtacgatatggacgatgacgaaatggaccccaactacgcgagggtgaatcattttagagaaccctgtacatccgctaacgtgttccgctcacccagtcccccacgcgcggggccgttcggctatcctagggatgggcatccactctcgcccgagcgcgatcacctggaaggcttatacgcaaaagtgaacaaaccctatcaccccctcgtgcccgccgatagtgggaggccgacaggaggtagtactgatcgaatccaaaagctgcggaaggaatactatcaggctcgcagggaagggtttcctctctatgaggacgatgaggggcgggctaggccaagcgaatacgacctgctgtgggtgcctggacgtggacccgacggaaacgctcataacttgcggtttgaggggatggagaggcaatacgcctcgcttcccaggggcgggcctgccgaccctgtggattacctccctgcagcacctagaggactatacaaagaacgtgagttgccttactatccaggtgcccaccctatgcatcccccgaaagggagctatcctcgtcccactgagttgcgcgtagccgatctgcgctatcctcagcattaccccccccctccggcaccccagcataaaggcccatttcgacaggacgttccacctagcccacctcagcatcaaagaatgcctgcatatcaggagaccggccgacccggacctagaggcgggagccccgaccagtacccatatcggacacaagatagtaggcaaaagaatccgatgactgccgccgtgtag

SEQ ID NO: 114372 - DNA, 8174 bp, Artificial Sequence
  derived and/or modified sequence
gcggccgcccctccccgattcccgccacctgccgcctggccaggtggaaggggcgctgccgcgagcctccgggcctcagggtgttccggggagcggcgccccgggtctctgggcccacccgccccgggcgtcctccgagagtgggggctgcgcccgcggggtcagacacctgttcggcccggcccggcgtggtcgccgggggccaggatgaaagtgaccgtgtgcttcggcaggacgggcatcgtggtgccctgcaaggagggccagctgcgcgtcggcgagctcacccagcaggcgctgcagcggtacctgaagacccgggagaagggtcctggttactgggtgaagattcatcacttagaatatacagatggaggaatcctggatccagatgatgtcttggcagatgttgttgaagataaagacaagctgattgctgtgtttgaagaacaagaaccactccacaagattgagagccccagtggaaaccctgcagatcggcagagcccagatgcttttgagacagaagtggccgcccaactggccgcatttaagccaattggtggggagattgaagtaaccccttctgctctaaaactaggcactccactgctggtgaggagaagcagtgacccagtgccaggcccacctgctgatacccagccaagcgcttcacaccctggtggccagagtctgaaactggttgttccagattccacgcagaacttggaagacagagaagttttgaatggtgtacagacagaactactaacttcgccaagaactaaggacacattgagtgatatgacaagaacagtggagatttctggggaaggaggcccattgggaatacatgtagtgcccttcttttcatctctgagtggaaggattctaggactcttcatccgaggcattgaagacaacagcaggtccaagcgggagggactatttcacgaaaatgaatgtattgtaaaaatcaacaatgtggatctcgtagacaaaacctttgctcaggctcaagatgtcttccgccaggcaatgaaatctccaagtgtgctcctccacgtgcttcctccacaaaaccgtgaacagtatgaaaagtcagtcattggctctcttaacatttttggtaataatgatggcgttttgaaaaccaaagtgccgcctcctgtccatggaaaatcgggactaaagacagcaaatctcacaggaaccgatagtcctgaaacagatgcatcagcttccctgcaacaaaacaagagtccccgagtaccaaggctgggaggaaaaccatcctctccctcactctcgcctctcatgggatttggcagcaataaaaatgcaaagaaaattaagattgacctaaagaaaggccctgaaggacttggtttcactgtggttaccagagactcttccatacatggtcccggtcccatttttgtaaaaaacattttaccaaagggagcagcaataaaagatggccgcctacaatcaggggacagaattttggaggtaaatgggagagatgtcaccggacgaacccaggaagagcttgtggccatgctcaggagcaccaagcagggggagacagcatcgctggtcattgcccgccaagaaggacattttctgccccgagagttgaaaggagaacctgactgctgtgcactctctctggagacaagcgagcagctcacctttgagatccccctgaatgattcaggttctgctggcctcggggtgagcttaaaagggaacaaatccagagaaactggaacagacttggggatttttatcaaatccatcattcatggaggcgctgcttttaaggatggtcgtctgcgaatgaatgaccagctgattgcagttaatggggaatctcttttgggaaagtccaaccacgaagctatggaaacacttaggcggtcaatgtccatggagggaaacatccgagggatgatccagttggtgattctgaggaggccagagagaccaatggaggatcctgcagagtgtggggcattttccaagccatgctttgagaactgtcaaaatgctgtaaccacctctaggcgaaatgataatagtatcctgcatccacttggcacttgcagtccacaagacaaacagaaaggtctattgctgcccaatgacggatgggccgagagtgaagttccaccttctccaacaccacattctgctctgggattgggcctcgaagattacagccacagctctggggtggattcagcagtatattttccagatcagcacatcaacttcagatctgtgacaccggccaggcagcctgaatcaattaatttgaaagcctcgaagagcatggaccttgtgccagatgaaagcaaggttcactcattggctggacaaaaatcggaatctccaagcaaagattttggtccaactctgggtttgaaaaagtccagctccttggagagtctgcagactgcagtggccgaggtcaggaagaatgaccttccctttcacaggccccggccgcacatggttcgaggccgaggctgcaatgagagctttagagcagccattgacaaatcctacgatggacctgaagaaatagaagctgacggtctgtctgataagagctctcactctggccaaggagctctgaattgtgagtctgcccctcaggggaattcggagctagaggacatggaaaataaagccaggaaagtcaaaaaaacgaaagagaaggagaagaaaaaggaaaagggcaaattgaaagtcaaggagaaaaagcgcaaagaggagaatgaagatccagaaaggaaaataaagaagaagggcttcggcgccatgctgagatttggaaagaagaaagaggataagggtggaaaggctgagcagaaaggtactctgaaacatggtggcctgagagaagaagagctggagaaaatgaaagaagagcgtgaaaggattggagcaaaacatcaggagctaagggaaaagcaggcaagaggtcttcttgattatgctactggtgcaattggatcagtgtatgatatggatgatgatgaaatggaccccaattatgccagagtgaaccactttcgggaaccatgcacatcagcaaatgtctttagatctccatctccccctcgagctggaccatttggttaccctcgggatggccatccactgtctccagaaagagaccacttagagggtctctatgccaaggtcaacaagccataccatccactggttccagctgacagtggccgtcctacgggtggaagcactgaccgtatccagaagttgcggaaagagtattatcaggctcggagggaaggtttccctttatatgaagacgacgaaggaagagcaaggccatctgagtatgacctactctgggtgcctggaaggggtccagatgggaatgcacacaacctccgctttgaagggatggagaggcagtacgcatccttacccaggggaggacccgcagatcctgtagactatctgccagcagcacctcgggggctctacaaggaaagggagcttccctattatccaggggctcatcctatgcaccctcccaaagggagctatccccgccccacagagctcagggtggcagatctccggtatcctcagcactacccacccccgccagctccccagcacaaaggaccctttcgacaagacgttccgccttcccctccccagcaccaaagaatgccagcctatcaggaaacaggcagaccagggccccgtgggggcagcccagaccagtacccttaccgaacccaggattcccggcagaagaaccccatgactgcagccgtatagctgagtgccaccgaggccagcccggtccagaaaggaaggtgtctactctacctttgccctttctaaacctgaagacctccttggtgttaggaattctccatgttactgataagctttttctcactgacattgtaacgcatgactgctaatcagagagaaaaagaaggggaagggaattggggaggaaaaaaaatcagaaggaagacgaaagatggggctataaaaacaaaactacctgatagttgaaacgctttcagagttgttcaaatcagtgagagtggcaacggaacacacaaacaactaattatggaactctactctggggatcctctctggctagataacctgtgctgatgtgcagacacgtggacatccccctctgagactggcggtccagaggcagtctctgccaggcagcattacccgctccgaggtggagcctcagcccccttcttagagctgttaagtctaaggtgtggcagagcagacagagatagaggcatctgaagtgagtataggttttttgactaagaaaaaaaacaacagcaaacatgactagtgatcttgaaatattttgtaccgagagaaagactgcatttatttgtagaatttatcaggtttctgataccactcattggatgtaaacatttcatgtttcctcacttttgatatgaaagtcggtaaaatgcagtattagtcccgggaggatgtgcacagctggtcagagcttccagaaggaatatcttccgaggactaaggtgatcaggttaagagggttcaacatcccacggccctcaccttcctccctcccacattccaggcatggagatatctggtttcagagtcagccccaaatctcctgcctataattactttaactggggtctctaaggttcccacttgagggctaaaatgtagttgggaaagagggcctactggggaggtctcacaggaggcagtgccctgggaaatgccaagtccagactcagtgccaagcagtaaccatctgcactcggggacagcgaggagctgaccatggcctctgatgaccagcaggtattagatggaagtgaatgagagagagagagagagagagtatgtgtgtgtgtgtgtatgtgtgtgttcgaacacatatgattgccagtatggagaatgaaagattaataatgctttctggagagtttgatgcaaaagtgggggaaacggagaaaaggcgctaaggctaaatccatctgcatttgctatatttcattagctaaagtcaggtcagggcagggccaaggcctccaattggcaaaggacagtgttatggctttaaaaagctgaaaccccaacctctaagtagatcacaatgttttctgagctttgcagtaattttctatggaaactaaaacctctaaaacatacaagctggcccaaatgagaacacaagcaaaagatgtggaagacagcaaaacctgagcactggtttgaaccaggcactgacatttgaaatgctttaagccttttcacattccttctttattccctccaaaaaaaaaagtcttgagtttaatttaggtctattttggctgagattagcatacctctgactcacaggatttaataaattatagtattattgaatacataggacatccctctaccccagcttactcttatctttttaatttaaaatagtattctgctaccaagaaggatgcaactgctagttttagatgtaaatagtgttatttactggactttgtgatattattttcttaactacactttactatggccctgttgaaaacagactatcaagttttttgtctctgttctgtcatctctcttaagccaggcacctttagagtgtttgcaatttgttcgaagtggttgaggatctcaggccctgctcacgtgaggtggagtgcaggggagctaccggtttccctgctgacctgctgaatgctaccttcccctcgagttgaatacaccttaaggaaaatgataacacgagggacgtgtaacttgttttgaagcattaaaaaccagcagctcttcactatgttccatattttaaccaaactactgtagactactaaacatagccaagccagaacattccttctggattaagcctaggccacttgaggggcagccaggggtgatggtgtcaggtgagaatcctgtgtcttgaaggagtggcctttacaggaagagtgcccatgttttcacctgcagcgttgccaccagagtgtgcaatacctcctgcacacaggctcagggtaaactgctccaaagctgggttttgtgttgcatacaaagtcaataaaatagttgctaatcctgaatggcagccagtgatgtgaaggtactattaaagtgaacaaaaactagattgcaacagttttctttccttgcttgaagtataacacacgctccatttgatcctgcctgaaagaagctaacattatatttgtgacagacagaggctccatcaagccaagcaacaattaacagctcaagtgtaagatttataaatgcccgtgtactcacccttcaattgttaccacccagaggttacaggactctttcccagcatttaggggaacaggcttttagagtatttagaagaccaggctataatcagtaatgtgcctgggagcaggaaatagctcccaatttatttatggccttgggaaaactcaatccggtgtctccttgtagctcagaacactaatagcccccctggaagagagtggcacattgagctccaaacccaatcaacatacatccacttggctgcagatctgactgctgggtcatgaaggccgtgaaatgatgtttgccctcaagtcactagatattttaagaagccctatttttctccctttttgcaggagtagagagatgaaagaggacagaccattgaaaacttttagatgcaggagaattgagacttccacaagggagagaaacacagcctccccagaatccattatgccatcgggttgtggcactctcacccttgccataataccgtttcctaacaatatcaaatcagtggatgaaatacaagctcagaaacaggaacattttcctaaatcataacctaatagcaaacaaaaattgaaaaaacaattattctgaagctcattattcttagatctgtagatatatatgtgttgactcccacaggatggcaccaagtaaagatcttaagagcatagtaggggttctgagaccgactgtcacccgtggatcctgatggggaagaacagaggcttcactgtagctatagttttccaccaagtcaatcaaattaaaacatgactcattgtcccctccaaagattcataaaattcttgagctaaagtgatcttctgaagaaaagccacctaacaatgttaggaggctcataaagctcatttctcttttccctggtatgcacaaatatcaagcctataaaaaagtaattatttccccaaacctgtaaccactgcattcgttttctttggaggaacattgtagcatttcaggagggtcgagagatctaaagagtttggtctgaatgtgtgtctgtacaattccctttggcattaaactctgaaacctacaatcaatggccttcaaattggtgttaaattgggagaacaccctactgctttctgagtctacgagcaacagaaagactggtcttagtgcaattaggcaggagggatttggactcagaaacagccacagaagtatttctcagcactcccagttcctgccaacttagctggaaacgatgccacagcgagaccagaaagaggagtcgccttaaggtatccctacaaagtcacctttctgataaaaaggagggaaaaaaaagttagatatctaaaataagcctagaatctcacacacagctgtgacttctaagtgaaactcttttctccctcatgtccttaaatagtcacagaatcacacacagcctgacttttaaagacaagcttggctacaggaaatgaaccaaccccaaagactcttctaacctgtctcctgactgggctccttcagaaagtgttctcctgttccatctgtagggctgcttactactggaacctaaaacaaaacctgttgtttgtaccatcactttttctggtgtttcctgtgcttttgtgattccaagtctgttcataagttctgaagataaattatgtgaaatcatattttggcatatgggggtggaggatgaattctttacagactttttaagatgatccatttgtaccacagaaaacattttggaagttgttatatatgagtatataaatttttcttttcatattttacattaaaataaagctttattcagtcattaa

SEQ ID NO: 114373 - DNA, 3618 bp, Artificial Sequence
  derived and/or modified sequence
atgaaagtcaccgtgtgtttcggacggaccgggatcgtcgtgccctgcaaagaggggcagctgagggtgggagaactcacccaacaagccctccagcgatacctgaagactcgagaaaaaggccctggctattgggtcaagatccatcatcttgaatacacagatggcggaatcctcgatcccgatgatgtattagctgacgtggtcgaggacaaggataaactgattgccgtatttgaggagcaggaaccactgcacaaaatcgagtcgccttctggtaatcccgctgataggcagtcccccgatgcctttgagacagaggtggccgcacagctagctgctttcaagcccattgggggtgagatagaggtcacgccttctgcactaaaactgggcactccccttctcgtgaggcgctctagtgatccggtgcctgggccaccagcagatacgcagcccagcgcttcccacccaggagggcagagcttaaagctcgttgtcccagattccactcagaatttggaagatagagaagtcctcaacggagtccaaacggagctgctaacaagcccgaggacaaaagatacattatcagacatgaccagaacggtcgaaatctcgggcgaagggggaccccttggtattcacgtggtaccgtttttcagctcgctctccgggcgtatactgggactgttcatccggggtatagaagataattccaggtccaagcgggagggactcttccatgaaaatgaatgcattgtcaagattaataatgtggatttagttgataaaactttcgctcaggcccaggacgtatttaggcaggccatgaaatcaccgagcgttttgctccacgtgctgccgccacagaacagggagcaatacgagaagagtgttatcgggagtctgaatatattcggcaataacgacggggtgcttaagactaaagtgcctccacctgtgcatgggaagtcaggacttaagaccgcgaacctcacaggcaccgattcccctgagacggatgcatcagcttccctgcagcaaaacaaaagcccccgagtgccccgtcttggtggcaagcccagctccccttctctgtctccactcatgggtttcggatccaataagaacgcaaagaaaatcaagatagacttgaagaaagggccagaaggattgggcttcactgtggtgaccagggactcatctatccacggtcccggacctatctttgtgaagaacatactacctaaaggtgccgcaatcaaggatggacgattacagagcggggatcggatattagaagtgaacggacgagatgtaacaggcaggacacaagaggagctggtagccatgcttcgctccacaaaacagggagagactgcctccctggtgatcgccagacaggagggacactttctgcccagggagctcaaaggcgagccggattgctgcgccctgtccctggagaccagcgaacagctgacatttgaaatccctctcaatgattcaggatcagctggactgggcgtgtctcttaagggtaataagagcagggagaccggtactgacctgggaattttcatcaagagtatcatccacggaggagccgcatttaaggacggtcgcctgcggatgaatgaccaattgatcgctgttaatggggaatctctcctggggaagtcaaatcatgaagcaatggagactctccgacgcagtatgagcatggagggaaacattagggggatgattcagcttgttatactccggagaccagagagacctatggaggatcctgctgaatgcggagccttctctaaaccttgctttgagaactgccagaacgctgttaccacctctcgacggaacgataacagtatcctgcacccactcggaacttgctcccctcaggataaacaaaaggggctgctgctgccaaacgacggctgggccgagtcagaggtgccaccatccccgaccccgcattccgctctgggtctggggctcgaagactattcacactcaagcggagttgatagcgctgtgtacttcccagatcagcatattaactttaggagcgttacccctgcccgtcaaccagagtccattaacctgaaagcctcaaagtctatggacctggttcctgacgaaagcaaggtccactctctcgctggccagaagagcgaatctccaagcaaggacttcggccctacattgggtctgaaaaagtcaagttcgctggaatctcttcagaccgcagtggctgaagtgaggaaaaacgacctacctttccaccggcctaggcctcatatggtcagagggaggggctgcaatgagtctttccgggctgcaatcgacaaatcgtatgacggtcccgaagaaatcgaagctgacggcctttcggacaagagttctcattccggtcagggtgcattgaattgtgaatctgcccctcagggtaattcagagttggaggacatggaaaacaaagccagaaaggttaagaagaccaaagagaaagaaaagaagaaagagaaaggcaagctaaaggtaaaagagaaaaagaggaaggaggagaacgaggaccctgagcgcaaaattaagaaaaaaggcttcggcgcaatgctacgcttcggaaagaagaaggaggacaaaggcggtaaggctgagcaaaagggtacgctaaaacatgggggactgcgcgaagaagagctggagaaaatgaaggaggagcgagaacgcatcggcgctaaacatcaggaactccgagaaaagcaagcccgaggcttgcttgattacgccactggagccatcggtagtgtgtatgatatggatgatgacgagatggaccctaactacgccagagtcaatcactttcgggaaccttgtaccagcgccaatgtgtttcgtagcccttcaccccctagagccggaccatttggctaccccagagatggtcaccctctcagccctgaacgggaccacctcgagggtttatatgcaaaagtcaataaaccttatcacccactcgttccagcagacagcggccgacccaccggcggtagcacagaccggattcaaaagcttcggaaagagtactatcaggcaaggcgtgagggttttcctctatatgaggacgatgaaggcagagcaagaccgagcgagtacgacctgctgtgggtcccaggccgagggccagatgggaacgcccacaatctgaggtttgaaggaatggaacgccagtatgcctcattgcctcggggaggtcccgctgatcctgtagattacctccccgctgctcccagggggctgtataaagaacgggaactaccttactaccccggtgcgcatcccatgcaccctcctaaaggcagttacccaagacccacagagctccgggtggctgacctcagataccctcagcactatcccccaccaccggctcctcagcacaaaggcccatttcggcaggatgtgcccccttcccctcctcagcaccaacgaatgccggcttaccaagagacgggcaggccaggaccacgtggcggtagtcctgaccagtacccctaccgcactcaggattcccgccagaaaaaccctatgacagcagctgtatag

SEQ ID NO: 114374 - protein, 383 aa, Artificial Sequence
  derived and/or modified sequence
MERLQKQPLTSPGSVSPSRDSSVPGSPSSIVAKMDNQVLGYKDLAAIPKDKAILDIERPDLMIYEPHFTYSLLEHVELPRSRERSLSPKSTSPPPSPEVWADSRSPGIISQASAPRTTGTPRTSLPHFHHPETSRPDSNIYKKPPIYKQRESVGGSPQTKHLIEDLIIESSKFPAAQPPDPNQPAKIETDYWPCPPSLAVVETEWRKRKASRRGAEEEEEEEDDDSGEEMKALRERQREELSKVTSNLGKMILKEEMEKSLPIRRKTRSLPDRTPFHTSLHQGTSKSSSLPAYGRTTLSRLQSTEFSPSGSETGSPGLQIYPYEMLVVTNKGRTKLPPGVDRMRLERHLSAEDFSRVFAMSPEEFGKLALWKRNELKKKASLF

SEQ ID NO: 114375 - DNA, 1152 bp, Artificial Sequence
  derived and/or modified sequence
atggagaggctccagaaacaaccactgacaagtcctgggtccgtgtccccctcaagggactcgagcgtcccaggatcaccgtcttctatcgttgcaaagatggacaatcaggtgttaggttacaaagacctggctgccattcccaaggataaagcaatcctggacatcgagagacctgacctgatgatttatgaaccccattttacatacagcctgttggaacatgtcgagcttccacgcagtagggaaaggagtctgagtccaaagtctaccagcccaccaccatcacccgaggtgtgggccgacagcagatctccaggcatcatcagccaggcgagcgcgccaaggacaacgggcacaccccgaaccagcctgcctcattttcatcaccccgagacaagccgtcccgattcaaacatctacaagaagccacccatctacaagcaaagagagtccgtcggaggcagcccacaaacaaagcacctaatcgaggatcttattatcgaaagttcgaaatttccagcagcccaaccacctgatccaaatcagcctgcaaagatcgaaacagactactggccatgccccccctcactggccgttgtggagacagagtggaggaaaagaaaagcctctcgccggggtgccgaggaagaagaagaagaggaggatgacgactctggggaagagatgaaggctttgcgtgaaaggcagcgagaagaactctcaaaggtgactagtaacctgggcaaaatgattctcaaggaggagatggagaaatccctaccgattaggagaaaaacccggtcactgcctgacaggactccttttcatacaagtctgcatcaaggcacaagtaaaagctctagtttgccagcatatggcaggactaccctgagtaggttgcagagtaccgaattcagcccttcagggtcggagacgggatcgcctggcttgcagatctacccctacgagatgctcgtggtcacaaacaaggggcggacgaaactgccacccggagtggaccggatgaggctggaaagacatctgtctgctgaagacttcagtagagtcttcgccatgagcccagaggagttcggcaagctggctctgtggaaaagaaacgagctcaaaaagaaggccagcttgttctag

SEQ ID NO: 114376 - DNA, 1152 bp, Artificial Sequence
  derived and/or modified sequence
atggagcggctgcaaaaacagcccctaacatcccccgggagtgtatccccttcaagagactcaagtgtcccgggttccccaagtagcattgtcgctaaaatggacaaccaggtcctggggtacaaggacttggctgcaattcctaaagacaaggcaatactcgacatagaacgccccgatctgatgatctatgagccccacttcacctacagcttgctggagcacgtcgaactacctcgatcacgggagcgatcgctgtccccgaagagcacctccccccctcccagccctgaagtatgggccgacagtcgctctccggggatcatctcacaggcctcggctccccgaacaacagggacaccccggacctccctcccccattttcaccacccagagacctctcggcccgactcaaatatatataaaaagccccctatttataagcagcgggagagtgtcggaggctcgccccaaacaaagcaccttatcgaagacttgatcatcgagtcaagtaaatttcccgccgctcagccacccgacccgaaccagccggctaagattgagacggactattggccatgtccccccagcttggcagtagtggaaaccgagtggagaaagaggaaagctagccgaagaggggcagaagaggaagaggaggaggaggatgatgatagcggagaggagatgaaggcgctgcgggaacgtcagagggaagaactgtccaaagtcacttctaatctggggaagatgattctgaaggaggagatggagaagagtttacctatccgccgaaaaacgagaagtttacctgaccggaccccgtttcacacttcgctccatcagggaactagtaaaagctcctcactcccggcttacggccggactacgttaagccgcctgcagagtaccgaattctctcccagtggaagtgagaccggcagcccagggctgcagatttatccctatgaaatgctcgtggttaccaataagggccgcaccaaactacctcctggggtggaccgcatgagacttgagagacatttgtccgcagaggacttcagccgggtgttcgcaatgagccccgaggagtttggaaaattggctctgtggaagaggaatgagcttaagaagaaggctagtctgttctag

SEQ ID NO: 114377 - DNA, 1152 bp, Artificial Sequence
  derived and/or modified sequence
atggagcgcctgcagaagcagcctctgacgtcacccggtagtgttagcccatcacgggattccagtgttcccggttctcctagttcgatcgtcgcgaagatggataaccaggtgctgggctataaggacctggcagccatccctaaggacaaggccatcctggacatcgagagaccggatttgatgatctacgagcctcacttcacgtactctctacttgagcatgtcgaattaccccgatctcgggagcgctcactatctcccaagtcgacatcaccacccccttctcccgaggtgtgggcagacagtcgatctcccggcattatcagccaggctagcgcgccacggacgaccggaactccgcggacgagcctgccccacttccatcatcccgagacctcacggcctgacagtaatatttacaagaagccacctatttacaagcagcgagagtccgtgggcggtagcccccagactaaacatctcatagaagaccttataattgaatcatccaagttccccgccgctcagcctccagatcccaatcaaccagctaagattgaaactgattactggccatgcccaccttcccttgccgtcgtggaaaccgaatggaggaagcgtaaggcctcacggcgcggcgctgaagaagaggaagaagaggaggatgacgactcaggggaggaaatgaaagccctcagggaaaggcaacgagaagagctgtcaaaggtcactagcaaccttggcaaaatgatacttaaagaagagatggaaaagtccttgccgatcagaagaaagacacggtctctgcccgatcggacacctttccacacaagcctgcaccagggcacttccaaaagctcaagtctgccagcctatggccgaaccacattgtctagactccagagtaccgagttttcacccagcggcagtgagactggtagcccaggattacagatctacccctatgagatgcttgtggtgacgaacaagggtcggacgaaactgcctcccggagtggaccgtatgaggctggaacgccacctctctgcggaggatttttcccgcgtgtttgccatgagccctgaggagttcgggaagttagccctgtggaagcgaaacgagctcaagaaaaaagcatctctgttttag

SEQ ID NO: 114378 - DNA, 1152 bp, Artificial Sequence
  derived and/or modified sequence
atggagcggctgcagaagcagcccctgaccagccctggctctgtgagccccagccgggacagctctgtgcccggcagccccagcagcatcgtggccaagatggacaaccaggtgctgggctacaaggacctggccgccatccccaaggacaaggccatcctggacatcgagaggccagacctgatgatctatgagccccacttcacctacagcctgctggagcacgtggagctgcccaggagccgggagaggagcctgagccccaagagcaccagccccccacccagccctgaggtgtgggccgacagccgcagccctggcatcatcagccaggccagcgcccccaggaccaccggcacccccaggaccagcctgccccacttccaccaccctgagaccagcaggccagacagcaacatctacaagaagccacccatctacaagcagcgggagagcgtgggcggcagcccccagaccaagcacctgattgaggacctgatcatcgagagcagcaagtttcctgctgcccagcccccagaccccaaccagcctgccaagattgaaacagactactggccctgcccccccagcctggccgtggtggagacagagtggaggaagaggaaggccagcagaagaggagctgaggaggaggaggaggaggaggatgatgacagcggggaggagatgaaggccctgcgggagcggcagcgggaggagctgagcaaggtgaccagcaacctgggcaagatgatcctgaaggaggagatggagaagagcctgcccatccggaggaagaccaggagcctgcctgacaggacccccttccacaccagcctgcaccagggcaccagcaagagcagcagcctgcctgcctacggccgcaccaccctgagccggctgcagagcacagagttcagccccagcggcagcgagaccggcagccctggcctgcagatctacccctatgagatgctggtggtgaccaacaagggccgcaccaagctgcccccaggagtggacaggatgaggctggagcggcacctgtctgctgaggacttcagccgggtgtttgccatgagccctgaggagtttgggaagctggccctgtggaagagaaatgagctgaagaagaaggccagcctcttctag

SEQ ID NO: 114379 - DNA, 1152 bp, Artificial Sequence
  derived and/or modified sequence
atggagcggctgcagaagcagcccctgaccagccccggcagcgtgtcaccttcaagggattcctccgttccaggctcgcctagcagcatcgtggccaaaatggataaccaggtgctcgggtacaaagatcttgccgctatcccaaaagataaagctatactggacatcgagagaccagacttgatgatctacgagcctcactttacatatagtttattggagcatgtcgagctcccacgcagtagggaacggagcctgtcgccaaagtccacatctcccccaccctcaccagaagtgtgggccgatagcagaagccctggtattatctcccaggcaagtgcacccaggaccactgggaccccgcgtacatccttgccccacttccaccatcctgagacatctagacccgatagcaacatctataaaaagccgcccatttacaagcaacgggagtctgtgggaggttcaccacagaccaaacacctgatcgaggatctaattatagagagttccaagttcccagctgcacagccgccagatcccaatcagcccgccaaaatcgaaaccgattactggccctgtcccccaagtcttgctgtggttgagacagagtggcgtaaacggaaagcatctcgcagaggagctgaggaggaggaagaagaggaggatgatgattctggcgaagagatgaaggccctgcgggagaggcagagagaagagctgtcaaaagtgacatcgaatttgggaaagatgatccttaaggaggagatggaaaaaagccttccgatacgccgcaaaactcggtcacttcccgatcgcaccccgttccatacgagtctacatcaggggacctccaagtcctcttccctgcctgcctatggcaggactaccctcagcagattacagtccacagagttctctccgtctgggtccgagactggtagccctggactccagatttatccttatgaaatgctagtagttactaacaaaggtcggaccaagcttccaccaggtgtggaccggatgcggctcgagcgtcatctcagcgcagaagacttctctcgcgtttttgctatgagtcctgaagaattcggtaaactggccctatggaagcgcaatgagttaaagaagaaggcttctctgttctag

SEQ ID NO: 114380 - DNA, 1152 bp, Artificial Sequence
  derived and/or modified sequence
atggagcggctgcagaagcagcccctgaccagccccggcagcgtgagcccatccagagacagcagtgtgccaggcagtccctcatccattgtggccaaaatggataatcaggttctggggtataaggacctcgcagctatccccaaagacaaagcgatcctggacattgagaggcctgacctgatgatttatgagccacattttacttattctctgttggagcacgtggagcttcccagaagtagggaacggagcctgagccccaagtccacttctccaccaccaagtcccgaagtgtgggctgattctaggagtccaggaatcataagccaagcatccgctccccggacaaccggaacgccccgcacgtcactacctcacttccatcatccagagactagtcggccagactctaacatttacaagaagcctccgatatataaacagcgcgagagcgtcggtggttctccccagacaaaacatctcatcgaggatctaattatcgaaagctccaaatttcccgccgctcagccacccgatccgaaccaaccagccaaaattgaaaccgactactggccgtgcccaccatcgttggcagtggttgaaaccgagtggcggaagaggaaggcgtctcggcgcggggccgaggaagaggaggaggaagaagacgatgattccggggaggagatgaaggccctgcgggaacgacagcgagaagagttgtcaaaagtaaccagcaacctaggtaagatgattctgaaagaagaaatggaaaaatccctccctatccgtagaaaaactagaagcctccccgatcgtactccattccacacttccctgcatcagggcacctccaagagttcttccctgcccgcctatggccgaaccaccctttcacgtttgcaaagcacagagttttcacctagcgggagtgaaacagggtctcctgggctgcagatttacccctatgagatgctggtcgtgaccaacaaaggccgcacaaaattaccacccggcgttgacagaatgaggcttgagagacacttgtctgcagaagatttctcacgagtgttcgccatgtcacctgaggaatttgggaaattggccttgtggaagaggaacgagctgaagaaaaaggcttctttgttctag

SEQ ID NO: 114381 - DNA, 1152 bp, Artificial Sequence
  derived and/or modified sequence
atggagcggctgcagaagcagcccctgaccagccccggcagcgtgagtccatcgagggattcctctgttccaggaagcccaagcagtatcgtggcgaagatggacaaccaggtgctcggttacaaagacctggcagctattcccaaggacaaggccatcctcgatatcgagcggcccgacctgatgatttatgagccacacttcacctacagcctgttagaacacgtagaactcccacggtcgcgcgagcgatcgttgagccctaaatctacatcccccccgcccagtccagaggtgtgggccgattctcgctcacctggtatcattagtcaggcaagcgccccacgcacaacaggcacacctcgcacttcgcttcctcatttccatcaccctgaaactagtagaccggatagcaacatttataaaaagccacctatctataagcagcgagagagcgtgggtgggtcccctcagactaagcatttgatagaggatctgatcattgagtccagtaagttcccagctgcccagcctcccgatcccaatcagccagccaagattgagaccgactattggccttgcccccctagtctcgcggttgtggagacagaatggcggaaacggaaagcttccagaagaggcgcggaggaggaggaggaggaagaagacgacgatagtggtgaggagatgaaggctttgagggaacgccagcgtgaggagctgtccaaggtcacctccaacctgggaaaaatgatccttaaagaagagatggagaagagccttcccatccggaggaaaacacgaagcctgcctgatcgaacgcccttccatacatcattacatcagggaaccagtaagagcagctcacttcctgcatatggacggacgaccttgagcagactacagtccactgaattttctcccagtgggagcgagacgggatctcctggtctgcagatctacccatacgaaatgctggtggttactaacaagggtcgtacgaaactgcctcctggcgtggacaggatgaggctggaacggcacctctccgccgaagacttcagtcgggtatttgccatgtcacccgaagaatttgggaagctggccctctggaaaagaaatgaattaaaaaagaaggcttcactgttctag

SEQ ID NO: 114382 - DNA, 1152 bp, Artificial Sequence
  derived and/or modified sequence
atggagcgactacagaaacaaccattaacctcgcccggttctgtgagtccttctcgggactcgtccgttcctggttctccaagctcgatcgtcgcgaaaatggacaaccaggtactcggttataaggatttggccgctatcccaaaggacaaagccatcttggacatcgaacgcccagaccttatgatttatgaaccccatttcacatactccctactggagcacgtcgaacttccgcgtagccgtgagcggagtctttccccaaaatccacctctccgccacccagtcctgaggtatgggccgactcccggtcaccaggaatcatttcgcaggcctccgcccctcggactaccggcactccaaggacatccctcccacacttccaccaccccgagacatctcggcctgattccaacatatacaagaaacctcccatctacaagcagcgagaaagcgtcggaggttcaccacaaacaaagcacctgattgaggatctcattattgagtcttccaaatttcctgcagcccagcccccagacccaaaccagcccgctaagatagagacagactactggccatgtccccctagcttggccgttgtagaaactgagtggaggaaacgcaaagccagcagaaggggcgctgaagaagaagaggaggaggaagacgacgactctggagaggaaatgaaggctctgcgcgaaagacagcgggaagaactttccaaagtcacttccaacctaggcaaaatgatcctaaaggaggaaatggagaaatccctgccaatccggcgtaaaaccagatccctgccagatagaacaccgtttcacacctccctgcaccaggggacttccaaatcttcttccctccctgcctacggtaggacaacactgtcaaggctacaaagtaccgagttctccccaagtggaagcgagacgggttcccctggtctgcagatttacccttatgagatgctggttgtgacgaacaaggggagaaccaagcttcccccaggcgtggaccgtatgagattggagaggcacctgagcgccgaggacttttcccgagtatttgcaatgtccccagaggagtttggaaagctcgctctgtggaaacgtaacgagctcaagaaaaaagcatcccttttttag

SEQ ID NO: 114383 - DNA, 1152 bp, Artificial Sequence
  derived and/or modified sequence
atggagcgtctgcaaaagcagcctcttacgtccccagggtcagtgtcgccatctcgcgactcaagcgtgcccggttctcctagctcgatcgtggcaaagatggataaccaagtcctcggatacaaggaccttgcagcaatacccaaggacaaagcgatactggacatagagcggcctgacctgatgatttacgagccccactttacttatagcctcttagaacacgtagagttgcccagatcccgggagagatctctgtccccaaaatctacctctccaccaccttccccagaagtgtgggccgactctcgaagccccggtattatctctcaagcttccgctccccgtactacagggacgcctaggaccagtctcccccattttcatcaccctgaaacttcaagaccagattccaacatttacaagaaaccaccaatttataaacagagggaatccgttggcggttccccccagactaaacatttaatcgaggaccttattatcgaaagttcgaagtttcccgctgcacagcctccagaccctaaccagccagccaaaatcgaaactgactactggccctgccctccgagtttggcagtggtcgagactgaatggaggaaaagaaaggctagcaggaggggcgctgaggaggaggaagaggaagaagatgatgactctggagaagagatgaaagccctgagagaacgccaacgagaggagttgtctaaggttaccagtaatttgggcaaaatgatacttaaggaagagatggaaaagagccttccgatccggagaaaaactcgtagcctgccagaccgcacccctttccacacatcactccatcaaggcaccagcaaatcttcatcactacctgcctacggacggactaccctgagccgtctgcaaagtacggaatttagtcctagcggtagtgagacaggatccccaggcttacagatttatccctacgagatgctagtggttacaaataaaggtcgaactaaactgcctccaggggttgatcgaatgcggctggaacggcaccttagtgccgaagactttagcagggtcttcgcgatgtcgccagaggaattcggaaaactagccttatggaagcggaacgagctgaagaaaaaagcgtcactgttctag

SEQ ID NO: 114384 - DNA, 1152 bp, Artificial Sequence
  derived and/or modified sequence
atggaaagacttcagaaacagccgctcaccagcccaggcagcgtgtccccctcaagggacagctctgtgcctggaagcccttcaagcattgtggcgaaaatggacaaccaggttctgggctataaggacttagccgctattcccaaggataaagctattctggatatcgaacgtcctgatctgatgatttacgaacctcacttcacctacagcctactggaacacgtggaactgccccgaagcagggaaagatcattatctcccaagagcacctccccacctcctagtcccgaggtgtgggcagattctagaagtccaggcattatcagccaggcatctgctccacgcacaactggcacccccaggacctccctgccgcacttccatcaccccgaaacttcccgtcctgatagcaacatttacaaaaaacctccgatctataagcagagggagagcgtaggaggcagtccccagactaaacaccttatagaagacctaatcattgagagctctaaattccccgcagcccagcccccagatcccaaccagcctgcaaaaattgagacggactactggccttgccctccctccttggctgtggttgagactgaatggcgcaagaggaaagcttcccgcaggggcgcagaagaggaagaagaagaggaagatgatgatagcggcgaggagatgaaggcgctccgcgagcggcagagagaggagttgtccaaagtgacctctaatttaggaaaaatgatacttaaggaagagatggagaaaagcctgcccattcggcgaaaaactcgtagcctgcccgaccgaacaccgttccacaccagcctgcatcagggtacatctaagtcctcaagcctgcccgcttatggaagaactacactgagtaggctgcagagtacagagttctcccctagtggtagtgaaacaggctccccgggtctccagatctacccttatgagatgctggtggtgaccaataaggggaggaccaaactcccgccaggggtggatagaatgaggctggaacggcatctgtcagctgaggacttttcacgggttttcgccatgtctccagaagagttcggcaagcttgccctatggaagcgtaacgagctcaaaaagaaagcttctttattttag

SEQ ID NO: 114385 - DNA, 1152 bp, Artificial Sequence
  derived and/or modified sequence
atggagagactgcagaagcagcccctgaccagccccggcagcgtgagccccagcagagacagcagcgtgcccggcagccccagcagcatcgtggccaagatggacaaccaggtgctgggctacaaggacctggccgccatccccaaggacaaggccatcctggacatcgagagacccgacctgatgatctacgagccccacttcacctacagcctgctggagcacgtggagctgcccagaagcagagagagaagcctgagccccaagagcaccagccccccccccagccccgaggtgtgggccgacagcagaagccccggcatcatcagccaggccagcgcccccagaaccaccggcacccccagaaccagcctgccccacttccaccaccccgagaccagcagacccgacagcaacatctacaagaagccccccatctacaagcagagagagagcgtgggcggcagcccccagaccaagcacctgatcgaggacctgatcatcgagagcagcaagttccccgccgcccagccccccgaccccaaccagcccgccaagatcgagaccgactactggccctgcccccccagcctggccgtggtggagaccgagtggagaaagagaaaggccagcagaagaggcgccgaggaggaggaggaggaggaggacgacgacagcggcgaggagatgaaggccctgagagagagacagagagaggagctgagcaaggtgaccagcaacctgggcaagatgatcctgaaggaggagatggagaagagcctgcccatcagaagaaagaccagaagcctgcccgacagaacccccttccacaccagcctgcaccagggcaccagcaagagcagcagcctgcccgcctacggcagaaccaccctgagcagactgcagagcaccgagttcagccccagcggcagcgagaccggcagccccggcctgcagatctacccctacgagatgctggtggtgaccaacaagggcagaaccaagctgccccccggcgtggacagaatgagactggagagacacctgagcgccgaggacttcagcagagtgttcgccatgagccccgaggagttcggcaagctggccctgtggaagagaaacgagctgaagaagaaggccagcctgttctag

SEQ ID NO: 114386 - DNA, 2601 bp, Artificial Sequence
  derived and/or modified sequence
agagaagcctatcgacagggcctgggggagggaggaggcagcagggccggagtccacccaggacatctggcaccagtgaccttgtggggaaaggagccaagaacggggcgtcggggggcctgggacccccctgcctgagagatacaggaatcctggccccgtgttgtggacacaagcgcccatcctcaaggtcctgagaactcctgaacttccaaagcctggagagtcaccgccgagggatgaggacgcgccagcccgggggaacgcgccagctgctttcgcggccccaagcgcgcagcgcccagcagccgcgccgagcctgacacgctgtcctctcccctcgcgcacagggctctgcgagtgacccggcgggcgagctccgtgctgcatggaacggctgcagaagcaaccacttacctcccccgggagcgtgagcccctcccgagattccagtgtgcctggctctccctccagcatcgtggccaagatggacaatcaggtgctgggctacaaggacctggctgccatccccaaggacaaggccatcctggacatcgagcggcccgacctcatgatctacgagcctcacttcacttattccctcctggaacacgtggagctgcctcgcagccgcgagcgctcgctgtcacccaaatccacatcccccccaccatccccagaggtgtgggcggacagccggtcgcctggaatcatctctcaggcctcggcccccagaaccactggaaccccccggaccagcctgccccatttccaccaccctgagacctcccgcccagattccaacatctacaagaagcctcccatctataagcagagagagtccgtgggaggcagccctcagaccaagcacctcatcgaggatctcatcatcgagtcatccaagtttcctgcagcccagcccccagaccccaaccagccagccaaaatcgaaaccgactactggccatgccccccgtctctggctgttgtggagacagaatggaggaagcggaaggcgtctcggaggggagcagaggaagaggaggaggaggaagatgacgactctggagaggagatgaaggctctcagggagcgtcagagagaggaactcagtaaggttacttccaacttgggaaagatgatcttgaaagaagagatggaaaagtcattgccgatccgaaggaaaacccgctctctgcctgaccggacacccttccatacctccttgcaccagggaacgtctaaatcttcctctctccccgcctatggcaggaccaccctgagccggctacagtccacagagttcagcccatcagggagtgagactggaagcccaggcctgcagatctatccctatgaaatgctagtggtgaccaacaaggggcgaaccaagctgccaccgggggtggatcggatgcggcttgagaggcatctgtctgccgaggacttctcaagggtatttgccatgtcccctgaagagtttggcaagctggctctgtggaagcggaatgagctcaagaagaaggcctctctcttctgatggcccccacctgctccgggacggcccccttacccctgctgcttcagggtttttccccggcgggttgggaggggcaggaggtggggtggaaatagggtgggctcctttcctcaggtagagtggggggccaaaacctctgcagtccccggcagtgagctatggactttcttccccctcacaaggctgggggcctcctgctctcgtccctggccctccctgcacagggcaaagccagtctgggctctggcacacagagttcatgtttgcgccctctccctgcccctcaccccagagggtgaggaggaatgaggggcattggtggttaggccggttggctgtcttgaacagctggagggaagatgcaggggtgggaagcggccaggcagaaagagctccaggctcttgtgtcgcccacccagccctcccatactcactcctgacagctttcctgcactgcagcctcctgctcctctgactctagtgggaacaggccccagctcagcctccggcagggaggtcacccctccacttcagcttgccctgacctccgctcgcaaaccccgagcttccaagccttttgctccagccctgcggcttccccagaagcctgggcttagggtggagatgccgcctacacacgatcctggccctccacctgcctccaggccacgaaatgggaattccagcactaagccaggcaccgggcagaagctgggccttccgcctcccttggatggggtcaagaggccaggcctggcacattttggagtgtcctggctaccagctctcacctacacccacgcacccccccacacactatgctctctcaagaatgtaatttattggggcccccccagctgctttcctcacctgcccctgccctaccttacacccccagcttgacttctttccagtccacgtgtgtatataatgatatctatatttttgcccaggtctgggtattgctcctgcccagaccctgacatccctttccactgtgtgtgtgaccatgctgggggagggggactctgcttggaattaaaaggttgcattgggtccct

SEQ ID NO: 114387 - DNA, 2573 bp, Artificial Sequence
  derived and/or modified sequence
gagaaaagatgaagaaagccaagaaaagggaccagaagagaaagcagaaagacaggaggaagaaagggagagagggccaggcagtcgcactgtgaacagaacaggagaaggcgaagcggggcaaagttccctgcccaccgacgccagcctgcttggatgacttgcctcgtttcataattcacttactgtctgcaccagccggcctccagcctggctggaccctgctgcctgtgtggcccggagccagaggcccccacactcccagctgctcttctacagatgccatcaacgagcaggactctgggtggctccactgtctaagggctctgcgagtgacccggcgggcgagctccgtgctgcatggaacggctgcagaagcaaccacttacctcccccgggagcgtgagcccctcccgagattccagtgtgcctggctctccctccagcatcgtggccaagatggacaatcaggtgctgggctacaaggacctggctgccatccccaaggacaaggccatcctggacatcgagcggcccgacctcatgatctacgagcctcacttcacttattccctcctggaacacgtggagctgcctcgcagccgcgagcgctcgctgtcacccaaatccacatcccccccaccatccccagaggtgtgggcggacagccggtcgcctggaatcatctctcaggcctcggcccccagaaccactggaaccccccggaccagcctgccccatttccaccaccctgagacctcccgcccagattccaacatctacaagaagcctcccatctataagcagagagagtccgtgggaggcagccctcagaccaagcacctcatcgaggatctcatcatcgagtcatccaagtttcctgcagcccagcccccagaccccaaccagccagccaaaatcgaaaccgactactggccatgccccccgtctctggctgttgtggagacagaatggaggaagcggaaggcgtctcggaggggagcagaggaagaggaggaggaggaagatgacgactctggagaggagatgaaggctctcagggagcgtcagagagaggaactcagtaaggttacttccaacttgggaaagatgatcttgaaagaagagatggaaaagtcattgccgatccgaaggaaaacccgctctctgcctgaccggacacccttccatacctccttgcaccagggaacgtctaaatcttcctctctccccgcctatggcaggaccaccctgagccggctacagtccacagagttcagcccatcagggagtgagactggaagcccaggcctgcagatctatccctatgaaatgctagtggtgaccaacaaggggcgaaccaagctgccaccgggggtggatcggatgcggcttgagaggcatctgtctgccgaggacttctcaagggtatttgccatgtcccctgaagagtttggcaagctggctctgtggaagcggaatgagctcaagaagaaggcctctctcttctgatggcccccacctgctccgggacggcccccttacccctgctgcttcagggtttttccccggcgggttgggaggggcaggaggtggggtggaaatagggtgggctcctttcctcaggtagagtggggggccaaaacctctgcagtccccggcagtgagctatggactttcttccccctcacaaggctgggggcctcctgctctcgtccctggccctccctgcacagggcaaagccagtctgggctctggcacacagagttcatgtttgcgccctctccctgcccctcaccccagagggtgaggaggaatgaggggcattggtggttaggccggttggctgtcttgaacagctggagggaagatgcaggggtgggaagcggccaggcagaaagagctccaggctcttgtgtcgcccacccagccctcccatactcactcctgacagctttcctgcactgcagcctcctgctcctctgactctagtgggaacaggccccagctcagcctccggcagggaggtcacccctccacttcagcttgccctgacctccgctcgcaaaccccgagcttccaagccttttgctccagccctgcggcttccccagaagcctgggcttagggtggagatgccgcctacacacgatcctggccctccacctgcctccaggccacgaaatgggaattccagcactaagccaggcaccgggcagaagctgggccttccgcctcccttggatggggtcaagaggccaggcctggcacattttggagtgtcctggctaccagctctcacctacacccacgcacccccccacacactatgctctctcaagaatgtaatttattggggcccccccagctgctttcctcacctgcccctgccctaccttacacccccagcttgacttctttccagtccacgtgtgtatataatgatatctatatttttgcccaggtctgggtattgctcctgcccagaccctgacatccctttccactgtgtgtgtgaccatgctgggggagggggactctgcttggaattaaaaggttgcattgggtccct

SEQ ID NO: 114388 - DNA, 2658 bp, Artificial Sequence
  derived and/or modified sequence
aagacaggaggaagaaagggagagagggccaggcagtcgcactgtgaacagaacaggagaaggcgaagcggggcaaagttccctgcccaccgacgccagcctgcttggatgacttgcctcgtttcataattcacttactgtctgcaccagccggcctccagcctggctggaccctgctgcctgtgtggcccggagccagaggcccccacactcccagctgctcttctacagatgccatcaacgagcaggactctgggtggctccactgtctaagcctggagagtcaccgccgagggatgaggacgcgccagcccgggggaacgcgccagctgctttcgcggccccaagcgcgcagcgcccagcagccgcgccgagcctgacacgctgtcctctcccctcgcgcacagggctctgcgagtgacccggcgggcgagctccgtgctgcatggaacggctgcagaagcaaccacttacctcccccgggagcgtgagcccctcccgagattccagtgtgcctggctctccctccagcatcgtggccaagatggacaatcaggtgctgggctacaaggacctggctgccatccccaaggacaaggccatcctggacatcgagcggcccgacctcatgatctacgagcctcacttcacttattccctcctggaacacgtggagctgcctcgcagccgcgagcgctcgctgtcacccaaatccacatcccccccaccatccccagaggtgtgggcggacagccggtcgcctggaatcatctctcaggcctcggcccccagaaccactggaaccccccggaccagcctgccccatttccaccaccctgagacctcccgcccagattccaacatctacaagaagcctcccatctataagcagagagagtccgtgggaggcagccctcagaccaagcacctcatcgaggatctcatcatcgagtcatccaagtttcctgcagcccagcccccagaccccaaccagccagccaaaatcgaaaccgactactggccatgccccccgtctctggctgttgtggagacagaatggaggaagcggaaggcgtctcggaggggagcagaggaagaggaggaggaggaagatgacgactctggagaggagatgaaggctctcagggagcgtcagagagaggaactcagtaaggttacttccaacttgggaaagatgatcttgaaagaagagatggaaaagtcattgccgatccgaaggaaaacccgctctctgcctgaccggacacccttccatacctccttgcaccagggaacgtctaaatcttcctctctccccgcctatggcaggaccaccctgagccggctacagtccacagagttcagcccatcagggagtgagactggaagcccaggcctgcagatctatccctatgaaatgctagtggtgaccaacaaggggcgaaccaagctgccaccgggggtggatcggatgcggcttgagaggcatctgtctgccgaggacttctcaagggtatttgccatgtcccctgaagagtttggcaagctggctctgtggaagcggaatgagctcaagaagaaggcctctctcttctgatggcccccacctgctccgggacggcccccttacccctgctgcttcagggtttttccccggcgggttgggaggggcaggaggtggggtggaaatagggtgggctcctttcctcaggtagagtggggggccaaaacctctgcagtccccggcagtgagctatggactttcttccccctcacaaggctgggggcctcctgctctcgtccctggccctccctgcacagggcaaagccagtctgggctctggcacacagagttcatgtttgcgccctctccctgcccctcaccccagagggtgaggaggaatgaggggcattggtggttaggccggttggctgtcttgaacagctggagggaagatgcaggggtgggaagcggccaggcagaaagagctccaggctcttgtgtcgcccacccagccctcccatactcactcctgacagctttcctgcactgcagcctcctgctcctctgactctagtgggaacaggccccagctcagcctccggcagggaggtcacccctccacttcagcttgccctgacctccgctcgcaaaccccgagcttccaagccttttgctccagccctgcggcttccccagaagcctgggcttagggtggagatgccgcctacacacgatcctggccctccacctgcctccaggccacgaaatgggaattccagcactaagccaggcaccgggcagaagctgggccttccgcctcccttggatggggtcaagaggccaggcctggcacattttggagtgtcctggctaccagctctcacctacacccacgcacccccccacacactatgctctctcaagaatgtaatttattggggcccccccagctgctttcctcacctgcccctgccctaccttacacccccagcttgacttctttccagtccacgtgtgtatataatgatatctatatttttgcccaggtctgggtattgctcctgcccagaccctgacatccctttccactgtgtgtgtgaccatgctgggggagggggactctgcttggaattaaaaggttgcattgggtccct

SEQ ID NO: 114389 - protein, 365 aa, Artificial Sequence
  derived and/or modified sequence
MERLQKAKMDNQVLGYKDLAAIPKDKAILDIERPDLMIYEPHFTYSLLEHVELPRSREVWADSRSPGIISQASAPRTTGTPRTSLPHFHHPETSRPDSNIYKKPPIYKQRESVGGSPQTKHLIEDLIIESSKFPAAQPPDPNQPAKIETDYWPCPPSLAVVETEWRKRKASRRGAEEEEEEEDDDSGEEMKALRERQREELSKVTSNLGKMILKEEMEKSLPIRRKTRSLPDRTPFHTSLHQGTSKSSSLPAYGRTTLSRLQSTEFSPSGSETGSPGLQNGEGQRGRMDRGNSLPCVLEQKIYPYEMLVVTNKGRTKLPPGVDRMRLERHLSAEDFSRVFAMSPEEFGKLALWKRNELKKKASLF

SEQ ID NO: 114390 - DNA, 1098 bp, Artificial Sequence
  derived and/or modified sequence
atggagcgtttgcagaaggcaaaaatggataatcaggtgcttggctacaaggacctcgctgcgatacccaaggataaagctatactggatattgagagacctgatttgatgatatatgagccacatttcacttatagcttgctggagcatgtagagctaccgcggagtagggaggtctgggctgattcaagatcgcctgggataatcagccaagcaagtgcccctcgaacaaccggaacaccacgcacttctctgccacatttccaccaccctgagaccagccgaccagattctaatatatacaagaaaccgccaatctacaaacaaagagagtccgtgggtggcagcccacaaaccaagcatctgatcgaggatctcatcattgagtctagtaagttcccagcagcccaaccgcccgaccccaaccagccagccaagattgaaacggattattggccctgcccaccgagtcttgccgtcgtagagacagagtggaggaaaaggaaagccagcaggaggggtgctgaggaagaggaagaggaagaggatgatgacagcggggaggaaatgaaggcgctgcgggagcgtcaaagagaagaattatcaaaggtaacatctaatctggggaaaatgattctaaaagaggagatggagaaatcgctgcctatcaggcgaaagaccagaagcttgccagataggactccatttcacaccagtctgcaccaggggaccagcaagtcttctagcttgcccgcatacggccgtaccacactgtctcgattacagagtactgaattcagcccatctgggagcgaaaccgggtctccaggtcttcagaacggggaaggccagagggggagaatggacagggggaacagtctgccgtgtgtcctggagcagaagatctatccttacgagatgcttgtcgtgacaaataaggggcgaactaaactgcctcctggagtcgaccgtatgaggcttgagagacatcttagtgccgaagattttagtagggtctttgcgatgagccccgaagaatttggcaaactcgccctgtggaagaggaatgaactcaagaagaaggcatccctgttttag

SEQ ID NO: 114391 - DNA, 1098 bp, Artificial Sequence
  derived and/or modified sequence
atggagcggctgcagaaggccaagatggacaaccaggtgctgggctacaaggacctggccgccatccccaaggacaaggccatcctggacatcgagaggccagacctgatgatctatgagccccacttcacctacagcctgctggagcacgtggagctgcccaggagccgggaggtgtgggccgacagccgcagccctggcatcatcagccaggccagcgcccccaggaccaccggcacccccaggaccagcctgccccacttccaccaccctgagaccagcaggccagacagcaacatctacaagaagccacccatctacaagcagcgggagagcgtgggcggcagcccccagaccaagcacctgattgaggacctgatcatcgagagcagcaagtttcctgctgcccagcccccagaccccaaccagcctgccaagattgaaacagactactggccctgcccccccagcctggccgtggtggagacagagtggaggaagaggaaggccagcagaagaggagctgaggaggaggaggaggaggaggatgatgacagcggggaggagatgaaggccctgcgggagcggcagcgggaggagctgagcaaggtgaccagcaacctgggcaagatgatcctgaaggaggagatggagaagagcctgcccatccggaggaagaccaggagcctgcctgacaggacccccttccacaccagcctgcaccagggcaccagcaagagcagcagcctgcctgcctacggccgcaccaccctgagccggctgcagagcacagagttcagccccagcggcagcgagaccggcagccctggcctgcagaatggagagggccagaggggccgcatggaccggggcaacagcctgccctgtgtgctggagcagaagatctacccctatgagatgctggtggtgaccaacaagggccgcaccaagctgcccccaggagtggacaggatgaggctggagcggcacctgtctgctgaggacttcagccgggtgtttgccatgagccctgaggagtttgggaagctggccctgtggaagagaaatgagctgaagaagaaggccagcctcttctag

SEQ ID NO: 114392 - DNA, 1098 bp, Artificial Sequence
  derived and/or modified sequence
atggagcggctgcagaaggccaagatggacaaccaggtgctgggctacaaggacctggccgcaatccccaaggacaaggcaattctggacatagagcggcctgacctgatgatatacgagcctcacttcacctattcactgctagaacacgtggaactgccaaggtctcgcgaagtttgggctgactcccggtcccccgggataattagtcaggcgtccgccccacgcacgaccggcactcccaggaccagtctgccgcactttcatcaccccgaaacttcacgtcccgatagcaacatttacaaaaaaccacctatctacaagcagcgggagtcagtgggaggatccccccaaaccaagcacctcattgaggatctcatcatcgagtcatccaagtttcctgcggcgcagccccccgaccctaatcaacctgctaaaatcgaaacagattattggccttgtccaccctcgctagccgtggtcgaaaccgagtggcgaaaaagaaaagcctcccggcgcggggcagaggaggaagaggaggaagaagatgatgacagcggggaggaaatgaaggcgctccgggagaggcaaagggaagaattgtccaaggtgacgtccaacctcgggaagatgatactgaaggaagagatggagaaatccctcccaatccgaaggaagactagatccctccccgatcgaactccgtttcataccagcctccaccagggtacatccaagtcttcatccctgcctgcgtatggcagaactacactgtccagactccagagcacagaatttagtccatccggctctgaaacaggcagccctggcttacagaatggggaaggacaaagggggcgcatggaccgtggaaattcactcccttgtgttctggaacagaagatctacccttacgagatgctggtggtcaccaataaaggtagaaccaagctgccaccgggagtcgatagaatgcgtctggaaagacacctctctgccgaggatttctcccgcgtgtttgccatgtcaccggaagagtttggaaaactcgcgctctggaaacgcaatgagttaaagaagaaagcaagcttattctag

SEQ ID NO: 114393 - DNA, 1098 bp, Artificial Sequence
  derived and/or modified sequence
atggaacgactgcagaaagccaaaatggataatcaggtcctaggctacaaggacctggctgccataccaaaagataaagccatattagacattgagcgacccgatctgatgatttacgagcctcactttacctatagccttctggaacatgtcgagttgcctcgctcccgagaggtgtgggctgattcacgaagtcccggaatcattagccaggcctccgcccctcggaccaccgggactccacgcactagcctcccgcactttcaccaccccgaaacctcacgccctgacagcaatatctataagaaacccccaatttataaacaacgcgaatctgtgggagggtcgccacagacaaaacatctcatcgaggacttgatcatcgagtcttccaaattcccagctgcgcagccaccagaccccaaccagcctgccaagattgagaccgattactggccctgcccaccatctctggctgtcgtggagacagaatggcggaagagaaaagccagccggaggggggcagaggaagaggaagaggaggaggatgatgattcaggagaggagatgaaagccctgcgagagcgtcagagagaagaactctcgaaagtaaccagtaacctaggcaagatgatcctgaaagaggagatggagaagtcccttcctatacgacggaaaactcgctcgctgcctgacagaacacccttccatacctccctgcaccagggaacaagtaaatcatcctcgctgcccgcatacggacgtactacgttaagccggctccagtcaacagaattctccccaagcggatccgagaccggcagtcccggactgcaaaacggcgaaggacaaagaggaaggatggaccgaggaaactccttaccctgcgtgctggagcagaagatttatccttacgagatgctggttgttacaaacaagggccgtacaaagctgccaccaggtgtcgacagaatgcgtcttgaaaggcacttgtctgcagaggacttctcccgggtgttcgccatgagtcccgaagagttcggtaagctcgcgttgtggaaaaggaacgagttaaagaaaaaagcctctcttttttag

SEQ ID NO: 114394 - DNA, 1098 bp, Artificial Sequence
  derived and/or modified sequence
atggagagactgcagaaggccaagatggacaaccaggtgctgggctacaaggacctggccgccatccccaaggacaaggccatcctggacatcgagagacccgacctgatgatctacgagccccacttcacctacagcctgctggagcacgtggagctgcccagaagcagagaggtgtgggccgacagcagaagccccggcatcatcagccaggccagcgcccccagaaccaccggcacccccagaaccagcctgccccacttccaccaccccgagaccagcagacccgacagcaacatctacaagaagccccccatctacaagcagagagagagcgtgggcggcagcccccagaccaagcacctgatcgaggacctgatcatcgagagcagcaagttccccgccgcccagccccccgaccccaaccagcccgccaagatcgagaccgactactggccctgcccccccagcctggccgtggtggagaccgagtggagaaagagaaaggccagcagaagaggcgccgaggaggaggaggaggaggaggacgacgacagcggcgaggagatgaaggccctgagagagagacagagagaggagctgagcaaggtgaccagcaacctgggcaagatgatcctgaaggaggagatggagaagagcctgcccatcagaagaaagaccagaagcctgcccgacagaacccccttccacaccagcctgcaccagggcaccagcaagagcagcagcctgcccgcctacggcagaaccaccctgagcagactgcagagcaccgagttcagccccagcggcagcgagaccggcagccccggcctgcagaacggcgagggccagagaggcagaatggacagaggcaacagcctgccctgcgtgctggagcagaagatctacccctacgagatgctggtggtgaccaacaagggcagaaccaagctgccccccggcgtggacagaatgagactggagagacacctgagcgccgaggacttcagcagagtgttcgccatgagccccgaggagttcggcaagctggccctgtggaagagaaacgagctgaagaagaaggccagcctgttctag

SEQ ID NO: 114395 - DNA, 1569 bp, Artificial Sequence
  derived and/or modified sequence
gagatgcgccgagggatggaggtgtatgtcaccgaggaggctgctgcgctcctgccccacgccctgggcccttgaagcctggagagtcaccgccgagggatgaggacgcgccagcccgggggaacgcgccagctgctttcgcggccccaagcgcgcagcgcccagcagccgcgccgagcctgacacgctgtcctctcccctcgcgcacagggctctgcgagtgacccggcgggcgagctccgtgctgcatggaacggctgcagaaggccaagatggacaatcaggtgctgggctacaaggacctggctgccatccccaaggacaaggccatcctggacatcgagcggcccgacctcatgatctacgagcctcacttcacttattccctcctggaacacgtggagctgcctcgcagccgcgaggtgtgggcggacagccggtcgcctggaatcatctctcaggcctcggcccccagaaccactggaaccccccggaccagcctgccccatttccaccaccctgagacctcccgcccagattccaacatctacaagaagcctcccatctataagcagagagagtccgtgggaggcagccctcagaccaagcacctcatcgaggatctcatcatcgagtcatccaagtttcctgcagcccagcccccagaccccaaccagccagccaaaatcgaaaccgactactggccatgccccccgtctctggctgttgtggagacagaatggaggaagcggaaggcgtctcggaggggagcagaggaagaggaggaggaggaagatgacgactctggagaggagatgaaggctctcagggagcgtcagagagaggaactcagtaaggttacttccaacttgggaaagatgatcttgaaagaagagatggaaaagtcattgccgatccgaaggaaaacccgctctctgcctgaccggacacccttccatacctccttgcaccagggaacgtctaaatcttcctctctccccgcctatggcaggaccaccctgagccggctacagtccacagagttcagcccatcagggagtgagactggaagcccaggtctccagaacggagagggccagagggggaggatggaccgggggaactccctgccctgtgtgctggagcagaagatctatccctatgaaatgctagtggtgaccaacaaggggcgaaccaagctgccaccgggggtggatcggatgcggcttgagaggcatctgtctgccgaggacttctcaagggtatttgccatgtcccctgaagagtttggcaagctggctctgtggaagcggaatgagctcaagaagaaggcctctctcttctgatggcccccacctgctccgggacggcccccttacccctgctgcttcagggtttttccccggcgggttgggaggggcaggaggtggggtggaaatagggtgggctcctttcctcaggtagagtggggggccaaaacctctgcagtccccggcagtgagctatggactttcttccccctcacaaggctgggggcctcctgctctcgtccctggccctccctgcaca

SEQ ID NO: 114396 - protein, 116 aa, Artificial Sequence
  derived and/or modified sequence
MPSPGTVCSLLLLGMLWLDLAMAGSSFLSPEHQRVQRKESKKPPAKLQPRALAGWLRPEDGGQAEGAEDELEVRFNAPFDVGIKLSGVQYQQHSQALGKFLQDILWEEAKEAPADK

SEQ ID NO: 114397 - DNA, 351 bp, Artificial Sequence
  derived and/or modified sequence
atgccttctcccggtacagtgtgttccctcctgttgctggggatgctgtggctggacctcgccatggccgggagttccttcctcagcccagaacatcagagagtacagaggaaagaatccaaaaagcctcccgccaaacttcaaccacgcgccttagccggctggctgcgtcccgaagacggcgggcaggctgaaggcgccgaagatgagttggaagtgcgttttaatgctccctttgacgtgggaattaagctaagtggcgttcagtatcaacaacattcacaagccctcgggaaattcctgcaagacattctttgggaggaggccaaggaagcccccgccgacaagtag

SEQ ID NO: 114398 - DNA, 102 bp, Artificial Sequence
  derived and/or modified sequence
atgccctcacctgggaccgtgtgctccctgctgctgctgggtatgctgtggttagatctggctatggctgggagctcctttctcagccctgaacaccagtag

SEQ ID NO: 114399 - DNA, 351 bp, Artificial Sequence
  derived and/or modified sequence
atgcccagccctggaactgtgtgtagtctgctcctattgggaatgctctggttggatctggcaatggcgggctccagctttctgtcacctgagcaccagcgtgtccagcggaaggagtctaagaagcccccagccaaattgcagccccgcgccctggcgggctggctgagacctgaagacggcggtcaagctgagggcgccgaagatgagttggaggtgagattcaatgcacccttcgacgtagggatcaaattgtctggcgtgcagtatcagcaacactcccaagcgttaggaaaatttctccaggacatactgtgggaagaggctaaggaagccccagctgataagtag

SEQ ID NO: 114400 - DNA, 351 bp, Artificial Sequence
  derived and/or modified sequence
atgccgagccctggcaccgtctgtagcctcctgttgctcgggatgttatggcttgatctggccatggccggatcatcattcctctcaccagaacatcaacgcgtccagcgtaaggagtccaagaaaccacctgctaaactccagccgcgggccttggccggctggttgcggcccgaagatggcggtcaggcggaaggggcggaagacgaactggaggttaggtttaacgctccctttgacgtgggcatcaagctgtccggggtgcagtaccagcagcactcacaggcgctgggcaagttcctgcaggatatattgtgggaagaggcaaaggaggctcccgctgacaagtag

SEQ ID NO: 114401 - DNA, 1313 bp, Artificial Sequence
  derived and/or modified sequence
gtggatgtttacttgctggtggtcttatctaagatcaacattggcagctgtgcccggagaggcctccagggtccaggtccaatgcacttccctctcagaagaggcatccgctaaaatagggaccaaagctgctggagggaggcaaggcaagctgctatgtgaaaaaacgccaggccaggcagtcatgtcacacctggcagaaatgactgaagcatagccactggctgaagttatccccacacccactctctggagaggatgatcaggagcagtctgctcaaccgggaggtgggactcctcctcgggaaggtgtagaatcaccagcctggctccctgcggactcccggggctcacagaggccagagcagcaacagcacatgggaaacaacggggcgctggactggggaggtctcagagctctcctagtgatgacagcctcattttacccagggagaaagggcgagtaagctaaggtcacacagcaacaaagctgcacccagaccccagagccactctcctccctccctcctccaccagggccatgcccacttggggcaccccgccaccgtgttccagggacagctggagcacatgcttcttccctcgccaacccagcaattccgcagggcatctgacctccactgttgacttctacccagaggacaagaacatttttagttcccaaggaatgtacatcagccccacggaagctaggccacctctgggatggggttgctggtttagaacaaacgccagtcatcctatataaggacctgacagccaccaggcaccacctccgccaggaactgcaggcccacctgtctgcaacccagctgaggccatgccctccccagggaccgtctgcagcctcctgctcctcggcatgctctggctggacttggccatggcaggctccagcttcctgagccctgaacaccagagagtccagagaaaggagtcgaagaagccaccagccaagctgcagccccgagctctagcaggctggctccgcccggaagatggaggtcaagcagaaggggcagaggatgaactggaagtccggttcaacgccccctttgatgttggaatcaagctgtcaggggttcagtaccagcagcacagccaggccctggggaagtttcttcaggacatcctctgggaagaggccaaagaggccccagccgacaagtgatcgcccacaagccttactcacctctctctaagtttagaagcgctcatctggcttttcgcttgcttctgcagcaactcccacgactgttgtacaagctcaggaggcgaataaatgttcaaac

SEQ ID NO: 114402 - DNA, 856 bp, Artificial Sequence
  derived and/or modified sequence
gtggatgtttacttgctggtggtcttatctaagatcaacattggcagctgtgcccggagaggcctccagggtccagggccatgcccacttggggcaccccgccaccgtgttccagggacagctggagcacatgcttcttccctcgccaacccagcaattccgcagggcatctgacctccactgttgacttctacccagaggacaagaacatttttagttcccaaggaatgtacatcagccccacggaagctaggccacctctgggatggggttgctggtttagaacaaacgccagtcatcctatataaggacctgacagccaccaggcaccacctccgccaggaactgcaggcccacctgtctgcaacccagctgaggccatgccctccccagggaccgtctgcagcctcctgctcctcggcatgctctggctggacttggccatggcaggctccagcttcctgagccctgaacaccagagagtccagagaaaggagtcgaagaagccaccagccaagctgcagccccgagctctagcaggctggctccgcccggaagatggaggtcaagcagaaggggcagaggatgaactggaagtccggttcaacgccccctttgatgttggaatcaagctgtcaggggttcagtaccagcagcacagccaggccctggggaagtttcttcaggacatcctctgggaagaggccaaagaggccccagccgacaagtgatcgcccacaagccttactcacctctctctaagtttagaagcgctcatctggcttttcgcttgcttctgcagcaactcccacgactgttgtacaagctcaggaggcgaataaatgttcaaactgta

SEQ ID NO: 114403 - DNA, 524 bp, Artificial Sequence
  derived and/or modified sequence
acctccgccaggaactgcaggcccacctgtctgcaacccagctgaggccatgccctccccagggaccgtctgcagcctcctgctcctcggcatgctctggctggacttggccatggcaggctccagcttcctgagccctgaacaccagagagtccagagaaaggagtcgaagaagccaccagccaagctgcagccccgagctctagcaggctggctccgcccggaagatggaggtcaagcagaaggggcagaggatgaactggaagtccggttcaacgccccctttgatgttggaatcaagctgtcaggggttcagtaccagcagcacagccaggccctggggaagtttcttcaggacatcctctgggaagaggccaaagaggccccagccgacaagtgatcgcccacaagccttactcacctctctctaagtttagaagcgctcatctggcttttcgcttgcttctgcagcaactcccacgactgttgtacaagctcaggaggcgaataaatgttcaaactgt

SEQ ID NO: 114404 - DNA, 351 bp, Artificial Sequence
  derived and/or modified sequence
atgcccagccctggcaccgtgtgcagcctgctgctgctgggcatgctgtggctggacctggccatggccggcagcagcttcctgagccctgagcaccagagggtgcagaggaaggagagcaagaagcccccagccaagctgcagccccgggccctggccggctggctgcggccagaagatggcggccaggccgagggcgcagaagatgagctggaggtgcgcttcaatgccccctttgatgtgggcatcaagctgagcggcgtgcagtaccagcagcacagccaggccctgggcaagttcctgcaggacatcctgtgggaggaggccaaggaggccccagctgacaagtag

SEQ ID NO: 114405 - DNA, 102 bp, Artificial Sequence
  derived and/or modified sequence
atgcccagccctggcaccgtgtgcagcctgctgctgctgggcatgctgtggctggacctggccatggccggcagcagcttcctgagccctgagcaccagtag

SEQ ID NO: 114406 - DNA, 351 bp, Artificial Sequence
  derived and/or modified sequence
atgcccagccccggcaccgtgtgcagcctgctgctgctgggcatgctgtggcttgacttagccatggcagggagttcttttctgagccccgaacaccagagagtccaacgaaaagaatccaagaagcctccagctaaactgcaaccacgcgcattagcaggctggctgaggcctgaagatggcggccaggcagagggggcagaggatgagctggaagtgcgcttcaatgctcccttcgatgttgggattaaactgagtggggtccagtaccagcagcacagtcaggctttgggcaagttcctgcaggatatcttatgggaggaggcaaaagaggcaccagccgataagtag

SEQ ID NO: 114407 - DNA, 102 bp, Artificial Sequence
  derived and/or modified sequence
atgcccagccccggcaccgtgtgcagcctgctgctgctgggcatgctatggctcgacctggcaatggctgggtctagtttcttatccccagagcaccaatag

SEQ ID NO: 114408 - DNA, 351 bp, Artificial Sequence
  derived and/or modified sequence
atgcccagccccggcaccgtgtgcagcctgctgctgctgggcatgctgtggttggacctcgctatggccggttcatcattcctttcccctgaacaccagcgcgtccagaggaaggagtccaaaaaaccgccggctaagctccaaccacgggccctggccggttggctgcgcccagaggacggagggcaagctgaaggtgccgaggatgagcttgaagtgcgattcaacgccccttttgatgtcgggatcaagctgtccggagtgcagtaccagcaacacagccaagccttgggcaaatttttacaggacatcttgtgggaggaggccaaggaagcgccagctgataaatag

SEQ ID NO: 114409 - DNA, 351 bp, Artificial Sequence
  derived and/or modified sequence
atgcccagccccggcaccgtgtgcagcctgctgctgctgggcatgctatggttagatctcgccatggcgggctcttcatttctgagtcctgaacaccagcgcgtgcagagaaaagagtccaagaagccacccgcaaagctgcaaccccgagctctagcagggtggttacgccctgaggatggtggccaagcagagggtgcagaggacgagctggaggtacggtttaatgctccatttgacgtgggcatcaaactgtcgggagtgcagtatcagcagcactcccaggcactgggaaagttcctgcaggacattctctgggaagaggctaaagaagccccagcggataagtag

SEQ ID NO: 114410 - DNA, 351 bp, Artificial Sequence
  derived and/or modified sequence
atgccatccccaggcaccgtctgcagccttctgttattaggcatgctgtggcttgaccttgctatggcagggtcaagttttctgagtccagaacaccagcgagtgcagcgcaaggaatccaaaaagcccccagccaagctccagcctcgtgcacttgcaggctggctgagacccgaagacggcggacaggccgagggagcagaagacgagctggaggttcgttttaacgccccttttgacgtgggaatcaaactctcaggggtacaataccagcagcacagtcaggcccttggcaaattcctgcaagacattctctgggaagaggctaaggaagcacccgctgacaaatag

SEQ ID NO: 114411 - DNA, 102 bp, Artificial Sequence
  derived and/or modified sequence
atgccctcacccggtaccgtctgctctcttctgctcctgggcatgctgtggcttgatctggcgatggccggaagctcgtttttgtcacctgaacatcaatag

SEQ ID NO: 114412 - DNA, 351 bp, Artificial Sequence
  derived and/or modified sequence
atgcctagcccgggaacagtctgctccctattactgttgggaatgttgtggctggacctggctatggccggttcttcatttctatcgcccgagcaccagcgcgtccagcggaaggagtccaaaaagccacccgcaaaactgcaaccgagagcactggccggatggttgcggcctgaggatggtgggcaggcagagggcgctgaggacgagctcgaggtaagatttaatgccccttttgatgttgggattaaactgtcgggggtccagtaccagcagcacagccaagctctgggcaagtttctgcaggatattctgtgggaggaggcgaaagaagcgcctgcagacaagtag

SEQ ID NO: 114413 - DNA, 351 bp, Artificial Sequence
  derived and/or modified sequence
atgccaagtcctggcaccgtttgctcactgttgttactgggaatgctatggctggatctcgctatggcaggatcttcattcctgtctcctgagcaccaacgggtgcaacggaaggaatcaaaaaagccaccagccaagttacagcccagggccctggccggatggctgcggccagaggacggcggtcaggctgaaggagccgaggacgaattagaggtgcgatttaacgctccgttcgatgtaggcattaaactctctggtgtccagtaccaacaacatagtcaggcactgggaaagtttctgcaggacattttgtgggaggaagcaaaggaggcccctgcagataagtag

SEQ ID NO: 114414 - DNA, 351 bp, Artificial Sequence
  derived and/or modified sequence
atgccctcaccgggtacagtgtgttctcttctccttttagggatgctttggttagatctggcaatggccggctcttcttttctttcccctgagcaccaacgggtccagcgaaaggaatcaaagaaaccgccggcgaaattgcagccacgggcactggccggttggctacgacccgaggatgggggacaggcagaaggagccgaagatgaacttgaagtgcgcttcaatgcaccctttgacgtcggaatcaagctctctggagttcagtatcagcagcacagccaggctttaggcaagtttctgcaagacattctgtgggaagaagccaaagaggcccccgccgacaagtag

SEQ ID NO: 114415 - DNA, 102 bp, Artificial Sequence
  derived and/or modified sequence
atgcctagccccggaacggtgtgtagcttgcttttgctgggaatgttgtggctcgatctcgcaatggccggaagcagttttcttagtcctgaacaccaatag

SEQ ID NO: 114416 - DNA, 351 bp, Artificial Sequence
  derived and/or modified sequence
atgccctcaccaggcactgtgtgctccttactcctcctgggtatgttgtggttggatctagcaatggccgggtccagtttcctgtccccagagcaccagagagtacaacgtaaagagtctaaaaaaccacccgccaagctgcagcctcgagcactggccggatggctccggcccgaggacgggggccaagctgaaggtgccgaagacgaattggaggtcagattcaatgcccctttcgatgtcgggatcaaactcagcggcgtgcagtaccagcagcatagccaagctttaggaaaatttttgcaggatatattatgggaagaggccaaagaggcccctgccgataaatag

SEQ ID NO: 114417 - DNA, 351 bp, Artificial Sequence
  derived and/or modified sequence
atgccatccccaggaacagtctgctccctcctgcttttaggaatgctctggctcgacctagccatggctgggtcctcattcctttcccccgagcaccagcgagtccaaaggaaggaaagcaaaaagcctccagctaaactccagcccagggctctagccggttggctgcggccagaagatggtgggcaggccgagggcgccgaagatgagctagaagtgcggttcaacgctccatttgacgtgggaatcaagttaagcggagtgcaatatcagcagcactctcaggcactgggcaaattcctgcaagatattctatgggaagaagctaaagaagctccagccgataaatag

SEQ ID NO: 114418 - DNA, 351 bp, Artificial Sequence
  derived and/or modified sequence
atgccctcaccgggtacagtgtgttctcttctccttttagggatgctttggttagatctggcaatggccggctcttcttttctttcccctgagcaccaacgggtccagcgaaaggaatcaaagaaaccgccggcgaaattgcagccacgggcactggccggttggctacgacccgaggatgggggacaggcagaaggagccgaagatgaacttgaagtgcgcttcaatgcaccctttgacgtcggaatcaagctctctggagttcagtatcagcagcacagccaggctttaggcaagtttctacaagacatactctgggaggaggctaaggaggcaccagctgataaatag

SEQ ID NO: 114419 - DNA, 351 bp, Artificial Sequence
  derived and/or modified sequence
atgccctctcctggcacggtttgtagcttgttattactaggcatgctctggctggatcttgccatggcaggctcctctttcctatccccagagcaccagcgcgtgcagagaaaagagagcaaaaagccacccgctaagctgcagccaagggcactggccggatggctgagacccgaggacggtgggcaggccgagggcgcagaggatgaactggaggttcgctttaacgctcccttcgacgttggcatcaaactaagcggagtacagtaccagcagcactcccaagctttaggaaagtttctccaggacatcctttgggaagaagcaaaagaggctcccgctgacaagtag

SEQ ID NO: 114420 - DNA, 351 bp, Artificial Sequence
  derived and/or modified sequence
atgccttccccaggtactgtgtgctcactacttttactcggtatgttgtggctcgacctggcaatggccggatcgtcgtttctgtctcccgaacaccagcgagttcagcgaaaagagtccaagaagcctcctgctaaactgcagcctagggccttagcaggatggttgagacccgaagacggaggacaagccgaaggagctgaagatgagctcgaggtcaggtttaatgcaccctttgacgtcgggataaagttgtcaggcgtgcagtaccagcagcatagtcaggcactcgggaaattccttcaagacattctatgggaagaggccaaggaagccccagcggataagtag

SEQ ID NO: 114421 - DNA, 348 bp, Artificial Sequence
  derived and/or modified sequence
atgccagctccctggactatctgttccctcctgcttctgtcagtgctctgtatggaccttgccatggccggctcctcattcctgagcccagagcaccagaagttgcagcgtaaggaggccaagaaacctagcggaagactgaagccccgaacattggaggggcagtttgaccccgaggtgggatcccaggctgagggcgccgaggatgagctggagatccgctttaatgccccctttaacattgggattaagctggccggcgctcaatccttacaacacggccaaactctcggcaagtttctgcaagatattctgtgggaagaagcagaagagacccttgcaaatgag

SEQ ID NO: 114422 - DNA, 348 bp, Artificial Sequence
  derived and/or modified sequence
atgcccgcaccatggacgatttgctcgcttttgcttctgtcggtcctgtgcatggacctggcaatggccggctccagcttcctttccccagagcaccaaaaactgcagaggaaggaggccaagaaaccctctggccggttaaagccacgcacactagaggggcagttcgatcccgaggtgggatcacaggccgaaggtgcagaggatgagcttgaaatacggttcaatgcccccttcaatataggaatcaaactcgcaggggcccagtcgctccagcacggacaaaccctagggaaattcctgcaggacattctttgggaagaagcggaagaaaccctggcaaatgag

SEQ ID NO: 114423 - DNA, 348 bp, Artificial Sequence
  derived and/or modified sequence
atgcctgcgccctggacgatctgctcgttgctgctcctgtcggtgctgtgtatggatctcgcaatggccggttcatctttcctctcccccgagcaccagaaacttcaaagaaaagaagcgaagaagccttcgggccgcctgaagccgaggaccttggagggccaatttgacccagaggtcgggtcacaggcggaaggcgccgaggacgaactcgaaattcggttcaacgccccgttcaatatcggtatcaagctggctggagcacaatcccttcagcatggacaaacgcttgggaagtttctgcaagatattctctgggaagaagcagaggaaaccctggctaacgag

SEQ ID NO: 114424 - DNA, 348 bp, Artificial Sequence
  derived and/or modified sequence
atgccagctccatggactatttgttcattgttgttacttagtgttttatgtatggatcttgctatggcaggatcttcttttttatcaccagaacatcaaaaattacaaagaaaagaagctaaaaagccatcaggacgacttaagcctagaactttagaaggacaatttgatcctgaagttggttctcaagctgaaggagctgaagatgaacttgaaattagattcaatgcacctttcaatattggaatcaagcttgcaggagctcaatcattacaacatggacagactttaggaaaatttcttcaagatattctttgggaagaagctgaagaaacattagcaaatgaa

SEQ ID NO: 114425 - DNA, 348 bp, Artificial Sequence
  derived and/or modified sequence
atgcctgcgccatggactatctgttcccttctgttgctttcagtgctctgcatggatctcgctatggcggggtcatcctttctaagccccgaacaccagaagctgcagcgaaaagaggcaaagaagccttccgggagactcaagccgagaacgctggaggggcaattcgacccggaggtcggtagccaagcagagggcgcagaggacgagctggagatcaggtttaacgcaccctttaacatcggtataaaactggcaggagcacagagcttgcagcatgggcagactctagggaagttcctgcaggacattctctgggaagaggcagaggaaacactggctaatgaa

SEQ ID NO: 114426 - DNA, 348 bp, Artificial Sequence
  derived and/or modified sequence
atgcccgcgccttggactatttgttcactgctgttgctctcggttctttgcatggatctggcaatggccgggtcgtcatttctctccccagaacatcaaaagctccaacgtaaagaagcaaaaaagccaagcggccggctgaagccgcgcaccctggaaggccagttcgatcctgaagtgggaagccaagccgaaggtgcggaggacgaactggagattagattcaacgcaccctttaacataggcattaagctcgcaggggcgcagtccttgcagcacggtcaaactttggggaaatttctgcaagatatcctgtgggaggaggcagaagaaacgctggctaatgaa

SEQ ID NO: 114427 - DNA, 348 bp, Artificial Sequence
  derived and/or modified sequence
atgccggctccgtggaccatctgctcgcttctcctgctttccgtgctctgtatggacctggcaatggccggatcgtcgttcctgtcccctgagcatcagaagctgcagcgcaaagaagctaagaagccatcaggccggctgaaaccccggaccctggaaggacaatttgatcctgaagtgggaagccaggctgaaggcgctgaggacgaactggaaatcaggtttaatgcaccgttcaacatcggaattaagctggccggcgcacagagcttgcagcacgggcagaccctgggaaagttcctgcaagacatcctctgggaggaggcagaggaaaccctcgctaatgaa

SEQ ID NO: 114428 - DNA, 348 bp, Artificial Sequence
  derived and/or modified sequence
atgcctgcaccctggactatttgcagcctcttgttgctgtcggtgttgtgtatggatctcgcaatggctggttcctcatttctttcaccagagcatcaaaaacttcagcggaaggaagcgaaaaagccctcgggacgacttaaaccaagaaccctcgaagggcagtttgatccggaagtgggatcccaggcagagggagctgaagatgaactcgaaattaggttcaatgccccctttaacattggaatcaagttggcaggagcccaatccctccagcatgggcagacccttgggaaatttctgcaagacattctttgggaggaggccgaagaaaccctggccaacgaa

SEQ ID NO: 114429 - DNA, 348 bp, Artificial Sequence
  derived and/or modified sequence
atgccagctccgtggacgatatgctcactgctcttgctcagcgtcctctgtatggacctcgccatggctggctcctcatttctgtctcccgagcaccaaaagctccagagaaaggaagcgaagaaaccgagtggccgactgaagcctcgcactctggagggccagttcgatccggaagtgggcagccaagcggagggagcagaagatgagctggagatccggttcaacgctccgttcaacatcggaattaagctcgccggtgcccaatcgcttcagcatgggcagaccttggggaaattcctgcaggacatcctttgggaggaagccgaagaaaccctggcgaatgaa

SEQ ID NO: 114430 - DNA, 348 bp, Artificial Sequence
  derived and/or modified sequence
atgccagcgccgtggaccatttgctcccttctgcttctctccgttttgtgtatggatttagccatggccgggtcaagttttttatcccctgaacatcaaaaacttcagcgaaaggaggctaagaagccatcagggagactcaaaccaagaacgcttgaaggacaattcgatcctgaagtaggatcccaagcagagggtgccgaagatgagcttgagatcaggttcaacgcaccattcaatattggcattaaactcgccggtgctcaatcgctacaacatggacaaactcttggaaaattcttgcaagatattttgtgggaagaggctgaagaaactttagctaacgag

SEQ ID NO: 114431 - DNA, 348 bp, Artificial Sequence
  derived and/or modified sequence
atgcccgccccgtggaccatctgttccctgttgctgctgtccgtcttgtgcatggatctggccatggccggctcgtcatttctcagcccggagcatcagaagctccaacggaaggaggcaaagaagccatcaggccgccttaagccacgcaccctggagggccagttcgacccagaggtgggatcccaggcagaaggagcggaagatgagctcgaaatccgcttcaatgcgccattcaacattggaatcaaactggcgggtgcccaatcgctgcagcacggacagacgctgggcaaattcctgcaggacatactgtgggaggaggcagaggaaaccctggcaaatgag

SEQ ID NO: 114432 - DNA, 348 bp, Artificial Sequence
  derived and/or modified sequence
atgcctgctccttggactatttgttcgctgcttctcctttcagtgctctgcatggatctggcaatggcaggttcctcgtttttgtcaccggagcatcaaaaactccagagaaaggaggcaaagaagccatccgggagactcaagccccggaccctggagggacaatttgaccctgaagtcggaagccaagcagagggcgccgaagatgaactcgaaatccgattcaacgcaccattcaacattggaatcaaacttgcaggggcccaaagcctgcagcacgggcaaactcttggcaagtttctgcaggacatcctgtgggaagaagcggaagaaaccctcgcaaatgaa

SEQ ID NO: 114433 - DNA, 348 bp, Artificial Sequence
  derived and/or modified sequence
atgcctgctccatggaccatctgcagtctgttgctgcttagcgtcctgtgtatggatctggctatggccggctcgtctttcctatcgcctgagcatcaaaagctccagcgtaaggaggccaagaaaccctctggaaggcttaaacctcgcactctcgagggccaattcgatcccgaagttggatcacaggcagaaggcgccgaagatgaacttgaaattcggtttaatgctcccttcaacataggtattaaattagccggcgcccagagtctgcaacacgggcaaacactgggaaaatttctgcaagacatcctctgggaagaggccgaagagaccttggctaatgaa

SEQ ID NO: 114434 - DNA, 348 bp, Artificial Sequence
  derived and/or modified sequence
atgcctgccccctggaccatttgcagcttactgcttctctcagtactctgcatggaccttgctatggccggttcctcttttctatcccctgagcatcagaaactccaaagaaaggaggccaagaagccgtccggtcgactgaaaccccgaaccttggagggccaatttgatcctgaggtgggatcgcaggccgagggcgccgaggacgaactggaaatcagatttaacgcaccttttaacattggtattaaattggctggcgcccagtcactacaacacggacaaacccttggtaagttcttacaagacatcctttgggaggaggccgaggagacattggccaatgag

SEQ ID NO: 114435 - DNA, 348 bp, Artificial Sequence
  derived and/or modified sequence
atgcccgccccttggaccatctgctcattgctcctgcttagcgtcctgtgtatggacctggcaatggcaggaagctccttcctgtcaccagaacatcagaagctccaacggaaagaggctaagaaaccgtcgggccgcctcaagccaaggactctggagggacaattcgacccggaagtggggtcccaagccgagggagctgaagatgaactggaaatcagattcaacgcgccgttcaatatcggcatcaagctggcgggggcccagtcgctccagcacggacagactctgggtaagtttttgcaggatattctttgggaagaggccgaggaaaccctcgcgaacgag

SEQ ID NO: 114436 - DNA, 348 bp, Artificial Sequence
  derived and/or modified sequence
atgccagccccctggacaatctgctccctgcttctactgagtgttttatgtatggacctcgctatggccggatcctcgttcctgagtccagagcaccagaaattacagcgaaaagaagcgaaaaaacccagcggcaggctgaaacctcgaactctggaggggcaattcgatcctgaggtgggctcacaggccgaaggggccgaggatgagctcgaaatcagatttaacgcccccttcaatatcggcattaaacttgcaggagcacagtcgttgcagcacgggcagaccctgggaaaattcctccaggacatactgtgggaagaggcagaggaaactcttgctaatgaa

SEQ ID NO: 114437 - DNA, 348 bp, Artificial Sequence
  derived and/or modified sequence
atgccggcaccgtggaccatctgcagtctgctcctgttgagtgttctgtgcatggacttggcaatggccggttcaagctttctctctcctgaacaccaaaagctgcagagaaaggaagcaaagaagcctagcggtcgactgaagccccgcacgctggagggccagttcgaccctgaggttggttcgcaagcagagggtgccgaggatgagctggaaatccgtttcaatgcccctttcaatatagggattaaacttgccggggcgcagagtctccagcatgggcagaccctgggaaagttcctgcaggatatcctgtgggaagaggctgaagagaccctggccaacgaa

SEQ ID NO: 114438 - DNA, 348 bp, Artificial Sequence
  derived and/or modified sequence
atgcccgccccttggaccatatgttccctccttctcctgagcgtactttgcatggatctagctatggccggaagctcattcctcagccctgagcatcagaaattgcagcgaaaggaggccaagaagcctagcggccgcctgaagccacggaccctggagggtcagtttgatccggaagtgggctctcaagccgaaggcgccgaggatgagctggaaattaggttcaatgctcccttcaacattgggattaagcttgctggcgcacagagccttcagcatggacaaacattaggaaagttcctccaggacatattgtgggaggaggcagaggaaaccctcgcgaacgag

SEQ ID NO: 114439 - DNA, 348 bp, Artificial Sequence
  derived and/or modified sequence
atgcccgcaccttggacgatatgttcgcttctccttctctcggtcctgtgcatggatcttgccatggcgggtagctcatttctgtcgcccgagcaccaaaagttgcagagaaaggaagctaagaagcccagcggtaggctgaaacctcgaaccctggagggacagttcgatccggaggtcggatcccaggccgaaggcgccgaagatgagctggaaattcgttttaacgctccatttaacatcgggattaaacttgcaggtgcgcagtccctgcagcatggacaaaccctcggtaagtttcttcaagacatactctgggaggaggctgaagagactctcgcgaacgaa

SEQ ID NO: 114440 - DNA, 348 bp, Artificial Sequence
  derived and/or modified sequence
atgccagctccctggactatttgctccttactgctattatctgtcttgtgcatggatttggctatggccggttccagcttcctcagcccggaacatcagaagcttcaaagaaaggaggccaaaaaacccagcggtcgactgaaaccaaggacactagaagggcagtttgatcctgaagttggatcgcaggccgaaggggctgaggatgaactcgagattcgttttaacgcccctttcaatattggaataaagctcgctggcgctcagagtctgcagcacggccagaccctcggcaagtttcttcaagacattctgtgggaggaggctgaggagactctggcgaatgag

SEQ ID NO: 114441 - DNA, 348 bp, Artificial Sequence
  derived and/or modified sequence
atgccagctccatggacaatatgctcactactcctcctctcggttctctgtatggacctagccatggccgggtcttcttttttatcacctgaacatcagaaactgcagcggaaagaggcaaaaaaacctagtggaaggttaaaacccagaacattagaaggacagttcgatccagaggtggggtctcaggcagaaggggcggaagatgaactggaaataaggttcaatgctccattcaatataggaattaagctggcaggggctcaatctcttcagcatgggcagactctgggaaaatttctccaagatattctctgggaagaggctgaagaaacactagcgaatgag

SEQ ID NO: 114442 - DNA, 348 bp, Artificial Sequence
  derived and/or modified sequence
atgcctgccccttggacgatatgctccttattattgctctcggtactttgtatggacctggctatggcaggcagtagtttcctgagtccggaacatcagaagcttcagcgcaaggaggctaagaaaccgtctggccgactaaagcctcgtacgcttgagggtcagtttgacccagaggttgggagccaggcagaaggtgctgaggatgaattggagattagattcaatgctcctttcaacattgggataaagctcgcgggggcacagagtctgcagcatggccagactctcggcaaattcctgcaagacatcctttgggaggaagctgaagagacattggctaacgag

SEQ ID NO: 114443 - DNA, 348 bp, Artificial Sequence
  derived and/or modified sequence
atgccagctccttggacaatttgttctctcctcctgctttctgtattgtgcatggatctggcaatggcaggatcatcctttctgagccccgagcatcaaaaacttcagagaaaggaggcaaagaagccatctggccgcctgaagcctcgcaccctggagggccagttcgatcctgaagtgggatcccaggccgaaggcgctgaggacgagctcgagatcagatttaatgcgcctttcaacatcggcataaagctggccggcgcccagtcactgcagcacggacaaactctcggtaagtttctgcaggatatcctgtgggaagaggcagaagaaaccctggcgaatgaa

SEQ ID NO: 114444 - DNA, 348 bp, Artificial Sequence
  derived and/or modified sequence
atgcctgcgccctggaccatatgtagcctgctgctcctttctgtgctgtgcatggatctggccatggcaggatcatcctttctctcaccagaacaccagaagctgcagcggaaggaagctaagaagccctccggccggctgaagccacgaaccctggaagggcaattcgatcccgaggtcggcagccaggctgaaggcgcagaggacgaactagagattaggtttaatgccccttttaacatcgggatcaagctcgcgggggcccagtcattacaacacggtcaaacgcttggcaagttcctgcaggatatcttatgggaggaggccgaggaaaccctggctaacgag

SEQ ID NO: 114445 - DNA, 348 bp, Artificial Sequence
  derived and/or modified sequence
atgcctgccccctggactatttgctctttgctcctgttgagcgtgttgtgtatggatctggctatggcagggtcctctttcttgtcaccagaacaccagaagttgcaaaggaaagaggctaagaagccatctggcaggctgaaacccagaactctggagggtcagtttgacccagaagtcggatcccaagcggagggtgcggaggacgaactcgagatccgattcaacgcacccttcaacatcggcattaaattggccggtgcacagagtttgcagcacggccaaaccctcggaaagttcctccaagatatcctttgggaggaagccgaagaaacgttggcaaatgaa

SEQ ID NO: 114446 - DNA, 348 bp, Artificial Sequence
  derived and/or modified sequence
atgcctgccccatggactatttgttccctgcttcttctctccgtcctttgcatggacctcgcgatggccggctcctctttcttatcaccggagcaccagaagctgcaacgcaaagaggcaaagaagccgtccggaagactgaaaccccgcactctggaggggcagttcgaccccgaagtgggatcccaggccgaaggagctgaggacgaactggaaatccggttcaacgcaccgttcaatatcggcattaaactggctggagcacagagcctccagcatggacagactctgggtaaattcctccaggacatcctgtgggaggaagctgaagagaccctggccaatgag

SEQ ID NO: 114447 - DNA, 348 bp, Artificial Sequence
  derived and/or modified sequence
atgccggcgccgtggacgatatgttcgttactactattatcggtattatgtatggatctagcgatggcgggttcgtcgtttttatcgccggaacatcaaaaattacaacgaaaagaagcgaaaaaaccgtcgggtcgtttaaaaccgcgaacgctagaaggtcaatttgatccggaagtaggttcgcaagcggaaggtgcggaagatgaattagaaatacgatttaatgcgccgtttaatataggtataaaattagcgggtgcgcaatcgctacaacatggtcaaacgctaggtaaatttctacaagatatattatgggaagaagcggaagaaacgttagcgaatgaa

SEQ ID NO: 114448 - DNA, 348 bp, Artificial Sequence
  derived and/or modified sequence
atgcccgccccatggaccatctgttctcttctgttgctcagcgttctatgtatggatctcgcaatggctgggagttccttcctgtctcccgagcaccagaaactgcaacggaaggaggccaaaaagccatcaggacgcttgaaaccgaggaccttggagggccagtttgacccagaggtcgggtcacaggcagaaggagccgaggatgagctggaaatccgcttcaatgcacccttcaacattggcattaagcttgccggagctcagtccctgcagcatgggcagactctcggaaagtttctgcaggacatcctgtgggaagaggccgaagagactctcgctaacgaa

SEQ ID NO: 114449 - DNA, 348 bp, Artificial Sequence
  derived and/or modified sequence
atgccggccccatggacaatttgcagcctgttgctcctctccgtgctgtgtatggacctcgcgatggctggctctagttttttaagtcccgaacaccaaaagctgcagagaaaggaggcaaaaaagccttctggcagactcaagcctagaaccctggagggccagttcgatcctgaagtgggaagccaagccgaaggtgctgaagacgagctcgaaatccggtttaacgccccattcaacataggtataaagctggcaggtgctcagtctttgcagcacgggcaaaccctcggaaaattcctccaggatattctttgggaagaagctgaggagaccctggcaaatgaa

SEQ ID NO: 114450 - DNA, 348 bp, Artificial Sequence
  derived and/or modified sequence
atgcctgccccatggacgatctgctccctgctgctgttgtccgtgctctgcatggacctggcaatggcgggttcgtcgttcctgtctccagaacaccagaagctccaaaggaaggaggccaagaagccttcgggaaggctgaagccacgcaccctggagggccagtttgacccagaggtggggagccaggctgaaggagccgaggacgagcttgaaattcgcttcaacgcgccgttcaacatcggcatcaagctcgcgggagcccaaagcctccaacatggccagaccctgggaaagttcctgcaggacatcctctgggaagaggcagaagaaaccctcgcaaacgag

SEQ ID NO: 114451 - DNA, 348 bp, Artificial Sequence
  derived and/or modified sequence
atgccggcgccttggactatatgctcgctcctcctgctgtcagtgctctgcatggatctggcgatggccggctcgagcttcctgtccccagaacatcaaaaactgcaaagaaaggaggcgaagaaaccatcgggccgcttgaagcctagaactctcgagggacagttcgacccggaggtcggtagccaagcggaaggcgccgaggacgaactggaaatccggttcaatgctccgtttaacatcggaatcaagctggcgggggcgcagtccttgcagcatggacagactctcggaaagttccttcaggacatcctctgggaggaggcagaggaaaccttggccaacgag

SEQ ID NO: 114452 - DNA, 348 bp, Artificial Sequence
  derived and/or modified sequence
atgccggccccatggaccatatgtagtctgctcctcttgtctgtgctgtgcatggatttggccatggccggatcctcatttctgtcgcctgagcaccagaagctgcagagaaaggaagctaagaagccttccggacgtcttaagccgcgtacactggagggccaatttgaccccgaggtgggctcgcaggccgagggagcggaggatgagctagagattcgcttcaatgccccattcaatatcggcatcaaactggcgggagcgcagagccttcagcatggtcagaccctcggcaagtttctgcaggacattctgtgggaggaggctgaagagactttggcaaatgag

SEQ ID NO: 114453 - DNA, 348 bp, Artificial Sequence
  derived and/or modified sequence
atgccggctccgtggactatttgttccctactcctgctcagtgtgctgtgcatggatctagcaatggctggttcttcatttctgagccctgagcatcagaagctgcagcgaaaggaagcaaaaaaaccatctggacggctgaagccccgaaccctcgaaggtcaattcgacccagaggttggatctcaggctgaaggcgccgaggatgagttggaaattcgcttcaatgccccgttcaacatcggaataaagctggctggagcacagtccctgcagcacggacagaccttggggaaattcttacaagatatactctgggaggaggccgaggaaacactggctaacgag

SEQ ID NO: 114454 - DNA, 348 bp, Artificial Sequence
  derived and/or modified sequence
atgccagcgccctggactatttgttccctccttttgctgtccgtgctctgcatggatctggcgatggctggctctagtttcctatccccagagcatcagaaactgcaacgcaaggaagcaaaaaaacctagcggccgtctcaaacctaggaccctcgagggacaattcgatcccgaagtcggctctcaggcggaaggcgccgaggatgagctggaaatacgtttcaacgcacctttcaacattgggatcaaactagccggggcgcagagcttacagcacggccaaacccttgggaagtttctgcaggatattctctgggaggaggcagaggagaccctcgccaacgag

SEQ ID NO: 114455 - DNA, 348 bp, Artificial Sequence
  derived and/or modified sequence
atgcctgcaccttggaccatatgttcgctgttgctgctctcagtgctttgcatggatcttgctatggcaggatcctcgtttctcagccctgagcatcagaagctgcagagaaaggaggccaaaaaaccctcgggtcgacttaagcctagaaccttggaaggtcaattcgacccggaagtgggatcgcaagccgagggtgccgaagatgaacttgaaattcggttcaatgcgccgtttaacattggcattaaacttgctggcgcccaatcactgcaacatggacagacgctcggaaagtttttgcaggacattctgtgggaagaagccgaagaaaccttggcaaatgaa

SEQ ID NO: 114456 - DNA, 348 bp, Artificial Sequence
  derived and/or modified sequence
atgcctgcgccatggactatttgttcgctgttgctcttgagcgtgctgtgtatggatctggcaatggcgggatcgagctttctgtccccagaacaccaaaagctccaacggaaagaagcgaagaagccttcaggcagacttaaaccccgcactttggagggacaattcgatcccgaggtgggctcacaggcagaaggagcagaggatgaactggagatccgcttcaacgcgccatttaacataggcattaaactggcaggcgctcaatctctccagcatggacaaaccctcgggaagttcctgcaagatatcctctgggaggaggcagaagaaaccctggccaatgaa

SEQ ID NO: 114457 - DNA, 348 bp, Artificial Sequence
  derived and/or modified sequence
atgcctgccccgtggaccatctgcagcctcctgctgctgagcgtgctttgtatggacctggcgatggcggggagctccttcctgagcccagagcaccagaaactgcagaggaaggaggctaagaagccatccggacggctgaagcctcgcactcttgaagggcagttcgacccagaagtcgggtcacaagccgaaggagccgaggatgaacttgaaattagattcaatgccccgttcaacataggcatcaagctggcaggggcccaatcgctgcagcatggccagacgctgggtaagttcctgcaggatatcttgtgggaggaggccgaagagactctcgcgaacgaa

SEQ ID NO: 114458 - DNA, 348 bp, Artificial Sequence
  derived and/or modified sequence
atgcctgctccttggaccatctgcagcctcttgttgctctcagtcctttgcatggatctggccatggccggctccagcttcttaagcccagagcaccagaagctccaacgcaaggaagcgaagaaacccagtgggaggctgaagcctaggactctggagggccagtttgaccctgaggtgggcagccaagcagagggtgccgaggatgaattggagattcgctttaatgccccatttaacattggtataaaacttgccggcgctcagtctttgcagcacggacaaacactcggaaagtttctccaagatatcctgtgggaagaagctgaggagactcttgctaacgag

SEQ ID NO: 114459 - DNA, 348 bp, Artificial Sequence
  derived and/or modified sequence
atgccagcaccttggaccatttgctcactgttgcttttgtccgttctctgtatggacctcgccatggccgggtcttcattcctgagtccggaacaccaaaagctccaacggaaggaagccaagaagccttctggacggctcaagcccaggacactggaggggcagtttgaccccgaggtgggaagtcaagccgaaggggcagaggacgagttggagatcaggttcaacgcgccattcaatatcggtattaagctggcgggggcccagtccctccaacatggtcagacgttaggcaagttccttcaagacattctttgggaggaggcagaagagaccttggctaacgag

SEQ ID NO: 114460 - DNA, 348 bp, Artificial Sequence
  derived and/or modified sequence
atgcccgcaccttggacgatttgctcgctgctgctcctcagtgtgctctgcatggacttggccatggccggttcctccttcctgtcacccgagcatcagaaacttcagcgaaaagaagccaagaaaccatcggggagactaaaaccacgaactctagaaggacaatttgatccggaggtcggctcccaggcggaaggcgccgaagatgagctggagataaggtttaatgcccccttcaatatcggaataaaattggccggagcccagtcactacagcacggtcagactctgggtaaattcctgcaggatatcctgtgggaggaagccgaggaaactctggcaaacgaa

SEQ ID NO: 114461 - DNA, 348 bp, Artificial Sequence
  derived and/or modified sequence
atgcctgccccctggactatctgctcactgctgctgctctcggttctgtgcatggatttggcaatggccggatcgtcgttcctctccccggagcatcaaaaactccaacgcaaggaagctaagaagccgtcgggaaggctcaagccacggacccttgaaggacagttcgacccggaggtgggctcccaggccgagggggccgaagatgagctggaaatcaggttcaatgcgcctttcaatattggcatcaaactggccggggcccagtcgctccagcatggtcagacccttggcaaattcctgcaagatatcctgtgggaggaagccgaggagactctcgcgaacgaa

SEQ ID NO: 114462 - DNA, 348 bp, Artificial Sequence
  derived and/or modified sequence
atgcccgccccttggactatatgcagcctgctgctgctgtccgtgttgtgtatggatctcgcaatggcaggttcatcgttcctgtcacctgagcaccagaaattgcagcggaaggaggctaagaagccctccggtagactgaagccccgcacccttgagggtcagtttgacccagaagtgggtagtcaagccgaaggcgcggaagatgaactggaaatacgatttaacgcaccttttaacatcgggatcaagctggctggagcacaatccctgcaacatggtcagactctggggaaattcctgcaagatattctttgggaagaagcagaggaaacccttgcaaatgag

SEQ ID NO: 114463 - DNA, 348 bp, Artificial Sequence
  derived and/or modified sequence
atgccagccccttggacgatctgtagcctcctcttactgtccgtgttgtgcatggatttagctatggccggctcctccttcctctcgcccgaacaccagaaactccagcggaaggaggctaagaaaccttccggccgcctaaaacctcgcacgctggagggccagttcgatcctgaggtgggttctcaggccgaaggcgccgaggacgaactcgaaatccggtttaacgcccctttcaacatcggcatcaaactggctggagcccaatccttgcagcatggacagacccttggcaaattcttgcaggatatactgtgggaggaggctgaagagactttggctaatgaa

SEQ ID NO: 114464 - DNA, 348 bp, Artificial Sequence
  derived and/or modified sequence
atgccagctccatggacaatctgttcactcctgttgctttctgtactctgcatggatttagcgatggctggtagttcattcttgtcccctgaacatcagaaactacagcggaaggaggctaagaaaccaagtgggaggctgaaacctcgcactttggaagggcagttcgatccagaggtcggatcccaagcggagggcgcagaagacgagttagaaatcaggtttaacgcaccattcaacataggtattaagttggctggtgctcagagtctccaacatggccagacattaggtaagtttttgcaagatattttgtgggaggaggcagaagaaactttagctaatgaa

SEQ ID NO: 114465 - DNA, 348 bp, Artificial Sequence
  derived and/or modified sequence
atgccagccccctggaccatttgctctctgctgctcttatctgtcctgtgtatggaccttgccatggctggttcgtcttttctctcccccgaacatcagaagctccagcgtaaagaggctaagaaaccttcgggccgactcaagccaaggacattggaaggccagtttgatcctgaggtgggttcacaggcagaaggggccgaggatgagcttgagatccgcttcaatgccccattcaacatcggtatcaagctggctggcgcgcagtcactccagcacggccagacgctgggtaagttcctgcaggatatcctatgggaagaggccgaggaaacgctggccaacgaa

SEQ ID NO: 114466 - DNA, 348 bp, Artificial Sequence
  derived and/or modified sequence
atgcctgcaccctggactatctgctccttgctgctcctgtcggtgttgtgtatggatctggcaatggcgggaagcagcttcctctcaccagaacaccaaaagttgcagaggaaggaagcgaaaaagccgtcgggaaggctgaagccaagaaccctcgaagggcaattcgaccctgaggtggggtcgcaggccgaaggagccgaggatgaactggagatccggttcaacgccccgttcaatattggcatcaagctcgccggggcacaatccctgcagcatggccagactcttgggaaatttctgcaagacatcttgtgggaggaggcggaagaaacccttgccaacgag

SEQ ID NO: 114467 - DNA, 348 bp, Artificial Sequence
  derived and/or modified sequence
atgcctgccccatggactatttgttcactgctcctgctcagcgtgctgtgtatggatcttgcaatggccggctcatcgttcctgtccccagaacatcagaaacttcaacggaaggaagccaagaagccaagcggacgccttaaacctcgcacgctggaaggacaatttgaccccgaggtgggtagccaagcagaaggggccgaagatgaactggaaatacggtttaacgcaccgtttaacattggaattaagctcgcaggtgcccaaagcctgcaacatggacagactctgggtaagtttctgcaggatattctttgggaggaagcggaagaaaccctcgccaacgag

SEQ ID NO: 114468 - DNA, 348 bp, Artificial Sequence
  derived and/or modified sequence
atgcctgcgccttggaccatctgtagtctcctgctcctgtcggtgctctgtatggatctcgcaatggcaggctcgtccttcctttccccagaacaccaaaaacttcagagaaaagaagcaaagaagcctagcggtaggctcaagcctcgcaccctggaggggcaatttgacccagaagtgggttcacaggcggaaggtgccgaggacgaacttgagatacgatttaacgcacctttcaacatcgggattaaacttgccggggcacagtcgcttcagcacggtcagactctgggaaagtttctgcaggatattctgtgggaggaagcggaggaaactcttgctaatgag

SEQ ID NO: 114469 - DNA, 348 bp, Artificial Sequence
  derived and/or modified sequence
atgcccgccccttggacaatttgttctctgctgctcctctctgtcctgtgcatggatcttgctatggccggatctagttttctgtcccccgagcaccagaagctgcagcggaaggaggccaagaaaccgtcgggacgcctgaagcctaggacccttgaaggccagtttgatcccgaggtgggatctcaggccgaaggagcagaagacgaactggaaatcagattcaacgcacctttcaacatcgggattaagctggcaggtgcccaatcgctgcaacacggtcaaacactgggaaagttcctacaggacattctttgggaggaggccgaggaaaccctggctaacgag

SEQ ID NO: 114470 - DNA, 348 bp, Artificial Sequence
  derived and/or modified sequence
atgccggctccttggaccatctgctctctgctcctgctgagcgtgctgtgtatggacctggcaatggccggatcttctttcctttcgcccgaacaccaaaaattgcagagaaaagaggccaaaaagcccagcggaagacttaaacctaggactctggagggtcagtttgacccagaagtgggttctcaagccgaaggtgctgaagacgaacttgaaattcggtttaatgctccattcaacatcggtatcaaactggccggggctcagagtcttcagcacggtcagactctgggaaagtttcttcaggacatcctctgggaggaggctgaggaaacactcgccaatgaa

SEQ ID NO: 114471 - DNA, 348 bp, Artificial Sequence
  derived and/or modified sequence
atgccggccccctggaccatctgctccctgctgctgcttagcgtgctgtgcatggatctcgcaatggcaggttcgtccttcctttcgcctgaacatcaaaagttgcaacgcaaggaagccaagaaaccatcgggtcgccttaagccacggactctggagggacaattcgatcccgaggttgggtcccaggcggaaggcgcggaggacgagcttgaaatccgatttaacgcacctttcaacattgggattaagttggcaggtgcgcaaagcctccagcacggccagactcttggcaagtttttgcaagatatcctttgggaggaagcagaggagacgcttgccaatgaa

SEQ ID NO: 114472 - DNA, 348 bp, Artificial Sequence
  derived and/or modified sequence
atgccggccccctggaccatatgcagcctactgctactctctgtattgtgcatggatctagccatggctggttcctcctttctgagccctgaacaccaaaagttgcaaaggaaggaggccaaaaaaccgtcgggccggctaaagccccgaaccttggagggtcaatttgacccagaggtcggcagtcaggctgagggtgctgaagacgagctcgaaatcagattcaatgcgcctttcaacatcggcatcaagctcgcgggtgcccagtccctccagcacggtcaaacactgggcaagttcttgcaagacatactatgggaggaggctgaggaaacgctggcaaatgaa

SEQ ID NO: 114473 - DNA, 348 bp, Artificial Sequence
  derived and/or modified sequence
atgccagcaccctggaccatttgctcccttctcctcctcagcgtgctttgtatggacctagcgatggcaggctctagcttcctctcccccgaacatcagaagttgcagcgcaaggaggccaaaaagccttcaggccggctgaaacctaggaccctggaaggacagttcgaccctgaggtgggatctcaagccgagggcgccgaagacgaactggaaatccgatttaatgcaccgtttaatatcggtataaagctagctggtgcgcagtcgctccagcacgggcagaccctagggaagttcctacaggatattttgtgggaagaggcggaggaaacgcttgcaaacgaa

SEQ ID NO: 114474 - DNA, 348 bp, Artificial Sequence
  derived and/or modified sequence
atgcccgctccatggacgatatgttcactgctgcttctgtccgtgctgtgtatggacctggcgatggcaggatcctcctttctttcgcctgaacatcagaagctgcaaagaaaagaagcaaagaagccctctggacgccttaagccgcgaactctcgaaggacaatttgaccccgaagtcggcagccaggcggaaggagccgaagatgagctggaaattaggtttaatgccccattcaatatcggtattaagttggctggggcgcagagcctgcagcatggtcaaacccttggtaagtttcttcaggatatcttgtgggaagaagcggaagagactcttgcaaacgaa

SEQ ID NO: 114475 - DNA, 348 bp, Artificial Sequence
  derived and/or modified sequence
atgcccgcaccttggaccatttgtagtttgctcctgttgagtgtcttgtgtatggatcttgccatggccggcagctcattcctttccccagaacaccagaagctgcaaaggaaagaggctaaaaaaccatctgggaggttgaagcccagaactctggaagggcaattcgaccccgaagtgggctcacaagctgaaggggccgaagatgagctggagatcagatttaacgcccctttcaatatcggaattaagcttgccggggcgcagagtctccagcacggtcaaactctcggtaaattcctgcaagatatactctgggaagaggctgaagagacactcgcaaacgaa

SEQ ID NO: 114476 - DNA, 348 bp, Artificial Sequence
  derived and/or modified sequence
atgcctgcgccttggacgatctgttctctgctgctgctgtcagtcctgtgtatggacctggctatggctggaagctcctttctcagtccggagcaccagaaacttcaacgcaaggaagctaaaaaacccagtggacgcctaaagcccagaaccttagaaggtcagttcgacccagaggttgggtctcaggcggaaggcgccgaggacgaacttgagatcaggttcaatgctccgttcaacatcggaattaagctggcaggagcacaaagcctccagcacggccagacccttgggaaatttctacaggacattttgtgggaggaggcggaagagaccctcgctaatgag

SEQ ID NO: 114477 - DNA, 348 bp, Artificial Sequence
  derived and/or modified sequence
atgcccgctccatggaccatttgcagcctgcttctgctgtccgtgttgtgtatggatctggcaatggcgggaagttcgttcctgtcaccggaacaccagaagctccaacggaaggaagcgaaaaaaccatccggacgtctgaagccaaggaccctggagggccagttcgaccctgaagtgggaagccaggccgaaggagccgaagatgaattggagatcagattcaacgcgccgttcaatattggcatcaagttggccggtgctcaatctctgcaacatggacagactctgggcaagtttctccaggacatattgtgggaggaagcagaggagactctcgccaacgaa

SEQ ID NO: 114478 - DNA, 348 bp, Artificial Sequence
  derived and/or modified sequence
atgcctgcaccttggactatatgctcccttcttctcctttcagtcctgtgtatggaccttgcaatggcaggctcatcgttcctcagccccgagcaccaaaagctgcaacgcaaagaggcaaagaagccgtccggccgtcttaaacctagaactctcgagggacaatttgatcccgaagtgggatcacaagccgagggagcagaggacgagctggagatccgctttaatgcacccttcaatattggtatcaaactcgcaggtgcacagagcttgcagcatggtcagacccttggtaagtttctccaagatatcctgtgggaggaagcagaagaaacgcttgctaacgag

SEQ ID NO: 114479 - DNA, 348 bp, Artificial Sequence
  derived and/or modified sequence
atgcccgctccatggaccatttgctccctgctactccttagcgtactgtgtatggacctcgcaatggctgggtcaagctttctctcaccagagcaccagaagctgcagagaaaggaggccaagaagcctagcgggagattgaagccgagaactctggaaggtcagttcgatccagaggtcggttcccaggccgaaggagccgaggacgagttagagataagattcaatgcaccatttaatattgggattaaactggccggggcacaatcactccagcacggacaaacgctcggtaagtttttgcaggacatcctgtgggaggaagccgaagaaacgctggccaatgag

SEQ ID NO: 114480 - DNA, 348 bp, Artificial Sequence
  derived and/or modified sequence
atgccggcgccgtggactatctgttcacttctgctgctctcagtgctctgcatggacctggcgatggccggaagctcgttcctttcaccggaacaccaaaagctgcagcggaaagaagccaaaaaaccatcgggccggctgaagccgcgcacgctggaaggccaattcgacccggaggtcggaagccaggctgaaggagcagaggatgaactggaaatccggttcaatgctcccttcaatatcggaatcaagctggccggagcgcagtcgctgcaacacggacagaccctggggaagttcttgcaagacatcctgtgggaggaggccgaggaaactctcgcgaacgag

SEQ ID NO: 114481 - DNA, 348 bp, Artificial Sequence
  derived and/or modified sequence
atgcctgcaccctggaccatctgttcattgcttctgctctcggttctttgtatggacttggcaatggcaggatcgtcctttctgagcccagaacatcagaagctccaaaggaaagaagcaaagaaaccttcgggacgccttaagcctagaacccttgaaggtcagttcgatccagaggtgggttcccaagctgaaggggcagaagatgaactcgaaattaggtttaacgcacctttcaatattgggattaagctcgcgggagcccagtcactgcaacacggtcagacccttggaaagtttctgcaagacattctctgggaggaggcggaagaaaccctggcgaatgaa

SEQ ID NO: 114482 - DNA, 348 bp, Artificial Sequence
  derived and/or modified sequence
atgccagcgccctggacgatctgcagtttactactcctaagtgtactatgtatggatctcgccatggccggaagttcttttctctctcctgaacatcagaaactgcagcggaaagaggctaaaaaaccctccggacgcctaaaaccaaggacactcgaagggcagtttgatccagaagttgggtctcaggccgagggagccgaagatgaactggaaattcggtttaatgcaccatttaacatagggataaaactagcaggagctcagtctctgcagcacgggcagacactcgggaaatttctgcaggatatactatgggaagaagctgaagaaactctggccaatgaa

SEQ ID NO: 114483 - DNA, 348 bp, Artificial Sequence
  derived and/or modified sequence
atgcctgcgccgtggaccatttgctcactgttgttgctgtcggtgctttgtatggaccttgcaatggcagggtcgtcctttctgtctcctgaacaccagaaattgcagagaaaggaagcaaagaaaccgtccggtcggctcaaacctcgaacgctggaaggtcaatttgaccccgaggtcggatctcaagcagaaggggctgaggatgaactggagattcgcttcaatgcgccattcaacattggcatcaagctggccggtgctcagtcgcttcaacatggacaaactttgggcaagtttttgcaagatatcctctgggaagaagccgaagagactcttgcaaacgag

SEQ ID NO: 114484 - DNA, 348 bp, Artificial Sequence
  derived and/or modified sequence
atgcctgcaccctggactatctgcagcctcctgctgctgagtgttttgtgtatggatctggccatggccgggagttcctttctctctcctgagcaccagaagctgcaaaggaaggaggcaaagaagccatcaggccgactgaaacctagaacactcgaggggcaatttgatcccgaagtgggttctcaagcagaaggtgctgaggacgagctggagatcagattcaacgccccattcaacatcggcattaagctggcaggtgctcagagcctccagcacggtcagacccttggcaagttcctgcaggatatactctgggaggaggctgaggagaccctggccaatgag

SEQ ID NO: 114485 - DNA, 348 bp, Artificial Sequence
  derived and/or modified sequence
atgcccgccccatggaccatatgttctttgctgctcctgtctgtcctctgtatggatttggccatggctggatcttcatttttgtcacccgagcatcagaagctccagcgcaaagaggctaaaaaacccagcggccgtctgaaaccccgcactctggagggacagttcgatcctgaggtgggctctcaggccgagggcgctgaagacgagctggagataaggtttaatgccccttttaacatcggaatcaagttggctggcgcacagtcactgcaacacggccagactttgggaaagtttttgcaggacatcctctgggaagaagctgaagagaccttggccaacgag

SEQ ID NO: 114486 - DNA, 348 bp, Artificial Sequence
  derived and/or modified sequence
atgcctgccccgtggactatctgttccctgctgttgctgagcgtgttgtgcatggatttggcgatggctggctcctccttcctgtccccggagcatcagaagttgcaacgcaaggaagccaagaaaccttcaggacggttgaagccgcggacgctggaaggacagttcgacccggaggtggggtcgcaggctgaaggggccgaggatgaactggagatcagattcaacgcaccattcaacatcggcatcaagctcgccggagctcaatcactgcagcacggccagaccctggggaagttcctgcaggacatcctgtgggaagaagcagaagagactctggcaaacgag

SEQ ID NO: 114487 - DNA, 348 bp, Artificial Sequence
  derived and/or modified sequence
atgcctgcaccttggaccatctgctcactgcttcttctttcggtgctgtgcatggaccttgccatggcaggatcgtcctttctttctcctgaacatcaaaagctccaacggaaggaagcaaagaagcctagcggacgtctcaagcctagaactctggaaggccagtttgatccggaggtcggttcccaggcagaaggagcagaggatgaactggagatcagattcaatgctccattcaacatcgggattaagctcgcaggggcacaatccctgcagcatggccaaacccttggaaagtttcttcaggatatcctttgggaggaagcagaagaaactctggcgaacgaa

SEQ ID NO: 114488 - DNA, 348 bp, Artificial Sequence
  derived and/or modified sequence
atgccagcgccctggactatctgttcactgctcctgctcagcgtcctctgcatggaccttgccatggccggatcgtcgttcctgagccctgaacatcagaagctccagagaaaggaagcgaagaagccgtccggtcgccttaagccaagaaccctcgagggacaattcgatccggaagtgggatcgcaggctgagggagctgaggacgaacttgagatcagattcaacgcgccgttcaatattggcatcaagctcgcgggggcccagtcccttcagcacggacagactctcggcaagttccttcaggacattctctgggaagaggccgaagaaaccttggccaacgaa

SEQ ID NO: 114489 - DNA, 348 bp, Artificial Sequence
  derived and/or modified sequence
atgccggcaccatggacgatttgctcactcctgttgctgtcagtgctttgtatggatcttgccatggccgggagttcttttttaagcccggaacatcagaaattgcaacggaaagaagccaaaaaaccttctgggagactgaaaccgagaacacttgagggtcagtttgatccggaagttggctcacaagcagaaggcgcagaagatgagctcgagattagatttaacgctccctttaatatcgggattaagctcgcgggcgctcaatccttgcaacacggacaaactttagggaagtttcttcaagatatactttgggaagaagcggaagaaacgctcgctaacgaa

SEQ ID NO: 114490 - DNA, 348 bp, Artificial Sequence
  derived and/or modified sequence
atgccagcaccttggacgatctgttcactgctgctgctctcggtgctctgcatggacctggccatggcagggtcctcgttcttgagccccgagcatcaaaaactccagcgcaaagaagccaagaagccctcgggccggctgaaacctcggactctggaggggcaattcgacccggaagtcggatcacaggccgaaggagccgaggatgaattggaaatcagatttaacgctcctttcaatatcggaatcaagttggccggcgcccagtccctgcaacatggacagacgctcggtaaattcctccaagacatcctctgggaggaagcggaagagacgctggccaacgaa

SEQ ID NO: 114491 - DNA, 348 bp, Artificial Sequence
  derived and/or modified sequence
atgccagccccttggaccatttgcagtctgctactgctgagcgttttatgtatggatctggccatggcgggctcgtcttttctgtcccccgagcatcagaagctgcagcgtaaagaggcaaagaagccatccggtagacttaagccacgcactctcgaaggccagttcgatcccgaagtgggcagccaagccgaaggcgccgaagatgagctggagattagattcaatgcgcccttcaacatagggatcaaactggccggcgctcaatccttgcaacacggacagacactgggaaaatttttgcaggacattctttgggaggaggcagaggaaactttggccaacgaa

SEQ ID NO: 114492 - DNA, 348 bp, Artificial Sequence
  derived and/or modified sequence
atgccggccccgtggactatctgcagcctgctcctgctgtctgtcctgtgtatggacttggccatggcaggatccagcttcctgtccccagagcatcaaaaacttcaacgcaaggaagccaaaaaacctagcggacggctgaagccgagaacccttgagggtcagttcgatccggaggttggatcacaagctgagggagcggaggacgagcttgagatccggttcaatgctccgtttaacatcggaatcaaactcgccggagcacagtccttgcagcacggacagaccctggggaagtttctgcaagatattctgtgggaggaggctgaagaaacgttggcgaacgaa

SEQ ID NO: 114493 - DNA, 348 bp, Artificial Sequence
  derived and/or modified sequence
atgcccgcgccgtggacaatttgctctctgctgttgctttcagtcctttgtatggacttagccatggctgggtcctctttccttagcccagaacatcagaagctgcagcggaaagaggctaagaagccctcaggacggctgaaacctcggacactggaaggccagtttgaccccgaggtggggtcacaggccgagggagccgaggacgagctggagatcaggtttaatgccccgttcaacatcggtatcaaactagccggcgcacagagtctgcagcacggtcaaaccctgggtaaatttcttcaggatattctgtgggaggaagctgaggagacgctggccaacgag

SEQ ID NO: 114494 - DNA, 348 bp, Artificial Sequence
  derived and/or modified sequence
atgcctgcaccatggaccatctgtagtttgctcttgttgtccgtgctgtgtatggatctggctatggccgggtccagcttcttgagtccggagcatcaaaaattgcagagaaaggaggccaagaaaccaagcggtcgactgaagcctaggaccttagaaggccagttcgatccagaggtgggaagccaggccgaaggggctgaagacgagctggagatacgtttcaatgccccgtttaatatagggatcaaacttgctggtgcgcagtccctgcaacatggacagactcttggcaaattcctccaggatatactatgggaagaggccgaagagactcttgctaatgag

SEQ ID NO: 114495 - DNA, 348 bp, Artificial Sequence
  derived and/or modified sequence
atgcctgcaccatggaccatctgctctctgctgctcctctcggtgctgtgcatggatcttgccatggcgggcagcagcttcctctcacctgaacaccagaagctgcagagaaaagaagccaagaaaccgagcggacgcttgaagccaagaactttggaaggccagttcgatccagaagtcggttcacaagctgaaggagccgaggacgaactggagattcgcttcaatgctcctttcaatatcgggatcaagctggccggagcgcagtcgcttcagcatgggcagaccttgggcaaattcctgcaagacatcctctgggaggaagctgaggaaaccctggcaaatgaa

SEQ ID NO: 114496 - DNA, 348 bp, Artificial Sequence
  derived and/or modified sequence
atgccagccccatggacaatctgctcactgctgctgttgtctgtgttatgcatggacctcgctatggctgggagtagttttctctcgcctgaacatcaaaaattgcagaggaaagaggctaaaaagccatctggcaggctcaagcccaggactctcgagggccaattcgatccagaggtgggttcccaggccgagggggctgaggatgaattggagattaggtttaacgcccctttcaacatcggtatcaagctagcgggcgcccagtctttacagcatggccaaaccctcggcaaattcctacaagacatcctatgggaagaagcggaggaaacacttgccaatgag

SEQ ID NO: 114497 - DNA, 348 bp, Artificial Sequence
  derived and/or modified sequence
atgccggcgccttggaccatctgctccctgctcctgttgtcagtcctgtgcatggatctcgcaatggccggatcgagctttctctccccggagcaccaaaagttgcagcggaaggaagcaaagaagccatctggtcgattgaaaccgcggactctcgaaggacagttcgaccccgaggtgggatcgcaggcagagggcgccgaagatgagctcgagatccggtttaatgctccgttcaacatcggtattaaactcgccggagcccagtccttgcaacatgggcagacccttggaaagtttctgcaagatattctttgggaggaagccgaagaaaccctggctaacgag

SEQ ID NO: 114498 - DNA, 348 bp, Artificial Sequence
  derived and/or modified sequence
atgccagcaccctggaccatctgcagccttctgttgctttcagtgttgtgcatggaccttgcaatggccggcagtagctttctctcccccgagcaccaaaaactgcagaggaaggaagcaaagaagccatccggtcgcctgaagcctagaaccttggagggtcagtttgatccagaagtgggttcgcaagcggaaggagcggaggatgaacttgaaattcgttttaacgcaccatttaacattgggataaaactggccggggctcaatccctgcagcatggacaaaccctcgggaaatttctccaggacatactctgggaggaagccgaggaaactctggcaaatgaa

SEQ ID NO: 114499 - DNA, 348 bp, Artificial Sequence
  derived and/or modified sequence
atgccagctccttggactatttgctccctattattgctgagtgttctctgcatggatctggcaatggcaggctcttcatttctctctcccgaacatcagaaactacagcggaaggaagccaaaaaaccttctggcagactgaaacctcgcaccttggagggacagttcgacccagaggtaggctcccaggccgaaggcgcggaagatgaattggagatccggttcaatgccccctttaatatcggtattaagctcgccggtgcccagtccttgcagcacggacagacccttggcaagttcctccaagacattctatgggaagaggccgaagaaactttggccaatgaa

SEQ ID NO: 114500 - DNA, 348 bp, Artificial Sequence
  derived and/or modified sequence
atgcctgcaccatggacaatttgctcactactgctgctgagtgttttatgcatggatttggcaatggctggctcctccttcctctctccagagcatcagaagcttcagcggaaagaggcgaaaaagccctctggacgcttaaaacctaggactctggagggccagttcgatcctgaggttggtagccaagctgagggcgcagaagacgagctcgagattcggttcaacgcaccctttaatatcggtattaagttggcaggtgcacagtctctgcagcacggccaaacactcggtaagtttctgcaggacatcttgtgggaggaggctgaggaaactctggcaaatgaa

SEQ ID NO: 114501 - DNA, 348 bp, Artificial Sequence
  derived and/or modified sequence
atgccggcaccatggacgatttgctctctgttactcctgagtgtgctgtgtatggatcttgccatggcaggctcaagcttcctgtcaccagagcatcagaagctccagcgaaaagaagctaaaaagcctagcggcagacttaaaccccgcaccctcgagggccagtttgatccggaggtcggatctcaggccgagggggcagaggatgaactggagatccgctttaatgcaccttttaacattggtataaagttggccggggcacagtcactgcagcacggacaaacgctgggcaagttcctccaggatatcctatgggaggaggctgaagaaacactggctaacgag

SEQ ID NO: 114502 - DNA, 348 bp, Artificial Sequence
  derived and/or modified sequence
atgcccgcaccctggaccatttgctcactgctgctgctgagcgttctctgtatggatttggcaatggctggatcctcttttctgagccctgagcatcagaagcttcagaggaaggaagctaagaagcctagtggcaggctgaagccacggacactggaaggacagttcgatcccgaagtgggctcccaggccgagggcgccgaagatgagcttgaaattaggtttaatgcaccatttaacattggtattaaacttgctggtgcgcaatcactgcagcacggccaaactctgggaaaatttctccaggatattttgtgggaggaggcagaagaaaccctggctaacgag

SEQ ID NO: 114503 - DNA, 348 bp, Artificial Sequence
  derived and/or modified sequence
atgcccgcgccatggactatttgttccctgctgcttctgtccgtcctgtgcatggatctggcaatggccggttcgtcatttctgagccctgaacatcagaagcttcagcgcaaagaggcaaagaaacccagtgggcggcttaaaccccgaaccctggagggacagttcgatccagaagtcgggagccaggccgaaggggccgaggatgagctcgagatccgctttaacgcaccctttaatatcggaataaagttggccggtgcccaaagcttgcagcacggacagacccttgggaaattcctgcaagacatcctctgggaggaagctgaggagacactagcaaatgag

SEQ ID NO: 114504 - DNA, 348 bp, Artificial Sequence
  derived and/or modified sequence
atgccggcaccttggactatctgttccttgctcctcctgtctgtgctgtgcatggaccttgcaatggctggatcgagcttcttgagtccggaacatcagaagctgcaaagaaaggaagcaaagaagccctcaggacggctgaaaccgcgaaccctcgaagggcaattcgaccctgaagtgggaagccaggctgagggtgcggaggatgagctggagattcggtttaacgcccctttcaatatcggcatcaaactggccggggcacagtcactccaacatggccaaactctgggaaagtttctccaggacattttgtgggaggaagccgaagaaaccctggccaacgag

SEQ ID NO: 114505 - DNA, 348 bp, Artificial Sequence
  derived and/or modified sequence
atgcctgcaccctggaccatttgctcgctgcttctgctttcggtcctctgtatggacctggcaatggccggatctagcttcctctcacccgaacatcagaaactccaaagaaaagaggcaaagaagcctagcggtcggctgaagccaaggactctcgaaggacaatttgatcccgaagtggggtcccaggcagaaggtgcagaagatgaacttgaaattaggtttaacgctccattcaatattggtatcaaacttgcgggagcacagtcgctgcagcacggacagactctgggcaaatttctccaagacatcctttgggaggaagctgaagaaactctggccaacgag

SEQ ID NO: 114506 - DNA, 348 bp, Artificial Sequence
  derived and/or modified sequence
atgcctgcgccttggaccatctgctcattgttgcttctcagcgtcctgtgtatggatcttgctatggctggtagttcatttctaagtcctgaacaccagaagctccagcgcaaggaagctaagaagccttccggccgtttgaagccacgtaccttggagggtcagtttgaccctgaagtgggttcccaagcagaaggtgccgaggacgagctcgaaattcgctttaacgcccccttcaacatcgggatcaagcttgccggtgcccagtcgctccagcacggtcagaccttgggcaagttcctccaagacatcttgtgggaggaggccgaggagacgctggctaacgaa

SEQ ID NO: 114507 - DNA, 348 bp, Artificial Sequence
  derived and/or modified sequence
atgcctgcaccttggactatatgtagcctgttactcttgtccgtgttatgtatggacctcgctatggccggaagcagcttcctttcccccgaacaccagaaacttcagcgcaaggaagccaagaagccatcagggaggttgaagccgcgcacgctggaaggtcagttcgatccggaggtcggaagccaggctgaaggcgctgaagatgagctggaaattcgcttcaacgccccctttaatattggaatcaagctagctggcgctcagtcattacaacacgggcagacactgggtaaatttttacaagatattctgtgggaagaggcagaggagaccttagctaatgaa

SEQ ID NO: 114508 - DNA, 348 bp, Artificial Sequence
  derived and/or modified sequence
atgccagcaccgtggaccatctgttctctgctgctcctgagcgtgctctgcatggatttggcaatggcaggttctagctttctaagccctgaacaccagaaactgcagcgcaaggaggccaagaagcctagcgggcgtttgaaaccaagaactctggagggccaattcgatccggaggtagggtcacaggcagagggcgccgaagacgagttagaaatcagattcaatgcccccttcaatatcgggataaagctggccggggcacaatccctgcagcacggccagacccttggaaaattcctgcaggacatcctgtgggaggaggcagaagaaacacttgctaacgag

SEQ ID NO: 114509 - DNA, 348 bp, Artificial Sequence
  derived and/or modified sequence
atgccagcaccctggaccatttgttccctactgttactgtccgttctgtgcatggatcttgcaatggcagggtcttcttttctcagccccgaacatcagaagttgcaacggaaggaagccaagaagccaagtggcagactcaaaccacggaccctggaagggcagttcgacccagaagttggatctcaggccgagggggctgaggacgaactggaaattcggtttaatgctccttttaacatcggcattaagttagctggcgcccagtccttgcagcacggccaaactctgggtaagttccttcaggatatcctgtgggaggaggccgaagagactcttgctaatgag

SEQ ID NO: 114510 - DNA, 348 bp, Artificial Sequence
  derived and/or modified sequence
atgcccgccccatggactatttgttctttgcttctcttatccgtgctctgtatggaccttgctatggctggatcctcgtttcttagtccagagcaccagaagctgcagcgtaaagaagccaagaaacctagcggaaggctaaagcctcgcactttagagggtcaatttgaccccgaggtggggtcgcaagcagagggcgccgaagacgagttggaaattagatttaacgctcccttcaacatcggaattaagcttgccggagcccagtcactccagcatggccaaacactcggcaaattcctgcaagatatcctgtgggaggaagcagaggagacgttagcaaatgag

SEQ ID NO: 114511 - DNA, 348 bp, Artificial Sequence
  derived and/or modified sequence
atgcctgcgccctggactatttgttccttgctcctgctgtccgtgctgtgtatggatcttgcaatggcaggtagctccttcctgagccccgagcatcagaaacttcagaggaaggaggccaagaagcccagcgggagactcaagccccgcacgctcgaaggccagttcgacccagaggtagggtcccaggccgaaggcgcggaagatgagctggagattcggttcaacgcaccatttaatatcggcattaagctggcgggtgcacaatcactgcaacatggccagactctcgggaaatttttgcaggacatcctctgggaggaggccgaggagacgctcgccaacgag

SEQ ID NO: 114512 - DNA, 348 bp, Artificial Sequence
  derived and/or modified sequence
atgccggccccgtggaccatctgctcactgttgctcttatcagtgttgtgtatggatttggccatggctggatcttccttcttatcaccagagcaccaaaaactgcagcggaaagaagcgaagaaaccaagcggccgccttaaaccgaggacgcttgaaggccaatttgatcccgaagtaggtagccaggcagaaggcgcggaagacgagctggagattcgctttaatgctccttttaatatcgggattaaactcgcgggggctcaatccttgcaacacggtcaaactctcggcaaattcctacaggatattctgtgggaagaagcggaggaaactctggcgaatgaa

SEQ ID NO: 114513 - DNA, 348 bp, Artificial Sequence
  derived and/or modified sequence
atgccagctccctggactatttgcagtctcctcttgttgtccgtgctctgtatggacctcgccatggccggctcctctttcctgagccctgagcaccaaaagcttcaaagaaaggaagctaagaaaccctctggccgcttgaagccacgaacactcgaagggcaattcgacccagaggtcgggtcacaagctgaaggggctgaagacgagttggagatccgatttaatgccccttttaacattggtatcaagcttgctggagcgcagagcctccagcacgggcagaccctgggtaagttcctgcaggacatcctctgggaagaagccgaggagactctcgcgaacgag

SEQ ID NO: 114514 - DNA, 348 bp, Artificial Sequence
  derived and/or modified sequence
atgcctgcaccatggacgatttgttcattgttattattgagcgttttgtgtatggatttggctatggctggaagttcttttctttcacctgaacatcaaaaattacaaagaaaggaggctaaaaaaccatcaggaagattaaagcctagaactttagaaggacaatttgatccagaagttggaagtcaagcagaaggagctgaagatgaacttgaaattcgttttaatgcaccatttaatattggtattaaattggcaggtgcccaatctttacaacatggacaaactttgggaaaatttcttcaagatatactatgggaagaagccgaagagactttagcaaatgag

SEQ ID NO: 114515 - DNA, 348 bp, Artificial Sequence
  derived and/or modified sequence
atgccagcaccctggactatatgctcactgctcctgctgagtgtactgtgcatggatctggcaatggcaggctcctctttcctttctcctgagcaccagaagctgcagaggaaggaggcaaagaaaccctctggtaggcttaagccacgcacgctggaaggtcagttcgatccagaagtgggcagtcaagccgaaggggcagaggatgagctggagattcggtttaacgctccgtttaatatcggcatcaaactggctggtgctcaaagtctgcagcacgggcagacactgggcaagtttcttcaggatatcctctgggaagaagctgaggaaactttggcgaatgag

SEQ ID NO: 114516 - DNA, 348 bp, Artificial Sequence
  derived and/or modified sequence
atgcccgcaccctggaccatctgcagcctgctgctcttgtccgtgctgtgcatggatctggcgatggccggttcttcatttttatcccccgagcatcaaaagttgcagcgtaaagaggccaaaaagccctccggtcgcctgaagccgagaaccctggagggacagtttgaccctgaagttggcagtcaggcagagggcgcagaggacgagttggaaattagatttaatgctccttttaacatcggaatcaagctggccggcgcccagagtcttcagcatggtcagaccctgggcaaattcctgcaagacatcctgtgggaggaggcggaagagacattggccaacgaa

SEQ ID NO: 114517 - DNA, 348 bp, Artificial Sequence
  derived and/or modified sequence
atgccagcaccatggactatctgctccttgttgctgctgtcagtactgtgtatggatctggcaatggctggatctagttttttatctcccgaacaccagaagctccaacggaaggaggctaaaaagccctcgggaagactgaagccaaggaccctggagggacagttcgatcctgaagtaggtagccaggccgagggagccgaggacgaactcgagatcagatttaatgcaccattcaatattgggattaagctggctggagcacaatcactgcagcacggccagacgctaggaaagttcctccaagatattctctgggaggaggcggaggaaaccctcgcaaacgaa

SEQ ID NO: 114518 - DNA, 348 bp, Artificial Sequence
  derived and/or modified sequence
atgcctgcaccgtggaccatatgctctctgttactgctcagcgtgctctgcatggatctggctatggcaggttccagttttctatcacctgagcatcagaaactgcaaagaaaggaggccaagaaacccagtggaaggctgaagccccgcactctcgagggccagtttgaccccgaggtggggagccaggcagaaggagccgaggacgagctggagatccggttcaatgctccctttaatatagggatcaaactggcaggagcccagagtcttcagcatgggcaaacattgggtaagttcctacaggacattttatgggaggaggcagaagagacgttagccaacgag

SEQ ID NO: 114519 - DNA, 348 bp, Artificial Sequence
  derived and/or modified sequence
atgcccgctccatggacaatttgctcactcctcctgttatcagtgctgtgtatggaccttgcgatggccgggtcttccttcctgtcacctgagcaccagaagctacagagaaaggaggcgaaaaagccctcaggacgactgaagccacgcaccctggaaggccagtttgaccccgaagtcggctcgcaagctgaaggcgccgaagacgaactcgaaattcgcttcaatgcccccttcaacatcggcataaaacttgcgggcgcccagtcacttcagcacgggcaaacacttggtaagttcttacaggacatcttgtgggaagaggcggaggaaacgctggccaatgaa

SEQ ID NO: 114520 - DNA, 348 bp, Artificial Sequence
  derived and/or modified sequence
atgcctgccccatggactatttgctccctcctgcttctgtccgtcttatgcatggatctggcaatggccggcagcagctttctaagccctgagcaccagaagctgcagaggaaagaagccaagaagccaagcggaaggctaaaacccaggactctggagggtcagtttgaccccgaggttgggagccaggcagagggcgccgaggacgaactggagattcggtttaacgccccattcaatattggtattaagctggcaggcgcccagagcctgcagcacggccagaccctcggcaagttcctgcaggatatactctgggaagaggccgaggagactctggccaacgaa

SEQ ID NO: 114521 - DNA, 348 bp, Artificial Sequence
  derived and/or modified sequence
atgccggccccttggacaatttgttcgcttctgctgctgagtgtattgtgcatggacttggctatggcaggaagctcgtttttgtcgcctgagcatcagaaactgcagcggaaggaggcaaagaaaccatccggcagacttaagccacgaactctcgagggtcaatttgaccctgaggtcggatcccaggccgagggcgctgaggatgagctagaaattcggttcaacgcccctttcaatatcggtataaagctcgcaggtgcccagtccctgcagcacggacaaacactgggcaagttcctccaggacattctgtgggaagaggcagaagagactcttgccaacgag

SEQ ID NO: 114522 - DNA, 348 bp, Artificial Sequence
  derived and/or modified sequence
atgcctgccccctggacaatttgttctctgcttctgctgagcgtgttatgtatggatttggcgatggccggtagctccttcttgtcccccgagcatcaaaagctccaacgtaaagaggccaaaaagccttcgggtaggttgaagcctcgaacactggaggggcagttcgatccagaagtcggctcccaggcagaaggagccgaagacgagctcgaaatccgatttaatgctccatttaatatcgggattaagttggccggtgcccagtccctacagcatggacagaccttgggcaagttcctgcaagatattttgtgggaggaggccgaggagactctggccaacgaa

SEQ ID NO: 114523 - DNA, 348 bp, Artificial Sequence
  derived and/or modified sequence
atgccagccccatggacaatctgttccctgcttctgctgagtgtgctgtgtatggatctggccatggccggcagttccttcctgagcccagaacatcagaaacttcagagaaaggaggccaaaaagccctctggccgcctgaagcccagaaccctggagggccagttcgaccccgaggtcgggtcccaggccgagggtgccgaggatgagctcgaaatacgctttaatgcaccttttaacatcggcatcaagcttgcgggggcccagtctctgcagcacgggcagacgttggggaagtttctgcaagacatcctctgggaagaggcagaggagaccctggctaacgaa

SEQ ID NO: 114524 - DNA, 348 bp, Artificial Sequence
  derived and/or modified sequence
atgccggctccctggactatctgttccctgttgttgctcagtgtgctttgcatggacctggctatggcaggaagtagttttctctccccagagcatcaaaaactgcagcgtaaagaagccaaaaagcccagcggaaggctgaagcccagaaccctggaggggcagtttgaccctgaggtgggcagtcaggccgaaggcgccgaagacgagctggagattcgatttaatgcccctttcaatattgggattaaactagcgggtgctcagtcgctgcaacatgggcaaactctgggcaaattccttcaggacatcttgtgggaagaggccgaggaaacgctcgctaatgag

SEQ ID NO: 114525 - DNA, 348 bp, Artificial Sequence
  derived and/or modified sequence
atgcccgccccttggactatttgctcactgttgctcctctcggttctgtgcatggatctggcaatggctgggtcgtccttcctgtcaccagagcatcaaaaacttcagcgaaaagaggccaagaagccatcaggaaggctgaagcctaggaccctggagggacaattcgatcccgaggtcgggtctcaggctgagggagcggaggatgagctcgagatccggttcaatgcgccatttaatatcggtattaagctcgcgggagcccagtcacttcagcacgggcagacactgggcaaattcctgcaggatattctttgggaagaggcagaggagaccctggcaaacgag

SEQ ID NO: 114526 - DNA, 348 bp, Artificial Sequence
  derived and/or modified sequence
atgcccgctccgtggaccatttgctccctgctgcttctgagtgttctgtgtatggatctggcaatggccggatcttcattcttgagccccgagcatcaaaaactgcagcgaaaggaggctaagaagccaagtgggaggctgaaacccaggacgctggaaggacaattcgatcctgaagtcggctcacaggcggagggagctgaggatgagctcgagattaggtttaacgcgccgttcaatatcgggatcaagttggcaggggctcagtctctgcagcacgggcaaactctcggaaaattccttcaagatatcctgtgggaggaggcggaggagacattggcgaacgag

SEQ ID NO: 114527 - DNA, 348 bp, Artificial Sequence
  derived and/or modified sequence
atgcccgccccctggaccatatgcagcctgctccttctctcagtcctgtgtatggacttggcaatggccggctctagtttcctgtcacctgagcatcagaagttgcagcggaaggaggccaagaagcccagcgggcggctgaagcctagaacactggaaggtcagttcgaccccgaggtggggtcccaggccgagggtgctgaggacgagcttgagattaggtttaacgctcccttcaacattgggatcaaactcgcgggggcccagagcttgcagcacggacagacactcggtaaattcctccaggacatcttgtgggaggaagcagaggagaccctcgccaatgag

SEQ ID NO: 114528 - DNA, 348 bp, Artificial Sequence
  derived and/or modified sequence
atgcctgcaccatggacaatctgctcccttctgctgctgtcagttctttgtatggatctggccatggctggtagcagtttcctcagccctgagcaccagaagttgcagcgaaaggaagccaagaaaccctctgggagactcaaacccagaacactggaggggcagtttgaccccgaggtgggctctcaggctgagggcgccgaggacgagttggaaatccggttcaacgcaccattcaacatcggtatcaaactagccggcgcacagagtttacagcatggacagaccttggggaaattcctgcaagacattctgtgggaggaggccgaggagaccttggcgaatgag

SEQ ID NO: 114529 - DNA, 348 bp, Artificial Sequence
  derived and/or modified sequence
atgcctgcaccttggaccatttgttctttgctcttgctgtctgtgctgtgcatggacctcgctatggctggatcatctttcctgagcccagagcatcagaaactccaaagaaaggaggccaagaagccatccggcaggttgaagcctcgtaccctcgagggccagttcgaccctgaagtcggctctcaggccgaaggtgccgaagatgagcttgagattcgtttcaacgctcccttcaatattggcattaagctggctggcgctcagtccctccagcacggacaaaccttgggtaaatttctgcaagacattctctgggaagaggctgaggaaacacttgctaacgaa

SEQ ID NO: 114530 - DNA, 348 bp, Artificial Sequence
  derived and/or modified sequence
atgccggcgccttggaccatctgtagcttgctgctccttagcgtgctgtgtatggatctggccatggcggggtccagctttcttagccctgaacaccagaagctgcagcggaaagaggccaaaaagcccagcggtagactgaaacctcgaacactcgagggccagtttgatcctgaagtcggctcccaggccgaaggcgcagaagatgagttggagatccgatttaacgcgccattcaacatcgggatcaaacttgctggcgcccaatcactacagcatggtcagactctggggaagttcttgcaagacattctgtgggaggaggccgaggaaactctagccaacgag

SEQ ID NO: 114531 - DNA, 348 bp, Artificial Sequence
  derived and/or modified sequence
atgccggcaccctggacaatttgctctctcctcttgctgtccgtgttgtgcatggatctggcaatggccggcagcagtttcctctcccctgaacaccagaaactgcaacggaaagaagcgaagaagccctcaggtcgtctcaaaccccgcactctagaagggcagtttgaccccgaggtgggttcacaggccgagggagcggaggacgagttggaaatacgctttaatgctcccttcaacatcgggatcaagctggctggcgcccagtcccttcagcatggacagacgctggggaaatttctccaagacatactctgggaagaggccgaggagaccctggctaacgag

SEQ ID NO: 114532 - DNA, 348 bp, Artificial Sequence
  derived and/or modified sequence
atgcccgctccctggacaatatgctcacttctcctgcttagcgtgctgtgtatggatctggccatggctgggagttcattcctaagccctgaacaccagaaactgcagaggaaagaagcgaagaaaccctcgggccgcctcaagccgagaacattagagggccagttcgatccagaggtgggttcacaggccgagggggcggaagacgaactggaaattagatttaacgcccccttcaacatcggtattaaactagcgggggcgcagtcgcttcagcacgggcagacattgggcaaattcctgcaggacatcttatgggaggaggcggaggagaccttagctaacgaa

SEQ ID NO: 114533 - DNA, 348 bp, Artificial Sequence
  derived and/or modified sequence
atgccggccccctggaccatctgttcacttctgctcctctccgttctgtgtatggacctcgccatggccggctcctccttcctctccccagagcaccagaagttgcagagaaaagaggcgaagaaaccatcaggaagacttaagccaaggacactggagggacagttcgaccccgaagttggtagccaggcagaaggcgccgaggacgagcttgagatcaggttcaatgctccttttaacatcggtataaagctcgccggagcccaatctctgcagcacggtcagactctcggaaaatttctccaggacatcctctgggaagaggcagaggagactctcgcaaacgag

SEQ ID NO: 114534 - DNA, 348 bp, Artificial Sequence
  derived and/or modified sequence
atgccagccccgtggaccatttgtagcctcctgcttttgtctgtcctgtgcatggacctagccatggctggttcgtccttcctctctcccgaacaccagaagcttcagcgaaaggaagctaaaaagccatcagggcgcctgaaaccccgcactctggaggggcagttcgatccggaggttggctctcaagcagagggagctgaggacgagctggaaattaggttcaacgccccattcaacatcggcatcaaactggcaggggcacagagcttacagcacggacagacactgggcaaattcctgcaggatatcctctgggaagaggccgaggaaacactcgctaatgaa

SEQ ID NO: 114535 - DNA, 348 bp, Artificial Sequence
  derived and/or modified sequence
atgcctgccccctggaccatctgttccctgctgctgttgtccgttctctgcatggacttagccatggccggcagttctttcctctcccccgaacaccaaaagctgcaacgcaaggaggcgaagaagccgagtggccgactgaagcctagaacattggaaggccaattcgaccccgaggtgggcagtcaggctgagggcgcggaggatgagctcgagatcagattcaacgcccctttcaatatcggtatcaagcttgccggcgcgcagtctttgcaacacggtcagaccctcggtaagttcctgcaggacatcctttgggaggaggctgaggagacccttgctaacgag

SEQ ID NO: 114536 - DNA, 348 bp, Artificial Sequence
  derived and/or modified sequence
atgccggccccttggaccatttgtagcctgctgttgctctctgtcctctgtatggatttggccatggccggctcatcttttctcagcccggaacaccaaaagctgcagcgcaaagaagcaaagaaaccttcaggccgcttgaagccccgtaccctcgagggccaattcgatcctgaggtcggctcccaggctgagggggcagaggatgagctggaaatcagattcaacgccccatttaatatcggaattaagcttgcgggcgcacagtccctgcaacacgggcagactctggggaaatttctgcaggacatcttatgggaggaggccgaggagacccttgccaacgaa

SEQ ID NO: 114537 - DNA, 348 bp, Artificial Sequence
  derived and/or modified sequence
atgcccgcaccatggacaatctgctcactcctgctattgtctgtgctctgtatggatctggcgatggcaggatctagtttcttaagtcctgaacatcaaaaactgcagcgcaaagaagcaaaaaaaccatccgggaggctcaagcctcgcactcttgaagggcagttcgatccggaggtaggatctcaggccgagggggccgaagacgaactagaaatacgatttaacgcacctttcaacatcggaattaaacttgccggggctcagagtctccagcatggacagacactcgggaaattccttcaggatatactttgggaagaggcggaggaaacacttgctaacgaa

SEQ ID NO: 114538 - DNA, 348 bp, Artificial Sequence
  derived and/or modified sequence
atgcctgccccctggaccatttgtagtctgctcctccttagcgtactctgcatggatttggctatggccggcagttcattcctgtcccccgaacatcagaagctccagaggaaagaagctaaaaaaccatccggaaggctcaagcctcgtactcttgagggccagtttgacccagaggtgggctcccaagccgagggggctgaggacgaactggagattaggttcaatgctccattcaacataggaataaaactcgctggagcacagtcactgcagcacggccagaccttaggcaagtttctgcaggacatcctgtgggaagaagccgaagaaacgctcgcgaacgag

SEQ ID NO: 114539 - DNA, 348 bp, Artificial Sequence
  derived and/or modified sequence
atgccggccccgtggactatctgcagtttgctcctactgtctgtattatgcatggacctggccatggctgggagcagctttttgagtccagagcaccagaagctgcaacgcaaagaagccaagaaaccctccgggcggctgaaacctcggaccttggagggccagtttgacccagaagttgggtctcaagcagaaggggcagaggatgagcttgagatacggtttaacgcacccttcaacatcggtatcaaactagctggagcccagtcgctgcagcatgggcaaactctcggtaagttcctccaggatattctctgggaggaggctgaggaaactcttgctaatgag

SEQ ID NO: 114540 - DNA, 348 bp, Artificial Sequence
  derived and/or modified sequence
atgccggccccttggacaatttgctccctcctactcctgagcgtgctgtgtatggacctggctatggctggaagcagcttcctgagcccggagcatcaaaagctccagaggaaggaggccaagaaaccctccggtcgcttgaagccgcgaacccttgagggccagtttgacccggaggtcggttctcaggcggagggtgcggaggatgagttggagattcgctttaatgccccctttaacatcggcataaagctcgcgggagcccagagcctgcagcatggacagacccttggtaagttcctgcaggatattctgtgggaggaagctgaggagacgctagccaacgag

SEQ ID NO: 114541 - DNA, 348 bp, Artificial Sequence
  derived and/or modified sequence
atgcctgctccgtggacaatctgcagccttttacttttatcagttctttgtatggatttagctatggctggttcttcttttttgtcgccagaacaccaaaagttgcagcgtaaggaggctaaaaagccatctggccgattgaagcccagaacccttgaaggacagttcgatccggaagttggatcacaagcagaaggtgcagaggatgaattagaaataaggtttaacgcgccttttaacattggtattaagctagctggcgctcaatcgttgcaacacggacaaactttgggtaaattcttacaggacattctgtgggaggaagctgaagagacacttgcaaacgaa

SEQ ID NO: 114542 - DNA, 348 bp, Artificial Sequence
  derived and/or modified sequence
atgcccgctccgtggaccatctgttccctgctgctgctgtcagtgttgtgcatggatcttgcaatggcggggagctcgtttctgtcgcctgagcaccagaaactgcagagaaaggaagccaagaagccgtcaggacgcctgaaaccaaggactctcgagggacagttcgacccggaagtcggcagccaagccgagggggccgaggacgaactcgaaattcggttcaacgcgccattcaatatcggtatcaagctcgcgggagcccagtcccttcaacatggacagactttgggcaagttcctgcaagatatcctctgggaggaggcagaagaaaccctcgctaacgaa

SEQ ID NO: 114543 - DNA, 348 bp, Artificial Sequence
  derived and/or modified sequence
atgcctgcaccatggacgatctgttctcttctcctcctgtccgtactttgtatggatctagccatggctggatccagtttcctgtcacctgaacaccagaaacttcagagaaaagaagctaaaaaaccttctgggagactaaagccaaggacactggaaggacagttcgatcctgaggtgggaagtcaagcggagggggcagaagatgaattggaaataagatttaatgcaccatttaacatagggattaaactggcaggagcacagtctctacagcatgggcagactctaggaaaattcttacaggacatactttgggaagaagcggaggaaacactcgcgaatgaa

SEQ ID NO: 114544 - DNA, 348 bp, Artificial Sequence
  derived and/or modified sequence
atgcctgccccctggactatatgctctctgctgctacttagtgtcctgtgcatggaccttgctatggccggctccagtttcctgagccctgaacaccagaagctgcaaagaaaggaggccaaaaagccctctggacgccttaagccgcgaacgctggaaggacaattcgaccccgaggtgggatcccaggcggaaggcgcagaagacgagctggaaatccggttcaatgctccctttaatattggcattaagctggcaggagcgcagagcctgcagcatggacagacactcggcaaattcctccaggacattctgtgggaggaagccgaagagacgctcgcaaacgag

SEQ ID NO: 114545 - DNA, 348 bp, Artificial Sequence
  derived and/or modified sequence
atgcctgccccatggactatttgtagccttcttctcttaagcgttctatgcatggacctcgccatggccggatcatcattcctttcaccagaacatcaaaagttgcaacggaaggaggcgaaaaaaccctcgggtcgcttaaagccaagaacacttgagggccaattcgatccagaagtcggatcgcaagctgaaggagcggaagacgaattggaaatacggttcaatgctccattcaatatcggaataaagcttgcgggagctcagtcgctccaacatggacagactctgggaaaattccttcaagatattctatgggaggaagctgaagaaactctcgcaaatgaa

SEQ ID NO: 114546 - DNA, 348 bp, Artificial Sequence
  derived and/or modified sequence
atgccggcgccgtggacgatatgttcgttattactattatcggtattatgtatggatttagcgatggcgggttcgtcgtttctatcgccggaacatcaaaaattacaacgaaaagaagcgaaaaaaccgtcgggtcgactaaaaccgcgtacgctagaaggtcaatttgatccggaagtaggttcgcaagcggaaggtgcggaagatgaactagaaatacgatttaatgcgccgtttaatataggtataaaactagcgggtgcgcaatcgctacaacatggtcaaacgttaggtaaatttttacaagatatactatgggaagaagcggaagaaacgttagcgaatgaa

SEQ ID NO: 114547 - DNA, 348 bp, Artificial Sequence
  derived and/or modified sequence
atgcctgctccttggaccatttgtagcctgctcttgctgtccgtactgtgcatggatctcgcaatggcaggttcatcattcctgtcgcctgagcatcaaaaacttcagcgcaaggaagccaagaaaccttctggccgtcttaagcctaggactctggaggggcaattcgatccggaagtgggatctcaggcagagggggcagaggatgaactcgagatccgtttcaacgcgccattcaatatcggcattaagctcgcaggggcccagtctttacagcatggtcagaccttggggaagttcctccaggacatcctgtgggaggaggcagaggaaacactcgccaatgag

SEQ ID NO: 114548 - DNA, 348 bp, Artificial Sequence
  derived and/or modified sequence
atgccggcgccgtggaccatctgtagcctgctgttgctgtcagtgctgtgtatggatctggctatggctggatctagctttctaagccccgagcatcagaagctgcagcgtaaagaggctaaaaaacccagcggtaggcttaaacccagaaccttggaaggccaattcgaccctgaggtggggagccaggctgaaggagctgaagatgagcttgagatacgatttaatgccccttttaacatcggcataaagctcgccggagctcagtccctccagcacggacaaacactcggtaagttcctccaagatatcctgtgggaggaggctgaggaaaccctggccaatgag

SEQ ID NO: 114549 - DNA, 348 bp, Artificial Sequence
  derived and/or modified sequence
atgcctgccccttggacaatctgttccctcctgcttctttcagtgctctgtatggacctggccatggccgggtccagttttctcagcccagagcaccagaaactgcagaggaaagaagccaagaaaccatcagggagactgaaacctcgcaccctcgagggacagtttgatcccgaagtggggagccaggccgagggagcagaagacgagttggaaatcagatttaacgcgccttttaacattggtatcaaattggccggtgcccagagcttacaacatggtcaaacactgggtaaattcttgcaggatattttgtgggaggaagcggaggagactctggccaatgaa

SEQ ID NO: 114550 - DNA, 348 bp, Artificial Sequence
  derived and/or modified sequence
atgcctgcgccttggaccatttgttccctgctgctattgagcgtgctgtgtatggacctggctatggcaggcagcagctttctaagccccgaacaccaaaaactgcagcgcaaggaagcgaagaaaccctccggacggctcaagccacgcacactagagggccaattcgaccctgaagtaggctcgcaagctgaaggggcagaagacgaactcgaaatccgcttcaacgcccccttcaacatcggcatcaagcttgctggggctcagtctctgcagcatggtcagacactgggcaagtttctgcaagatatcctgtgggaagaggctgaagaaacactcgcaaatgaa

SEQ ID NO: 114551 - DNA, 348 bp, Artificial Sequence
  derived and/or modified sequence
atgccggccccttggacaatctgctcacttctgctgctgtccgttctgtgcatggacctcgccatggccggcagtagcttcctatctcctgaacaccagaaactccagcgcaaagaagcgaagaagcccagcgggcgtcttaagccaaggacgctggagggccagttcgatcccgaagtcggctcccaggctgagggcgctgaggatgagcttgagattcgctttaatgccccattcaatatcggcatcaaactcgctggcgcccaaagcctgcaacacggccaaaccctgggtaagtttctgcaagacattctttgggaagaagccgaggaaacgctcgctaatgag

SEQ ID NO: 114552 - DNA, 348 bp, Artificial Sequence
  derived and/or modified sequence
atgcccgcaccatggactatatgcagcttgctcttgctttctgtcttatgtatggacctggcaatggccggatcttcattcctatctcctgaacatcagaagctgcagcgtaaggaggccaagaagccatctggccggctgaagcctagaacattggaaggacagttcgacccggaagtgggttcccaagccgagggtgctgaagacgaactcgaaattcggttcaacgcacctttcaacataggaattaagctagctggcgcccagagtttacaacacgggcagacattgggcaagtttttgcaggacattctctgggaagaagcagaggaaaccttggccaacgaa

SEQ ID NO: 114553 - DNA, 348 bp, Artificial Sequence
  derived and/or modified sequence
atgccagccccatggaccatctgtagcttgctgttgctgtctgtgctgtgtatggatcttgccatggctgggagttcttttctaagtcccgagcaccagaagctgcaacggaaagaggccaagaaaccgtctggcaggctgaaaccccgtaccctggaaggtcaattcgatcctgaggtaggttcgcaggcggaaggtgcagaggacgagctggagattagattcaacgccccttttaatatcggaattaagctcgcaggcgcccagtccctacaacatggtcaaacactgggaaaatttctgcaggatatactgtgggaagaagcggaagaaaccttggccaatgag

SEQ ID NO: 114554 - DNA, 348 bp, Artificial Sequence
  derived and/or modified sequence
atgcctgctccctggacaatttgctcccttctattgctgtccgtgctgtgcatggatttggccatggcgggcagctctttcctgagtcccgaacaccagaaactccaaaggaaggaagcaaaaaaaccatccggaagactgaaaccaagaaccctggagggacagtttgacccagaagtgggcagccaagcagaaggtgcagaagatgaattggaaatacgcttcaatgccccgtttaatatcggcatcaaactcgctggcgcacaaagcctccagcatggacagactcttggcaaattcttgcaagacatcctctgggaggaggcagaagaaacactcgcaaatgaa

SEQ ID NO: 114555 - DNA, 348 bp, Artificial Sequence
  derived and/or modified sequence
atgccagcgccatggaccatctgctcactgttgctcctgtccgtgctttgcatggaccttgccatggccgggtcatcctttctgtccccagaacaccagaagctccaacgcaaagaggcaaaaaaacccagtggtagacttaagcccaggacactggagggccaatttgatcccgaggtcgggagtcaggcggagggtgccgaggacgagctggagatacggttcaatgccccatttaacattggcatcaaactggcaggagctcagtctttgcagcacggccagactctagggaaatttcttcaggacattttgtgggaggaggccgaagagacattagctaatgaa

SEQ ID NO: 114556 - DNA, 348 bp, Artificial Sequence
  derived and/or modified sequence
atgcctgcaccatggacgatctgctctctgctcctgctgtccgtgctctgcatggatttagcgatggctggaagtagcttcctttcaccagaacaccagaagctccaacgcaaggaggctaaaaaacctagtggccgccttaagcctagaacactcgagggacagttcgatcccgaagttggttcgcaggccgaaggtgccgaagatgaattagagatacggtttaatgccccgttcaatattgggatcaagctggctggggctcagtcccttcagcacggtcagactctcggtaagtttttgcaggacatattgtgggaagaagccgaggaaactctagctaacgaa

SEQ ID NO: 114557 - DNA, 348 bp, Artificial Sequence
  derived and/or modified sequence
atgccggccccttggaccatttgttccctgctactgctgtctgtgctgtgcatggatctggcgatggccggttctagctttctgagcccggaacaccagaaacttcagcgaaaggaagcgaagaaaccgagcggtcgcctgaaaccacgcactctcgagggacaattcgacccggaagtcggcagccaagcagaaggcgctgaggacgagctggagattcgctttaacgccccctttaacatcggcattaagttggcaggcgcacaaagcctgcaacacggccaaaccctgggcaagttccttcaggacatcttgtgggaggaggcggaagagaccctggcaaatgag

SEQ ID NO: 114558 - DNA, 351 bp, Artificial Sequence
  derived and/or modified sequence
atgcccagccccggcaccgtgtgcagcctgctgctgctgggcatgctgtggctggacctggccatggccggcagcagcttcctgagccccgagcaccagagagtgcagagaaaggagagcaagaagccccccgccaagctgcagcccagagccctggccggctggctgagacccgaggacggcggccaggccgagggcgccgaggacgagctggaggtgagattcaacgcccccttcgacgtgggcatcaagctgagcggcgtgcagtaccagcagcacagccaggccctgggcaagttcctgcaggacatcctgtgggaggaggccaaggaggcccccgccgacaagtag

SEQ ID NO: 114559 - DNA, 102 bp, Artificial Sequence
  derived and/or modified sequence
atgcccagccccggcaccgtgtgcagcctgctgctgctgggcatgctgtggctggacctggccatggccggcagcagcttcctgagccccgagcaccagtag

SEQ ID NO: 114560 - RNA, 102 nt, Artificial Sequence
  derived and/or modified sequence
augccuagccccggaacgguguguagcuugcuuuugcugggaauguuguggcucgaucucgcaauggccggaagcaguuuucuuaguccugaacaccaauag

SEQ ID NO: 114561 - protein, 117 aa, Artificial Sequence
  derived and/or modified sequence
MPSPGTVCSLLLLGMLWLDLAMAGSSFLSPEHQRVQQRKESKKPPAKLQPRALAGWLRPEDGGQAEGAEDELEVRFNAPFDVGIKLSGVQYQQHSQALGKFLQDILWEEAKEAPADK

SEQ ID NO: 114562 - protein, 91 aa, Artificial Sequence
  derived and/or modified sequence
MPSPGTVCSLLLLGMLWLDLAMAGSSFLSPEHQRVQQRKESKKPPAKLQPRALAGWLRPEDGGQAEGAEDELEVRRPQPTSDRPQALLTSL

SEQ ID NO: 114563 - protein, 33 aa, Artificial Sequence
  derived and/or modified sequence
MPSPGTVCSLLLLGMLWLDLAMAGSSFLSPEHQ

SEQ ID NO: 114564 - DNA, 354 bp, Artificial Sequence
  derived and/or modified sequence
atgccttctccagggacggtgtgttcgctactgttgcttggaatgctatggctagaccttgctatggcgggctcatctttcctgtccccagagcaccagagggtacagcagcgcaaggaatccaagaaaccgcccgccaaactgcaaccacgcgccttggctgggtggctccggcccgaagacggcggccaggctgagggcgccgaagatgagctagaggtgaggtttaatgcacccttcgatgtgggcatcaagctgtcgggggtccagtatcagcagcactctcaggcattggggaaattccttcaggatattctctgggaggaggctaaggaggctccggccgacaaatag

SEQ ID NO: 114565 - DNA, 276 bp, Artificial Sequence
  derived and/or modified sequence
atgcccagcccgggcactgtttgctcccttctgctcctcggcatgctgtggcttgaccttgcaatggccggctcatcatttttgtcgccggaacatcagcgggttcagcaacgaaaagaaagtaaaaagcccccagctaagttgcagcctcgagctctggctgggtggttacgccccgaggacggcggacaggccgagggagcagaagacgagttggaagtccgccgaccccagcccacaagtgatagaccccaggctctcctgacaagcctatag

SEQ ID NO: 114566 - DNA, 354 bp, Artificial Sequence
  derived and/or modified sequence
atgccgagtccaggaacggtctgtagtttgcttctcctgggcatgctttggctggacctggcaatggccggctcttcttttttgtctcctgaacaccagcgagttcagcagagaaaagagtctaaaaagcctcccgccaaattgcaaccgagggccctagctggctggctgcgccccgaggatgggggacaggcggaaggcgctgaggatgaactggaagtcaggtttaacgccccgtttgatgtgggcattaaactgtccggcgtgcagtatcagcagcactctcaggccctgggaaagttcttgcaagacatcttgtgggaggaagccaaagaggccccagccgacaaatag

SEQ ID NO: 114567 - DNA, 354 bp, Artificial Sequence
  derived and/or modified sequence
atgccctctcccggcactgtctgctcccttttactactgggaatgctgtggctcgacctggctatggccggcagcagttttctgagtcctgagcatcaacgtgtgcagcagcggaaagaatctaaaaaaccacctgcaaaattgcagccccgggcgctggcaggctggttgcgccccgaggacggtgggcaggcagagggcgcagaggatgaactggaggttaggtttaatgcgcctttcgacgtggggatcaagttatctggcgtacagtaccaacaacactcccaggctcttgggaagttcttacaggacatcctgtgggaggaggctaaggaggccccagctgataaatag

SEQ ID NO: 114568 - DNA, 354 bp, Artificial Sequence
  derived and/or modified sequence
atgcccagtcccgggacagtgtgctccctcctgctattagggatgctatggctggacctggctatggctgggtcatccttcctgagtcctgaacaccaacgggtgcaacaaagaaaggaatctaagaagccaccagctaagttgcagcctcgggctctggctgggtggctgcgccctgaggacggcggtcaagctgaaggcgcagaggacgaacttgaggtgcggtttaacgcccccttcgacgtgggcattaaactgagcggagttcagtatcagcaacattcccaagcgctcggcaaatttctacaggacattctctgggaggaggccaaagaggctccagccgacaaatag

SEQ ID NO: 114569 - DNA, 1425 bp, Artificial Sequence
  derived and/or modified sequence
agttccccaaagataacacagctttgcacagtggatgtttacttgctggtggtcttatctaagatcaacattggcagctgtgcccggagaggcctccagggtccaggtccaatgcacttccctctcagaagaggcatccgctaaaatagggaccaaagctgctggagggaggcaaggcaagctgctatgtgaaaaaacgccaggccaggcagtcatgtcacacctggcagaaatgactgaagcatagccactggctgaagttatccccacacccactctctggagaggatgatcaggagcagtctgctcaaccgggaggtgggactcctcctcgggaaggtgtagaatcaccagcctggctccctgcggactcccggggctcacagaggccagagcagcaacagcacatgggaaacaacggggcgctggactggggaggtctcagagctctcctagtgatgacagcctcattttacccagggagaaagggcgagtaagctaaggtcacacagcaacaaagctgcacccagaccccagagccactctcctccctccctcctccaccagggccatgcccacttggggcaccccgccaccgtgttccagggacagctggagcacatgcttcttccctcgccaacccagcaattccgcagggcatctgacctccactgttgacttctacccagaggacaagaacatttttagttcccaaggaatgtacatcagccccacggaagctaggccacctctgggatggggttgctggtttagaacaaacgccagtcatcctatataaggacctgacagccaccaggcaccacctccgccaggaactgcaggcccacctgtctgcaacccagctgaggccatgccctccccagggaccgtctgcagcctcctgctcctcggcatgctctggctggacttggccatggcaggctccagcttcctgagccctgaacaccagagagtccagcagagaaaggagtcgaagaagccaccagccaagctgcagccccgagctctagcaggctggctccgcccggaagatggaggtcaagcagaaggggcagaggatgaactggaagtccggttcaacgccccctttgatgttggaatcaagctgtcaggggttcagtaccagcagcacagccaggccctggggaagtttcttcaggacatcctctgggaagaggccaaagaggccccagccgacaagtgatcgcccacaagccttactcacctctctctaagtttagaagcgctcatctggcttttcgcttgcttctgcagcaactcccacgactgttgtacaagctcaggaggcgaataaatgttcaaactgtatgctgatgttccaaatgggaatttatttcaaagaggaaaagttaatattttactttaaaaaaatcaaaataatac

SEQ ID NO: 114570 - DNA, 401 bp, Artificial Sequence
  derived and/or modified sequence
caggcccacctgtctgcaacccagctgaggccatgccctccccagggaccgtctgcagcctcctgctcctcggcatgctctggctggacttggccatggcaggctccagcttcctgagccctgaacaccagagagtccagcagagaaaggagtcgaagaagccaccagccaagctgcagccccgagctctagcaggctggctccgcccggaagatggaggtcaagcagaaggggcagaggatgaactggaagtccggaggccccagccgacaagtgatcgcccacaagccttactcacctctctctaagtttagaagcgctcatctggcttttcgcttgcttctgcagcaactcccacgactgttgtacaagctcaggaggcgaataaatgttcaaactgt

SEQ ID NO: 114571 - DNA, 793 bp, Artificial Sequence
  derived and/or modified sequence
aacacagctttgcacagtggatgtttacttgctggtggtcttatctaagatcaacattggcagctgtgcccggagaggcctccagggtccagcaattccgcagggcatctgacctccactgttgacttctacccagaggacaagaacatttttagttcccaaggaatgtacatcagccccacggaagctaggccacctctgggatggggttgctggtttagaacaaacgccagtcatcctatataaggacctgacagccaccaggcaccacctccgccaggaactgcaggcccacctgtctgcaacccagctgaggccatgccctccccagggaccgtctgcagcctcctgctcctcggcatgctctggctggacttggccatggcaggctccagcttcctgagccctgaacaccagagagtccagcagagaaaggagtcgaagaagccaccagccaagctgcagccccgagctctagcaggctggctccgcccggaagatggaggtcaagcagaaggggcagaggatgaactggaagtccggttcaacgccccctttgatgttggaatcaagctgtcaggggttcagtaccagcagcacagccaggccctggggaagtttcttcaggacatcctctgggaagaggccaaagaggccccagccgacaagtgatcgcccacaagccttactcacctctctctaagtttagaagcgctcatctggcttttcgcttgcttctgcagcaactcccacgactgttgtacaagctcaggaggcgaataaatgttcaaac

SEQ ID NO: 114572 - DNA, 527 bp, Artificial Sequence
  derived and/or modified sequence
acctccgccaggaactgcaggcccacctgtctgcaacccagctgaggccatgccctccccagggaccgtctgcagcctcctgctcctcggcatgctctggctggacttggccatggcaggctccagcttcctgagccctgaacaccagagagtccagcagagaaaggagtcgaagaagccaccagccaagctgcagccccgagctctagcaggctggctccgcccggaagatggaggtcaagcagaaggggcagaggatgaactggaagtccggttcaacgccccctttgatgttggaatcaagctgtcaggggttcagtaccagcagcacagccaggccctggggaagtttcttcaggacatcctctgggaagaggccaaagaggccccagccgacaagtgatcgcccacaagccttactcacctctctctaagtttagaagcgctcatctggcttttcgcttgcttctgcagcaactcccacgactgttgtacaagctcaggaggcgaataaatgttcaaactgt

SEQ ID NO: 114573 - DNA, 855 bp, Artificial Sequence
  derived and/or modified sequence
gtggatgtttacttgctggtggtcttatctaagatcaacattggcagctgtgcccggagaggcctccagggtccagggccatgcccacttggggcaccccgccaccgtgttccagggacagctggagcacatgcttcttccctcgccaacccagcaattccgcagggcatctgacctccactgttgacttctacccagaggacaagaacatttttagttcccaaggaatgtacatcagccccacggaagctaggccacctctgggatggggttgctggtttagaacaaacgccagtcatcctatataaggacctgacagccaccaggcaccacctccgccaggaactgcaggcccacctgtctgcaacccagctgaggccatgccctccccagggaccgtctgcagcctcctgctcctcggcatgctctggctggacttggccatggcaggctccagcttcctgagccctgaacaccagagagtccagcagagaaaggagtcgaagaagccaccagccaagctgcagccccgagctctagcaggctggctccgcccggaagatggaggtcaagcagaaggggcagaggatgaactggaagtccggttcaacgccccctttgatgttggaatcaagctgtcaggggttcagtaccagcagcacagccaggccctggggaagtttcttcaggacatcctctgggaagaggccaaagaggccccagccgacaagtgatcgcccacaagccttactcacctctctctaagtttagaagcgctcatctggcttttcgcttgcttctgcagcaactcccacgactgttgtacaagctcaggaggcgaataaatgttcaaac

SEQ ID NO: 114574 - DNA, 354 bp, Artificial Sequence
  derived and/or modified sequence
atgcccagccctggcaccgtgtgcagcctgctgctgctgggcatgctgtggctggacctggccatggccggcagcagcttcctgagccctgagcaccagagggtgcagcagaggaaggagagcaagaagcccccagccaagctgcagccccgggccctggccggctggctgcggccagaagatggcggccaggccgagggcgcagaagatgagctggaggtgcgcttcaatgccccctttgatgtgggcatcaagctgtctggagtgcagtaccagcagcacagccaggccctgggcaagttcctgcaggacatcctgtgggaggaggccaaggaggccccagctgacaagtag

SEQ ID NO: 114575 - DNA, 276 bp, Artificial Sequence
  derived and/or modified sequence
atgcccagccctggcaccgtgtgcagcctgctgctgctgggcatgctgtggctggacctggccatggccggcagcagcttcctgagccctgagcaccagagggtgcagcagaggaaggagagcaagaagcccccagccaagctgcagccccgggccctggccggctggctgcggccagaagatggcggccaggccgagggcgcagaagatgagctggaggtgagaagaccccagcccaccagtgaccggccccaggccctgctgaccagcctgtag

SEQ ID NO: 114576 - DNA, 354 bp, Artificial Sequence
  derived and/or modified sequence
atgcccagccccggcaccgtgtgcagcctgctgctgctgggcatgctttggcttgatctggccatggctggaagctctttcctgtcacccgaacaccagcgtgtgcaacagagaaaagagagcaaaaagcctccagcaaagcttcagccgcgcgccctcgccggatggctcagaccagaagacggggggcaagctgaaggcgccgaagatgaattagaggtacgtttcaatgcaccatttgatgtgggcatcaagctgtccggcgtacagtaccagcagcatagccaagctctggggaagtttcttcaggatatactgtgggaggaagccaaagaagcccctgccgacaagtag

SEQ ID NO: 114577 - DNA, 276 bp, Artificial Sequence
  derived and/or modified sequence
atgcccagccccggcaccgtgtgcagcctgctgctgctgggcatgttgtggttggatctggccatggctggcagcagtttcctctctcccgagcatcagcgcgttcaacaacgcaaagaaagcaaaaagccaccagctaaactgcaaccacgcgctctggccgggtggctgcggcctgaggatgggggccaggcagagggcgctgaagacgaactggaggtgcgccgcccccagccaacctcagataggccccaggccctgttaacgagcctgtag

SEQ ID NO: 114578 - DNA, 354 bp, Artificial Sequence
  derived and/or modified sequence
atgcccagccccggcaccgtgtgcagcctgctgctgctgggcatgttgtggcttgacttagcgatggccggatccagtttcttaagccccgaacaccagcgagtgcagcagcgcaaggaatctaaaaaaccaccggccaagctacaaccacgtgctctagctggctggcttcggcctgaggacggagggcaagctgaaggggccgaggacgagttggaggtgaggtttaacgctccctttgatgtgggaattaagctcagcggtgtgcaataccagcagcacagccaggctctgggaaaattcttgcaggatatcctctgggaagaagccaaggaagcacctgctgataagtag

SEQ ID NO: 114579 - DNA, 354 bp, Artificial Sequence
  derived and/or modified sequence
atgcccagccccggcaccgtgtgcagcctgctgctgctgggcatgctgtggctggacctggcaatggccggtagttctttcctgagtcccgagcaccagagagttcaacagaggaaagaatctaaaaagccaccagcaaaactacagccccgagctctcgctggttggcttcgacccgaggacgggggccaggcagagggcgcagaagatgagcttgaggtgcggttcaatgccccattcgatgttggaataaagcttagcggagttcaatatcagcagcacagccaagctctcggaaagtttcttcaggatatcctttgggaggaggcgaaggaggcgcccgcggataaatag

SEQ ID NO: 114580 - DNA, 354 bp, Artificial Sequence
  derived and/or modified sequence
atgcccagccccggcaccgtgtgcagcctgctgctgctgggcatgttatggcttgacctggcaatggctgggtcttctttccttagccccgaacaccagcgcgtccagcaaagaaaggaatccaagaagccccctgccaaactgcagccccgggccctggccggatggctccgacccgaggacggaggccaggctgaaggagcagaagatgaactcgaagttcgcttcaacgccccattcgatgtggggattaagctctcgggagtccagtatcaacagcacagccaggcccttggcaaatttctgcaggacattctgtgggaggaagccaaggaggcccccgcggataaatag

SEQ ID NO: 114581 - DNA, 354 bp, Artificial Sequence
  derived and/or modified sequence
atgccttctcccggaacagtgtgttccttgctcctactcgggatgctgtggcttgaccttgctatggccggaagttcttttctttctcccgagcaccaaagagttcagcagagaaaagagtcaaagaaacctcctgctaaacttcaaccgcgtgccctcgctggatggctcagacctgaggacggtggacaggccgagggcgcagaggacgaacttgaggtgaggttcaacgctccttttgacgtgggcattaaactgtccggcgtccagtaccaacagcatagccaggcgctggggaagtttctccaggatatcctgtgggaagaagccaaggaggctcccgctgataagtag

SEQ ID NO: 114582 - DNA, 276 bp, Artificial Sequence
  derived and/or modified sequence
atgccttctcccggaacagtgtgctctttgctgctgctgggaatgctgtggctggatcttgctatggcagggtcgagcttcctgagccctgagcaccagagagtgcagcaacggaaggagagcaaaaagccgcctgctaagttgcagcctcgtgcattggcgggatggctgaggcctgaagacggtggtcaagctgagggggctgaggatgaactcgaagttcggcgaccacagcccacatctgaccgcccacaggcattgttaacatccctctag

SEQ ID NO: 114583 - DNA, 354 bp, Artificial Sequence
  derived and/or modified sequence
atgccatcgccaggaaccgtgtgcagtcttctcctccttggtatgctctggctggacctggccatggctggctctagcttcttgtcaccagaacaccaaagagttcagcagcgaaaagaatctaaaaaaccaccagctaagctgcaacctcgagcgctggcaggttggttgagacccgaggacggcggacaggcagagggcgctgaagacgaacttgaagttaggttcaacgctccgtttgacgtgggcataaagttgagcggcgttcagtaccagcaacactcccaggctctggggaaatttctacaggatatcctgtgggaggaggctaaggaggcaccagccgacaaatag

SEQ ID NO: 114584 - DNA, 354 bp, Artificial Sequence
  derived and/or modified sequence
atgcccagccctggaactgtctgttccctcttgctcttgggcatgctgtggctggatctagccatggcaggaagctcattcctgagcccggaacatcaacgcgtgcagcaacggaaggagagtaaaaaacccccagctaaattacagcccagagcccttgctggttggctacggcctgaagacggcggacaggcggaaggcgcagaggatgagcttgaggttcgtttcaacgctccttttgacgtggggataaagctgagcggagttcaataccagcagcactcccaggcactcggaaagttcctgcaggacattttgtgggaggaggcgaaagaggctcccgcagataagtag

SEQ ID NO: 114585 - DNA, 354 bp, Artificial Sequence
  derived and/or modified sequence
atgccttcccccggaactgtctgtagtctgctactgcttggaatgctctggctcgatttggccatggctggatcaagtttcctgtcgccggagcaccagcgggtgcagcagaggaaggaatccaagaagccaccagcgaagctccaaccacgcgcacttgcgggttggttaagaccggaggacgggggtcaggctgaaggagccgaggacgagttggaggtgaggtttaatgcacccttcgacgtgggcatcaaactgtccggggtgcagtaccagcagcacagccaggccttaggaaagttcctacaggatattctctgggaggaagctaaggaagcacccgcagacaaatag

SEQ ID NO: 114586 - DNA, 354 bp, Artificial Sequence
  derived and/or modified sequence
atgcccagccctggcactgtctgcagcttgctattacttggcatgctatggttagacctggcaatggcaggaagcagttttctgtcccccgagcaccaaagggtgcaacagcgtaaggagtcaaagaaaccgcccgccaaattgcagcctagagccttagctgggtggctaaggcccgaagatgggggccaggcagaaggggctgaggacgaattagaagttagatttaatgctccatttgatgtcgggatcaaactttcaggcgtgcagtaccagcaacacagccaagctctcggtaagtttcttcaggacatcctctgggaagaggctaaggaagccccagctgacaagtag

SEQ ID NO: 114587 - DNA, 276 bp, Artificial Sequence
  derived and/or modified sequence
atgccctcaccaggaacggtatgttcactgctgctcttggggatgctctggctcgacctggctatggcaggaagctctttcctgtctccagaacaccagcgggtccaacaaagaaaggagtctaagaagccacctgctaaactgcaacccagagctctggcaggctggttgcggccagaggatggcggacaggcggagggcgccgaagatgaactggaagtgagaagaccccaacccacaagtgatcgtccgcaagcattgctgacatctctgtag

SEQ ID NO: 114588 - DNA, 354 bp, Artificial Sequence
  derived and/or modified sequence
atgccctcccccggcacagtatgtagcctgcttctgctcggaatgctttggcttgatctcgccatggcaggcagcagttttctatcccctgaacaccagcgcgtccagcaacgcaaggagtccaagaagccaccagctaaactccaacctagggccctggccgggtggctaagacctgaggacgggggccaagcagaaggggccgaggacgaactcgaagtgcgattcaacgcaccgtttgacgtaggcattaagcttagcggtgtgcagtaccaacagcattcacaagccctgggtaaatttctccaggacattttgtgggaagaggccaaagaggcacctgccgataagtag

SEQ ID NO: 114589 - DNA, 354 bp, Artificial Sequence
  derived and/or modified sequence
atgccctcaccaggcaccgtgtgttctttactgttgctcgggatgctctggctggatctcgccatggccggaagctctttcctttcccccgagcaccagcgtgtacagcaacgaaaagaaagcaagaaacctccggctaagctgcagccaagagcactggcaggatggctccgaccggaagacggcggacaggctgagggggccgaggatgagctagaagtccgattcaacgccccattcgacgttggaatcaaactcagtggcgtgcagtaccaacagcactcccaagcccttggtaagtttctacaggatatcctatgggaagaggctaaagaggcccccgctgataaatag

SEQ ID NO: 114590 - DNA, 354 bp, Artificial Sequence
  derived and/or modified sequence
atgcccagccccggcaccgtttgctctctgctcttgcttgggatgttgtggctcgacctcgctatggccggatcatcctttctttcccctgaacaccaaagagtacaacagcgtaaagaaagtaaaaagcctccagctaaactacagccgcgcgccctggctgggtggttacggcctgaagacggaggacaagccgagggcgccgaggacgagctggaagtgcggtttaatgcacccttcgatgtgggaatcaaacttagtggggtgcagtaccaacagcactcccaggcgctaggtaaattcttgcaggatatcctttgggaggaggcaaaggaagcacccgccgataaatag

SEQ ID NO: 114591 - DNA, 354 bp, Artificial Sequence
  derived and/or modified sequence
atgcccagccctggtaccgtctgttcacttctacttctgggtatgctttggcttgaccttgctatggcgggctcttcttttctgtctcccgagcaccagagagtgcagcagaggaaggaatctaaaaagccacccgcgaaacttcagcctagggcgctggcaggctggttacgacccgaggacggaggccaagctgaaggcgcggaggatgaactagaagtgcgattcaatgcaccatttgacgttggcattaaactgtccggggtgcagtatcagcaacattcacaagctctgggaaagttcctgcaagacatcctttgggaagaagctaaggaagcccccgccgacaaatag

SEQ ID NO: 114592 - DNA, 354 bp, Artificial Sequence
  derived and/or modified sequence
atgcccagtccagggacagtttgtagtctccttctgctcggtatgttgtggttggacttggccatggccggtagttctttccttagtcctgagcatcaacgcgttcaacaacggaaagaatctaaaaagccgccagcgaaattacagcctcgcgcactcgcagggtggctgagaccagaggatggaggccaggctgaaggggccgaggacgaactggaagtgaggtttaatgcgcccttcgatgtgggcattaaattatcgggtgttcaataccagcagcactctcaggctctagggaagttcctccaagacattctctgggaagaggcaaaagaggcaccagcagacaaatag

SEQ ID NO: 114593 - DNA, 354 bp, Artificial Sequence
  derived and/or modified sequence
atgccatcccctggcaccgtctgctccctgctgttactaggcatgttgtggttagacctggcaatggctggctcgtcgtttctgtcaccggagcatcagagagtccagcagcggaaagaatccaagaaaccacccgcaaaactgcagcccagggccctggcggggtggctgcggcccgaagatggaggacaagccgagggcgctgaagacgaactggaggtgcgatttaatgccccttttgacgtgggaatcaaactttccggtgttcagtatcagcagcacagtcaagcactgggcaaatttttgcaagacattttatgggaagaagccaaggaagccccagccgataagtag

SEQ ID NO: 114594 - DNA, 354 bp, Artificial Sequence
  derived and/or modified sequence
atgcctagccccggaactgtctgttcgctgcttctccttggaatgctgtggttagatctcgctatggccggaagcagctttctctcccctgaacatcagagggttcaacagaggaaggagtcaaaaaagcctcccgcaaaattgcagccacgtgccctcgcggggtggcttcgcccagaagatggcggccaggctgagggagccgaggatgagctagaggtgagattcaacgccccattcgatgtgggcatcaaactgagcggagtgcaatatcagcagcacagccaagctctcggtaagttcttacaagacatactttgggaggaagcaaaggaagcccctgcagataagtag

SEQ ID NO: 114595 - DNA, 354 bp, Artificial Sequence
  derived and/or modified sequence
atgcccagccccggcaccgtgtgcagcctgctgctgctgggcatgctgtggctggacctggccatggccggcagcagcttcctgagccccgagcaccagagagtgcagcagagaaaggagagcaagaagccccccgccaagctgcagcccagagccctggccggctggctgagacccgaggacggcggccaggccgagggcgccgaggacgagctggaggtgagattcaacgcccccttcgacgtgggcatcaagctgagcggcgtgcagtaccagcagcacagccaggccctgggcaagttcctgcaggacatcctgtgggaggaggccaaggaggcccccgccgacaagtag

SEQ ID NO: 114596 - DNA, 276 bp, Artificial Sequence
  derived and/or modified sequence
atgcccagccccggcaccgtgtgcagcctgctgctgctgggcatgctgtggctggacctggccatggccggcagcagcttcctgagccccgagcaccagagagtgcagcagagaaaggagagcaagaagccccccgccaagctgcagcccagagccctggccggctggctgagacccgaggacggcggccaggccgagggcgccgaggacgagctggaggtgagaagaccccagcccaccagcgacagaccccaggccctgctgaccagcctgtag

SEQ ID NO: 114597 - RNA, 276 nt, Artificial Sequence
  derived and/or modified sequence
augcccucaccaggaacgguauguucacugcugcucuuggggaugcucuggcucgaccuggcuauggcaggaagcucuuuccugucuccagaacaccagcggguccaacaaagaaaggagucuaagaagccaccugcuaaacugcaacccagagcucuggcaggcugguugcggccagaggauggcggacaggcggagggcgccgaagaugaacuggaagugagaagaccccaacccacaagugaucguccgcaagcauugcugacaucucuguag

SEQ ID NO: 114598 - protein, 122 aa, Artificial Sequence
  derived and/or modified sequence
MTTATRQEVLGLYRSIFRLARKWQATSGQMEDTIKEKQYILNEARTLFRKNKNLTDTDLIKQCIDECTARIEIGLHYKIPYPRPIHLPPMGLTPLRGRGLRSQEKLRKLSKPVYLRSHDEVS

SEQ ID NO: 114599 - DNA, 369 bp, Artificial Sequence
  derived and/or modified sequence
atgaccaccgccaccagacaggaggtgctgggcctgtacagaagcatcttcagactggccagaaagtggcaggccaccagcggccagatggaggacaccatcaaggagaagcagtacatcctgaacgaggccagaaccctgttcagaaagaacaagaacctgaccgacaccgacctgatcaagcagtgcatcgacgagtgcaccgccagaatcgagatcggcctgcactacaagatcccctaccccagacccatccacctgccccccatgggcctgacccccctgagaggcagaggcctgagaagccaggagaagctgagaaagctgagcaagcccgtgtacctgagaagccacgacgaggtgagctag

SEQ ID NO: 114600 - DNA, 369 bp, Artificial Sequence
  derived and/or modified sequence
atgacgacagcaacccgacaggaggtgctcggcctgtaccgcagtatttttaggctagcccgcaagtggcaggctacctctgggcagatggaagacacaatcaaggagaaacagtacatccttaacgaggccaggacgctgtttaggaaaaataagaacctgaccgatactgacttgatcaagcaatgtattgacgagtgcaccgcaaggatagagatcgggctccattataaaattccttacccacgccctatccatcttcctccgatgggcctgacccctttgcgcggccgggggctcagaagccaggagaaactgaggaagctgtcaaagcctgtttatctgcgctcgcatgatgaagtgtcatag

SEQ ID NO: 114601 - DNA, 369 bp, Artificial Sequence
  derived and/or modified sequence
atgacgacagccactcgacaagaagtccttgggctgtaccggtctattttccgcctggctagaaaatggcaggccacatcaggccaaatggaggatacaataaaggagaagcagtatattctgaacgaggcacggactttgtttcgcaaaaataaaaatctgactgacacagatctcattaaacagtgtatcgacgagtgcacagcccgtattgaaataggactacactacaagataccataccccaggcctatccatcttcctcccatggggttgactccacttagaggtcggggactcagatcccaggaaaagctccggaaactatccaagccagtgtacctgcggtctcacgatgaggtgtcgtag

SEQ ID NO: 114602 - DNA, 369 bp, Artificial Sequence
  derived and/or modified sequence
atgactaccgccacgcggcaggaagttctgggcttgtacaggagcatcttccggctcgctcggaaatggcaggccacatcagggcagatggaggatacaattaaagagaaacagtacattcttaatgaagctagaactctttttcggaaaaataagaacctgaccgatacagacctaataaaacagtgcattgatgagtgtacagcgaggattgagattggcctgcattataaaatcccctatccccgtccgatccacctgcccccaatgggcctgactcctctgcgcgggcgcggactgagaagccaggaaaaattacgcaagttgtctaagccagtgtatctgagatcacacgacgaggtgtcctag

SEQ ID NO: 114603 - DNA, 1626 bp, Artificial Sequence
  derived and/or modified sequence
ggtttggtccggcctggcctactggaccagcctgtgctcggtcggccacggctctgctgggctcctggcgccgcctcctcccagcccgccgcgggctgcgcgcttctgtgggtgggggaaggcaggactgacgcagaagagtacccagagaaggagaagccagcaaaggagacgacacagacaagacctcagagatcaaaggaagaggccccttaatatcctggaataatgggacccatccccgtaatcagtgaatctcatccacccgcttgccagcttctacccgcagcaagtagaagctaagtcctggctcaaatctcttccctccctccctctcccagctgtcagtgcttttggacttgtgctcagatgacaacggcaacacgacaagaagtccttggcctctaccgcagcattttcaggcttgcgaggaaatggcaggcgacatcagggcagatggaagacaccatcaaagaaaaacagtacatactaaatgaagccagaacgctgttccggaaaaacaaaaatctcacggacacagacctaattaaacagtgtatagatgaatgcacagccaggattgaaattggactgcattacaagattccttacccaaggccaattcatctgcctccaatgggccttaccccactccgaggccggggacttcgaagccaagagaaactgaggaaactttccaaaccagtatatctcagatctcatgatgaagtttcctaatctagaggaaagtttatttctgcaaatgatgagccaactagttattgaatgtaaaccagatggcaaaacacttcttgattaggggcaaaaattcaaatgtcttcttaaaacctccacaattgattctccccctgtgatgtaaacttagatatccctagagtttctcagcatctttcttcctgagtggatggcattatccctagaggtcatggaccttacatcctcactgcagtcacctttggaaacaagaccgaggcctgtagaaggaaagcggaaggatgtaagagctgttcatgggaattccattcaccacacatgccagctgatgcaaagaaatttgccagtcactggaagttactgtggctactataaaactatgtaccactctcagaatattcttaggctttttttttttcaagttatagatttgcttaaagtgaggttttttggtgtgtgcttttttgttgtcttttgacccttccagtttccagacaaacttgtcttaaaaagtgcatcattggattgaccatggtttttcatgaaattttatgagatttctgccttaacaaaatgcatatattccttatcttaaagcctgtcattacttaggatgcacttataggatctgaaaagctcactttaaactcatactacattcgttacgagtattttacgttaacataattgaaaagtacaaggtccaagctggctttcaaattatgtctaaacagaaatgggacaaatagacttgaaaatagaagggatttattccacccctgcaagggtagagtcaggtgagagtcccttggtgagtcatttgtacatcagtgtcatttcttcttaacctctgaagaagatgggcatcagaaataaagacaaagcactatc

SEQ ID NO: 114604 - DNA, 1659 bp, Artificial Sequence
  derived and/or modified sequence
gcctggtgtggggacgctcaggtgccggcgtggggccccctcggaggctgtgaatcttttggacccccgaatgtaaatgggagatgagagtacccagagaaggagaagccagcaaaggagacgacacagacaagacctcagagatcaaaggaagaggccccttaatatcctggaataatgggacccatccccgtaatcagtgaatctcatccacccgcttgccagcttctacccgcagcaagtagaagctaagtcctggctcaaatctcttccctccctccctctcccagctgtcagtgcttttggacttgtgctcaggtgaagtagtatttgaagcttttcatcagttggctcattctttactcaagaataaacctcaagaaacgtcatcagggtcagaatgacaacggcaacacgacaagaagtccttggcctctaccgcagcattttcaggcttgcgaggaaatggcaggcgacatcagggcagatggaagacaccatcaaagaaaaacagtacatactaaatgaagccagaacgctgttccggaaaaacaaaaatctcacggacacagacctaattaaacagtgtatagatgaatgcacagccaggattgaaattggactgcattacaagattccttacccaaggccaattcatctgcctccaatgggccttaccccactccgaggccggggacttcgaagccaagagaaactgaggaaactttccaaaccagtatatctcagatctcatgatgaagtttcctaatctagaggaaagtttatttctgcaaatgatgagccaactagttattgaatgtaaaccagatggcaaaacacttcttgattaggggcaaaaattcaaatgtcttcttaaaacctccacaattgattctccccctgtgatgtaaacttagatatccctagagtttctcagcatctttcttcctgagtggatggcattatccctagaggtcatggaccttacatcctcactgcagtcacctttggaaacaagaccgaggcctgtagaaggaaagcggaaggatgtaagagctgttcatgggaattccattcaccacacatgccagctgatgcaaagaaatttgccagtcactggaagttactgtggctactataaaactatgtaccactctcagaatattcttaggctttttttttttcaagttatagatttgcttaaagtgaggttttttggtgtgtgcttttttgttgtcttttgacccttccagtttccagacaaacttgtcttaaaaagtgcatcattggattgaccatggtttttcatgaaattttatgagatttctgccttaacaaaatgcatatattccttatcttaaagcctgtcattacttaggatgcacttataggatctgaaaagctcactttaaactcatactacattcgttacgagtattttacgttaacataattgaaaagtacaaggtccaagctggctttcaaattatgtctaaacagaaatgggacaaatagacttgaaaatagaagggatttattccacccctgcaagggtagagtcaggtgagagtcccttggtgagtcatttgtacatcagtgtcatttcttcttaacctctgaagaagatgggcatcagaaataaagacaaagcactatcaa

SEQ ID NO: 114605 - DNA, 1394 bp, Artificial Sequence
  derived and/or modified sequence
ggtttggtccggcctggcctactggaccagcctgtgctcggtcggccacggctctgctgggctcctggcgccgcctcctcccagcccgccgcgggctgcgcgcttctgtgggtgggggaaggcaggactgacgcagaatgacaacggcaacacgacaagaagtccttggcctctaccgcagcattttcaggcttgcgaggaaatggcaggcgacatcagggcagatggaagacaccatcaaagaaaaacagtacatactaaatgaagccagaacgctgttccggaaaaacaaaaatctcacggacacagacctaattaaacagtgtatagatgaatgcacagccaggattgaaattggactgcattacaagattccttacccaaggccaattcatctgcctccaatgggccttaccccactccgaggccggggacttcgaagccaagagaaactgaggaaactttccaaaccagtatatctcagatctcatgatgaagtttcctaatctagaggaaagtttatttctgcaaatgatgagccaactagttattgaatgtaaaccagatggcaaaacacttcttgattaggggcaaaaattcaaatgtcttcttaaaacctccacaattgattctccccctgtgatgtaaacttagatatccctagagtttctcagcatctttcttcctgagtggatggcattatccctagaggtcatggaccttacatcctcactgcagtcacctttggaaacaagaccgaggcctgtagaaggaaagcggaaggatgtaagagctgttcatgggaattccattcaccacacatgccagctgatgcaaagaaatttgccagtcactggaagttactgtggctactataaaactatgtaccactctcagaatattcttaggctttttttttttcaagttatagatttgcttaaagtgaggttttttggtgtgtgcttttttgttgtcttttgacccttccagtttccagacaaacttgtcttaaaaagtgcatcattggattgaccatggtttttcatgaaattttatgagatttctgccttaacaaaatgcatatattccttatcttaaagcctgtcattacttaggatgcacttataggatctgaaaagctcactttaaactcatactacattcgttacgagtattttacgttaacataattgaaaagtacaaggtccaagctggctttcaaattatgtctaaacagaaatgggacaaatagacttgaaaatagaagggatttattccacccctgcaagggtagagtcaggtgagagtcccttggtgagtcatttgtacatcagtgtcatttcttcttaacctctgaagaagatgggcatcagaaataaagacaaagcactatc

SEQ ID NO: 114606 - DNA, 1558 bp, Artificial Sequence
  derived and/or modified sequence
tttctggaaacgacggcggcccggcgggtccaaaccacctaccatccccgctcgcgtttccaggctccctacccccgccgccgccgcctcttcttccaccactgccaccgcctcctcttcatctgcggcccaccggcggcggccgccccgaagccccgccccctccatcgcctcctgcatcatcacttccggtaaccccgccggccgccagctccaggagggagaatgggagaggggcaaggagggaacgagtggaagattgcgtcacgacgcacataaagacgtacgaagccgtcgccaaatgacaacggcaacacgacaagaagtccttggcctctaccgcagcattttcaggcttgcgaggaaatggcaggcgacatcagggcagatggaagacaccatcaaagaaaaacagtacatactaaatgaagccagaacgctgttccggaaaaacaaaaatctcacggacacagacctaattaaacagtgtatagatgaatgcacagccaggattgaaattggactgcattacaagattccttacccaaggccaattcatctgcctccaatgggccttaccccactccgaggccggggacttcgaagccaagagaaactgaggaaactttccaaaccagtatatctcagatctcatgatgaagtttcctaatctagaggaaagtttatttctgcaaatgatgagccaactagttattgaatgtaaaccagatggcaaaacacttcttgattaggggcaaaaattcaaatgtcttcttaaaacctccacaattgattctccccctgtgatgtaaacttagatatccctagagtttctcagcatctttcttcctgagtggatggcattatccctagaggtcatggaccttacatcctcactgcagtcacctttggaaacaagaccgaggcctgtagaaggaaagcggaaggatgtaagagctgttcatgggaattccattcaccacacatgccagctgatgcaaagaaatttgccagtcactggaagttactgtggctactataaaactatgtaccactctcagaatattcttaggctttttttttttcaagttatagatttgcttaaagtgaggttttttggtgtgtgcttttttgttgtcttttgacccttccagtttccagacaaacttgtcttaaaaagtgcatcattggattgaccatggtttttcatgaaattttatgagatttctgccttaacaaaatgcatatattccttatcttaaagcctgtcattacttaggatgcacttataggatctgaaaagctcactttaaactcatactacattcgttacgagtattttacgttaacataattgaaaagtacaaggtccaagctggctttcaaattatgtctaaacagaaatgggacaaatagacttgaaaatagaagggatttattccacccctgcaagggtagagtcaggtgagagtcccttggtgagtcatttgtacatcagtgtcatttcttcttaacctctgaagaagatgggcatcagaaataaagacaaagcactatc

SEQ ID NO: 114607 - DNA, 369 bp, Artificial Sequence
  derived and/or modified sequence
atgaccacagccacccggcaggaggtgctgggcctgtaccgcagcatcttccggctggccaggaagtggcaggccaccagcggccagatggaggacaccatcaaggagaagcagtacatcctgaatgaggcccggaccctcttcaggaagaacaagaacctgacagacacagacctgatcaagcagtgcattgatgagtgcacagccagaattgaaattggcctgcactacaagatcccctacccccggcccatccacctgccccccatgggcctgacccccctgcggggccggggcctgcggagccaggagaagctgaggaagctgagcaagcctgtgtacctgcggagccatgatgaggtgtcctag

SEQ ID NO: 114608 - DNA, 369 bp, Artificial Sequence
  derived and/or modified sequence
atgaccaccgccacccggcaggaggtgctgggcctgtaccggagcatttttaggctggcccgtaagtggcaagccactagcgggcaaatggaagatactataaaggagaaacaatacattctgaatgaagcccgcaccctctttcgtaagaataagaacctgaccgataccgacctgattaaacagtgcattgatgagtgcacagcccgcatcgagattggactacactacaaaatcccatatccccggcccatccatctaccccccatgggccttacgccactccgcggaaggggcttgcgttcacaggagaaactgcgtaagctttccaaacccgtttacctccgctcccacgacgaggtgtcatag

SEQ ID NO: 114609 - DNA, 369 bp, Artificial Sequence
  derived and/or modified sequence
atgaccaccgccacccggcaggaggtgctgggcctgtaccggagcattttcaggctcgcccggaagtggcaagccacttctggccagatggaagataccatcaaggaaaagcagtatattcttaacgaggcgaggaccctgtttcgcaagaacaagaacctcaccgacaccgatcttattaaacaatgcattgacgaatgcacagctcggattgagataggacttcattacaagattccttaccctagaccaattcacttgccaccaatgggcctgacaccactgaggggacgaggcctccgctcgcaggaaaagcttcgcaagctcagtaaaccagtgtacctgagatctcacgatgaggtcagttag

SEQ ID NO: 114610 - DNA, 369 bp, Artificial Sequence
  derived and/or modified sequence
atgaccaccgccacccggcaggaggtgctgggcctgtaccggagcatattcagactcgccaggaagtggcaggctacttctgggcaaatggaagataccatcaaagagaagcaatacattctgaatgaggcccggacactgtttagaaagaataaaaatctgacagacactgaccttataaagcagtgtatcgatgaatgcactgcccgaattgagattgggctgcattataaaattccatatccgcgaccgattcacctgcctccgatggggctcacccctctgcgcggcagaggattgagatcgcaggagaagctgaggaagctcagcaagccggtgtatctccgatcccatgacgaggtttcatag

SEQ ID NO: 114611 - DNA, 369 bp, Artificial Sequence
  derived and/or modified sequence
atgaccaccgccacaaggcaggaagtcctgggcctgtacaggtctatcttccgcctggctagaaagtggcaggctactagtgggcagatggaagataccatcaaagagaaacagtacatcctgaatgaagctagaacactcttcaggaaaaacaagaacttgacggatacggatctgattaagcagtgtattgatgagtgtaccgccagaattgaaattggattgcactacaaaatcccgtatccacgccctatccatcttccacccatggggctaacccctcttcggggtcgtggtttgcgttcacaggagaagctccggaagttatcaaaacctgtgtacctgaggtcacacgacgaagtctcatag

SEQ ID NO: 114612 - DNA, 369 bp, Artificial Sequence
  derived and/or modified sequence
atgacaactgccacccgccaggaggtacttggcctgtaccgaagcatttttagactcgctcgtaaatggcaggcaacgagcggccagatggaagacacgattaaagagaagcagtatatcctgaatgaggccagaacactgtttcgcaaaaataagaacttaactgacacagacttaatcaagcaatgcattgacgagtgtaccgcacgaatcgaaatcggcctccattacaagatcccttaccctcggccaatccatctccctcctatgggcttaactcccttgagagggagaggattgcgatctcaagagaaactcaggaaactgtccaagccggtgtatctgcgcagtcacgatgaagtgtcgtag

SEQ ID NO: 114613 - DNA, 369 bp, Artificial Sequence
  derived and/or modified sequence
atgactactgctacaaggcaagaggtcctgggactataccgctcgatcttcagactcgcaaggaagtggcaggccacttctgggcagatggaggatactataaaagagaaacaatacatcctgaatgaggcaagaactttgttccgcaagaacaagaatctgacagataccgacctaattaagcagtgcatcgatgagtgcacagcacgtatagagatcgggttgcactacaaaatcccgtacccgaggcccatccacctgccccctatgggactgacacctctgcggggaaggggcctgaggtcccaggaaaagttgcgcaaactttccaagcccgtttacctgagatcccacgacgaagtgtcctag

SEQ ID NO: 114614 - DNA, 369 bp, Artificial Sequence
  derived and/or modified sequence
atgactacggctacaagacaggaagtgctggggctatatcgtagcatttttcggctggcgaggaagtggcaggctacctcgggacaaatggaagataccatcaaagaaaagcagtatatcctaaacgaagctcggactctctttagaaaaaataaaaatcttactgatacagacctgattaagcagtgcattgacgaatgcaccgctagaattgagattgggttgcactacaaaattccatatccccgtcccatccatctcccgcccatgggactgaccccactcagaggccgtggattgaggtctcaggaaaagctgcgcaagctctcaaagcccgtctatctccggagccatgacgaagttagctag

SEQ ID NO: 114615 - DNA, 369 bp, Artificial Sequence
  derived and/or modified sequence
atgaccaccgccacccggcaggaggtgctgggcctgtaccggagcattttcagactagctcgaaagtggcaggctacaagcggccagatggaggacaccatcaaggagaagcaatatatcctgaatgaggccaggaccctgttccgcaagaataagaaccttactgatacggatctgattaagcagtgcatcgacgagtgtactgcgaggatcgaaattggcttgcactacaagataccttatcccaggcctatacacctgcctccgatgggtctcacgcccttgagaggcaggggactcaggtcacaggaaaagttgagaaagctgagcaagcccgtatacctaagatcacatgatgaggtgagctag

SEQ ID NO: 114616 - DNA, 369 bp, Artificial Sequence
  derived and/or modified sequence
atgaccacagcgaccagacaggaagtcctcggcctgtacagatctattttcagactcgccagaaagtggcaagccacctccgggcagatggaggacactatcaaagaaaagcagtacatcctgaacgaagcccgtaccttattccgcaaaaacaagaacctcacagacacagacttgatcaaacagtgtattgacgagtgtaccgctagaattgagatcggcctccactataaaattccgtatccacgtcctatacacctgccgcctatggggctgacacctttacgcggaaggggtttgcgctctcaggagaagttaagaaagctctccaaaccagtctacctgagaagccacgatgaagtctcttag

SEQ ID NO: 114617 - protein, 77 aa, Artificial Sequence
  derived and/or modified sequence
MGSSGLLSLLVLFVLLANVQGPGLTDWLFPRRCPKIREECEFQERDVCTKDRQCQDNKKCCVFSCGKKCLDLKQGKQ

SEQ ID NO: 114618 - DNA, 234 bp, Artificial Sequence
  derived and/or modified sequence
atgggtagtagtggccttctctccctccttgttttgtttgttctcctggccaacgtgcaggggccaggtctcacggactggctctttcccaggcggtgtcccaagattcgggaggaatgcgaattccaggaacgggacgtctgtacaaaagatcgacaatgccaagataataaaaaatgttgcgttttctcctgtggaaaaaagtgcctcgacttgaaacaagggaaacaatag

SEQ ID NO: 114619 - DNA, 998 bp, Artificial Sequence
  derived and/or modified sequence
gtgtgctagtaagtgtgcacgtacgatggaaaatgaatgaagaatgaggacattccaccactctccaagttatcaagatgaagacccaagatggtggcattcactctgaaggtagcctggaaagtgggagacacgctttgcccactccctgtggttgactagagcccccagcccagtgcagcctaggggtgtaaggatcaagatccattcaataagagacccttcctcccaagctgtgagctgtgggtgccagttagtcccatttgtgaccttgggaacttagtgttcccagcaagaaagggggtggctggcttgtctccagttcttatatccaaggtgcagcagctgagcattccaaattcgggaaccaccagaaaggctggcctctcttcaacatgggatcttctggacttttgagcctcctggtgctattcgtcctcttagcgaatgtccagggacctggtctgactgattggttatttcccaggagatgtcccaaaatcagagaagaatgtgaattccaagaaagggatgtgtgtacaaaggacagacaatgccaggacaacaagaagtgttgtgtcttcagctgcggaaaaaaatgtttagatctcaaacaagggaaacaataacaacttccaatccaaagccaactgcctgaacacctgcaagaataaacgctttccctgattggataaggatgcactggaagaactgccagaatgtggctcatgctctgagtactgttcctgtacctgacggatgctccagactggcttccagtttcactctcagcattccaagatcttagcccttcccagaacagaacgcttgcatctacctcctcttcctccatctttggctcttttgatgcacaatatccatccgttttgatttcatctttatgtcccctttatctccaacttctagaactcccagtttatacctgtgtcactctcaattttttccagtaaagtacttgatgtagtcctgtgccttga

SEQ ID NO: 114620 - DNA, 234 bp, Artificial Sequence
  derived and/or modified sequence
atgggcagttctggactcctatctctccttgtgcttttcgtcctccttgcaaacgtacagggccccgggcttacagactggttattcccccgcagatgccctaaaatcagagaggaatgcgaattccaggaaagggacgtatgcacaaaagaccgacagtgtcaggataataaaaagtgttgcgtgttcagctgtgggaaaaagtgtctggaccttaaacaaggaaagcagtag

SEQ ID NO: 114621 - DNA, 234 bp, Artificial Sequence
  derived and/or modified sequence
atgggcagcagcggcctgctgagcctgctggtgctgttcgtgctgctggccaacgtgcagggccccggcctgaccgactggctgttccccagaagatgccccaagatcagagaggagtgcgagttccaggagagagacgtgtgcaccaaggacagacagtgccaggacaacaagaagtgctgcgtgttcagctgcggcaagaagtgcctggacctgaagcagggcaagcagtag

SEQ ID NO: 114622 - DNA, 234 bp, Artificial Sequence
  derived and/or modified sequence
atgggatcgagcggccttctgtccctgctcgtgttgttcgttctccttgctaatgtacagggccccgggctgactgactggctcttcccccgccgatgtccaaagatccgcgaggaatgcgagtttcaggaacgcgacgtatgcacaaaagaccgccagtgtcaagacaataagaaatgctgcgtgttctcctgtggcaagaagtgcctggatctgaagcaaggcaaacagtag

SEQ ID NO: 114623 - DNA, 234 bp, Artificial Sequence
  derived and/or modified sequence
atgggcagcagcggcctgctgagcctgctggtgctgtttgtgctgctggccaacgtgcagggccctggcctgacagactggctgttcccccggcgctgccccaagatccgggaggagtgtgagttccaggagagagatgtgtgcaccaaggaccggcagtgccaggacaacaagaagtgctgcgtgttcagctgtgggaagaagtgcctggacctgaagcagggcaagcagtag

SEQ ID NO: 114624 - DNA, 234 bp, Artificial Sequence
  derived and/or modified sequence
atgggcagcagcggcctgctgagcctgctggtgctgttcgtgctgctcgccaacgttcaggggccggggctcaccgattggctttttcctcggcgatgcccaaaaattcgagaagagtgcgagtttcaggaaagggacgtatgcaccaaagatcgccagtgtcaggacaataaaaaatgttgtgtgttctcatgtggcaagaagtgcctggatctcaagcaagggaaacagtag

SEQ ID NO: 114625 - RNA, 234 nt, Artificial Sequence
  derived and/or modified sequence
augggcaguucuggacuccuaucucuccuugugcuuuucguccuccuugcaaacguacagggccccgggcuuacagacugguuauucccccgcagaugcccuaaaaucagagaggaaugcgaauuccaggaaagggacguaugcacaaaagaccgacagugucaggauaauaaaaaguguugcguguucagcugugggaaaaagugucuggaccuuaaacaaggaaagcaguag

SEQ ID NO: 114626 - protein, 150 aa, Artificial Sequence
  derived and/or modified sequence
MRCAEGAWWFSPDGPAGSAASIWPAEGAEGLPGQLGRDRLEVVYSVPDNVPGQNGSRRPLVCKITGKCLSVCSEENAKAGGCSAFPLLLSQLGARMTGREHAHKGPELTTPDSGLPRPPNPALAGFRALAQHSPPLGTSTPSAVLLSAAT

SEQ ID NO: 114627 - DNA, 453 bp, Artificial Sequence
  derived and/or modified sequence
atgagatgcgccgagggcgcctggtggttcagccccgacggccccgccggcagcgccgccagcatctggcccgccgagggcgccgagggcctgcccggccagctgggcagagacagactggaggtggtgtacagcgtgcccgacaacgtgcccggccagaacggcagcagaagacccctggtgtgcaagatcaccggcaagtgcctgagcgtgtgcagcgaggagaacgccaaggccggcggctgcagcgccttccccctgctgctgagccagctgggcgccagaatgaccggcagagagcacgcccacaagggccccgagctgaccacccccgacagcggcctgcccagaccccccaaccccgccctggccggcttcagagccctggcccagcacagcccccccctgggcaccagcacccccagcgccgtgctgctgagcgccgccacctag

SEQ ID NO: 114628 - DNA, 453 bp, Artificial Sequence
  derived and/or modified sequence
atgcggtgcgccgagggcgcatggtggttctctcccgatggaccagccgggagcgcggcctccatctggcctgctgagggagccgaaggactgcctggccagctcggaagggaccggttggaggtggtctattcagtgcctgacaacgtcccgggacaaaacgggtcacgaaggcccctcgtttgcaaaataaccgggaagtgtctgagcgtctgctctgaagagaacgccaaagctggcggttgcagcgcattcccgttgttactgagccagctgggcgcccggatgacagggagagagcacgcccacaagggcccggaacttaccaccccggacagcggactgcccaggcccccaaatcctgcccttgctggattccgagcactagcccagcacagtccaccgctggggactagcactccctcagccgtgctgctgtcagccgcaacatag

SEQ ID NO: 114629 - DNA, 453 bp, Artificial Sequence
  derived and/or modified sequence
atgcggtgtgcggagggcgcatggtggtttagtccagacggccccgctggatcagctgctagcatctggccagcggaaggcgctgaaggtctgccgggccagctggggagggatcggctcgaagtcgtatattctgttcctgataacgtacccggacaaaacggcagccgacgccccctagtctgtaaaataacaggtaagtgtctgtccgtgtgctctgaagaaaacgcaaaggcgggtggttgttctgccttcccgctattgctctcccagttaggagccagaatgaccggacgggagcacgcgcacaagggacccgagctgacgaccccagactccggcttgcctcgtccacccaatccagcgttagcaggattccgggccctggctcagcactcaccccccttgggcacctctacgccgtccgccgtactgctgagcgccgctacgtag

SEQ ID NO: 114630 - DNA, 453 bp, Artificial Sequence
  derived and/or modified sequence
atgagatgtgccgagggcgcctggtggttctccccagatggccctgctggcagcgctgccagcatctggccagctgagggcgctgagggcctgcccggccagctgggccgggaccggctggaggtggtgtacagcgtgcctgacaacgtgcccggccagaatggcagcagaagacccctggtgtgcaagatcaccgggaagtgcctgtctgtgtgcagtgaagaaaatgccaaggccggcggctgcagcgccttccccctgctgctgagccagctgggcgccaggatgacaggccgggagcacgcccacaagggccctgagctgaccaccccagattctggcctgccccggccccccaacccagccctggccggcttccgggccctggcccagcacagcccccccctgggcaccagcacccccagcgctgtgctgctgtctgctgccacctag

SEQ ID NO: 114631 - DNA, 453 bp, Artificial Sequence
  derived and/or modified sequence
atgcggtgcgccgagggcgcctggtggttcagccccgacggccccgctgggtcagctgcctctatttggcctgctgaaggcgcagagggtcttccaggccaactaggcagagacaggctagaggttgtctattccgtgccggataacgttcccggacagaacggatctcgcagaccgctagtctgtaaaatcaccggcaagtgtctgagcgtatgctcagaagagaacgctaaggcaggcgggtgcagtgcctttcccctgctgctttcccagctgggtgcccggatgacaggccgggaacacgctcacaaggggccagaactgaccaccccagacagtggccttccacggcccccaaaccctgcattggcaggattcagagcgctcgcccagcactctcctcccctgggcacttccaccccttctgctgtccttctatcagcggccacctag

SEQ ID NO: 114632 - DNA, 453 bp, Artificial Sequence
  derived and/or modified sequence
atgcggtgcgccgagggcgcctggtggttcagccccgacggccccgccggctcagctgcctctatttggcccgcagaaggggctgagggattgcctggccaactcgggcgggacagattggaagtggtctattctgtgcctgacaacgtacccgggcagaacggatctagaagacctcttgtttgtaaaattacagggaagtgcctgtcagtgtgcagtgaggaaaatgccaaggcaggtggttgttcagccttccccctgctgctgtcccaactgggtgccagaatgactggccgagaacatgctcataaggggcccgagctcacaacaccggactctggtctgccccgccctcctaatcctgccctggcaggttttcgcgccctggcccagcactctccacctcttggcacaagtacccccagtgccgttctcctctcagctgctacatag

SEQ ID NO: 114633 - DNA, 453 bp, Artificial Sequence
  derived and/or modified sequence
atgaggtgtgcggagggcgcatggtggttttctccagacggccctgccggatccgcagcgtcaatctggcctgccgagggcgctgaggggctccccggtcagcttggtcgggacagacttgaagtggtgtatagtgtgccagacaacgtgccaggccagaacggctcccgccgacccctcgtatgcaaaatcaccggtaaatgcctctcagtatgttcagaggagaatgcgaaggcgggaggctgcagtgcctttcctttgttgttgagccagcttggggctcgcatgaccggcagagaacatgctcacaaaggccctgaactcactacacctgattccgggctgccacgcccaccaaaccctgccctcgctggatttcgggctctggcgcagcactcccctcctctcgggacctcaacgccaagtgccgtactgttgagtgccgctacatag

SEQ ID NO: 114634 - DNA, 453 bp, Artificial Sequence
  derived and/or modified sequence
atgcgatgcgcggaaggagcatggtggttttctcctgatgggccagcagggagtgccgcttcgatctggcccgcagaaggcgctgaaggactacccggacagctggggagggaccggctagaggtagtatatagtgtgccggataacgtgcctggtcagaacgggtccagaagacccctggtgtgtaagatcaccggcaaatgcctatccgtttgtagtgaggagaatgcgaaagccggagggtgctcagccttcccactcttgttaagccagctcggtgctcgaatgaccgggagggaacatgcacacaaaggccctgaactgacaacccctgatagtggactgcccaggcctcctaacccagcccttgccggttttcgcgctttggctcagcattctccaccactgggtactagtacgccaagcgcggttctcttgagcgccgcaacctag

SEQ ID NO: 114635 - DNA, 697 bp, Artificial Sequence
  derived and/or modified sequence
ctggcacgatggagaactgcatgaagaggcagcggagtgctgtctgtccccacccttccccgcccggcctccaactggtgggaactggattttgcggctgcagaggacttccccaaattttgccacattaacagctgactgcacatctgagccccgaggcaatgcggtgtgcagagggtgcttggtggttctctcctgatggccccgcagggtctgcagcctccatctggccagcagagggcgcagaaggactgcctgggcagctcggacgtgaccgcctggaagtggtgtacagcgttcctgacaacgttcccggccaaaacgggtcccgccgcccacttgtgtgcaagataactggaaaatgtctttctgtgtgctccgaggagaatgcaaaggctggtggatgtagtgcctttcctctactgctctctcagctgggggcaagaatgacaggacgtgaacatgcacacaagggcccggaactcacgacccccgacagcggtctcccccgcccccccaaccccgcgcttgcaggatttagggcactagcacagcacagtccaccccttgggactagcaccccctccgcagttctgctctctgcagcaacatagagtacaaatattgttccttttgtttcttttttccctttggatacatttttaattacaaaaatagagcttgattgttgcaccta

SEQ ID NO: 114636 - DNA, 664 bp, Artificial Sequence
  derived and/or modified sequence
catggcttcctgggcctaccctcgttctgctactcatggaccagtgtgtttgcctctggaagcctctgtctcctcggctgtaaagcgggcctacgacattgaccgaccacccatgaggttgtggcaatgcggtgtgcagagggtgcttggtggttctctcctgatggccccgcagggtctgcagcctccatctggccagcagagggcgcagaaggactgcctgggcagctcggacgtgaccgcctggaagtggtgtacagcgttcctgacaacgttcccggccaaaacgggtcccgccgcccacttgtgtgcaagataactggaaaatgtctttctgtgtgctccgaggagaatgcaaaggctggtggatgtagtgcctttcctctactgctctctcagctgggggcaagaatgacaggacgtgaacatgcacacaagggcccggaactcacgacccccgacagcggtctcccccgcccccccaaccccgcgcttgcaggatttagggcactagcacagcacagtccaccccttgggactagcaccccctccgcagttctgctctctgcagcaacatagagtacaaatattgttccttttgtttcttttttccctttggatacatttttaattacaaaaatagagcttgattgttgcacctaga

SEQ ID NO: 114637 - protein, 962 aa, Artificial Sequence
  derived and/or modified sequence
MLRRPAPALAPAARLLLAGLLCGGGVWAARVNKHKPWLEPTYHGIVTENDNTVLLDPPLIALDKDAPLRFAESFEVTVTKEGEICGFKIHGQNVPFDAVVVDKSTGEGVIRSKEKLDCELQKDYSFTIQAYDCGKGPDGTNVKKSHKATVHIQVNDVNEYAPVFKEKSYKATVIEGKQYDSILRVEAVDADCSPQFSQICSYEIITPDVPFTVDKDGYIKNTEKLNYGKEHQYKLTVTAYDCGKKRATEDVLVKISIKPTCTPGWQGWNNRIEYEPGTGALAVFPNIHLETCDEPVASVQATVELETSHIGKGCDRDTYSEKSLHRLCGAAAGTAELLPSPSGSLNWTMGLPTDNGHDSDQVFEFNGTQAVRIPDGVVSVSPKEPFTISVWMRHGPFGRKKETILCSSDKTDMNRHHYSLYVHGCRLIFLFRQDPSEEKKYRPAEFHWKLNQVCDEEWHHYVLNVEFPSVTLYVDGTSHEPFSVTEDYPLHPSKIETQLVVGACWQGGDLHMTQFFRGNLAGLTLRSGKLADKKVIDCLYTCKEGLDLQVLEDSGRGVQIQAHPSQLVLTLEGEDLGELDKAMQHISYLNSRQFPTPGIRRLKITSTIKCFNEATCISVPPVDGYVMVLQPEEPKISLSGVHHFARAASEFESSEGVFLFPELRIISTITREVEPEGDGAEDPTVQESLVSEEIVHDLDTCEVTVEGEELNHEQESLEVDMARLQQKGIEVSSSELGMTFTGVDTMASYEEVLHLLRYRNWHARSLLDRKFKLICSELNGRYISNEFKVEVNVIHTANPMEHANHMAAQPQFVHPEHRSFVDLSGHNLANPHPFAVVPSTATVVIVVCVSFLVFMIILGVFRIRAAHRRTMRDQDTGKENEMDWDDSALTITVNPMETYEDQHSSEEEEEEEEEEESEDGEEEDDITSAESESSEEEEGEQGDPQNATRQQQLEWDDSTLSY

SEQ ID NO: 114638 - protein, 782 aa, Artificial Sequence
  derived and/or modified sequence
SILRVEAVDADCSPQFSQICSYEIITPDVPFTVDKDGYIKNTEKLNYGKEHQYKLTVTAYDCGKKRATEDVLVKISIKPTCTPGWQGWNNRIEYEPGTGALAVFPNIHLETCDEPVASVQATVELETSHIGKGCDRDTYSEKSLHRLCGAAAGTAELLPSPSGSLNWTMGLPTDNGHDSDQVFEFNGTQAVRIPDGVVSVSPKEPFTISVWMRHGPFGRKKETILCSSDKTDMNRHHYSLYVHGCRLIFLFRQDPSEEKKYRPAEFHWKLNQVCDEEWHHYVLNVEFPSVTLYVDGTSHEPFSVTEDYPLHPSKIETQLVVGACWQGGDLHMTQFFRGNLAGLTLRSGKLADKKVIDCLYTCKEGLDLQVLEDSGRGVQIQAHPSQLVLTLEGEDLGELDKAMQHISYLNSRQFPTPGIRRLKITSTIKCFNEATCISVPPVDGYVMVLQPEEPKISLSGVHHFARAASEFESSEGVFLFPELRIISTITREVEPEGDGAEDPTVQESLVSEEIVHDLDTCEVTVEGEELNHEQESLEVDMARLQQKGIEVSSSELGMTFTGVDTMASYEEVLHLLRYRNWHARSLLDRKFKLICSELNGRYISNEFKVEVNVIHTANPMEHANHMAAQPQFVHPEHRSFVDLSGHNLANPHPFAVVPSTATVVIVVCVSFLVFMIILGVFRIRAAHRRTMRDQDTGKENEMDWDDSALTITVNPMETYEDQHSSEEEEEEEEEEESEDGEEEDDITSAESESSEEEEGEQGDPQNATRQQQLEWDDSTLSY

SEQ ID NO: 114639 - DNA, 2889 bp, Artificial Sequence
  derived and/or modified sequence
atgctgcggcggcccgcccccgccctggcccccgccgcccggctgctgctggctggattgctgtgcggcgggggcgtgtgggcagccagagttaataaacacaagccatggcttgagcccacttaccacggcatagttacggagaacgacaacaccgtcctcctggatcctcccctgatagcgttggataaggacgcaccattacggttcgccgagtcattcgaggtgaccgtgacgaaagaaggtgagatttgcgggttcaagattcatggccaaaatgtcccgtttgatgcagttgttgtggataaaagcacaggggaaggcgtgatccgtagcaaggagaagctcgattgtgaactacagaaggactactcattcactatccaagcatatgactgcggaaagggacccgatggaacaaacgtaaagaagtcacacaaggccacggtgcacatccaggtgaatgacgttaacgagtacgcgccagtgtttaaggaaaagagttataaggccactgttatagaggggaaacagtacgatagtattttgcgcgtagaagccgtcgatgctgactgtagtccccaattcagccaaatctgcagctacgagataatcactccggacgtcccttttaccgtggataaagacgggtacataaagaatacggaaaaactcaattacggcaaagagcatcaatataaacttacagtcaccgcatatgattgtgggaagaagcgggcgaccgaggacgtgttggtgaagatcagtattaagcccacctgtactcccgggtggcagggttggaataacagaatcgagtacgagccaggcacaggggctctggcagtttttccaaacatccacctagagacttgcgacgagcccgtggcttccgtgcaggcgacagtcgagctggagacatcacatattggtaaggggtgtgaccgagacacctattctgaaaagtcgctccaccggctgtgcggtgccgcggccgggacagcagaattgctgccatccccctccggaagcttaaactggactatggggctgcctacggataacgggcacgattctgatcaggtgtttgaatttaatggaacccaggcagttagaatcccagatggggtagtctctgtgtcccccaaggaaccatttactatatccgtctggatgcgtcatggccccttcgggagaaaaaaagagaccattctttgtagtagcgataagacagatatgaatagacatcactactccctgtatgtccacggttgtcggttgatcttcctgttccgacaggatccttcagaggaaaagaagtataggccagctgagttccactggaagctcaaccaggtgtgcgatgaggaatggcatcattacgttttaaatgtggaattccccagtgtgaccctgtatgttgacgggacttcacacgagccgttttccgtaactgaagattaccctctgcaccccagtaaaatcgaaacccagttagttgtgggagcctgctggcaaggcggcgacctgcatatgacccaattttttcgtggaaatctcgctggtttgaccctgaggagtggcaaactggctgacaagaaggtcatcgactgtttgtacacttgtaaagaaggcctcgatctccaggttttggaggatagcggcagaggggtgcaaatacaggcccacccgtcccagctggtgctcaccctcgaaggcgaagacttgggtgaattggacaaggcaatgcagcacatctcttacctgaacagtcggcagttccctaccccaggcatccgaagactgaagataacatcaaccataaagtgttttaacgaagctacttgtatatcagttccgccggtggacggctacgtcatggtcttacagcctgaggaacctaagatctctttgtccggggtacatcactttgcccgcgcagcaagcgagttcgagtcaagcgaaggcgttttcctatttccagagctgaggattatctccaccatcacgagagaggtcgagcctgagggggatggagctgaagaccctaccgtacaagagtccctggtaagcgaggagattgtacacgaccttgacacatgtgaagtgacagtggaaggggaagagcttaaccatgagcaggagtctctggaagtagacatggcccggctccagcagaaggggatagaagtctctagcagcgaacttggaatgacattcactggggtcgacacgatggcctcttacgaggaagtgttgcaccttttgagatatcgaaattggcatgcacgtagcctcctggacaggaaattcaagcttatttgtagtgaactgaatggcaggtacatcagtaacgagttcaaggtagaggtcaatgttatccatactgccaatcccatggaacacgcaaaccacatggccgcgcagccacagttcgtacacccagaacaccgttcctttgtcgatcttagcgggcataacttggcaaatccacacccttttgcagttgttcccagtaccgccacggtggtgattgtcgtgtgtgtgtcctttctcgtgtttatgatcatactgggcgtgtttcgaatccgcgctgcacatcgccgaaccatgcgagatcaggacaccggaaaggaaaacgagatggactgggacgattctgctttgaccatcaccgtgaacccgatggagacctatgaggatcagcacagcagtgaggaggaggaagaagaagaagaggaggaggaaagcgaagatggtgaggaggaggatgacattactagcgctgagagtgagtcatctgaggaagaggaaggagagcagggcgacccccagaacgctacaagacagcaacagctagagtgggatgacagcactttatcttattag

SEQ ID NO: 114640 - DNA, 2889 bp, Artificial Sequence
  derived and/or modified sequence
atgcttcgccgtccagcacccgctctcgctcccgctgccaggctgctgctggccggtctgctctgtgggggaggagtttgggcagctcgtgtcaacaaacataagccctggctagagccaacatatcatggaatcgtgacggaaaacgataatactgtccttctcgacccaccactgattgccctcgataaagatgctcccttgaggttcgccgagtcatttgaagtcactgtaacgaaagaaggagaaatctgcggcttcaagatccatgggcagaacgtgcctttcgacgccgtggtggtcgataagagcacaggagagggcgtgataagatccaaagagaagctggactgtgaattgcaaaaggactatagcttcactatccaggcatatgattgcggcaaagggcctgacggaacaaacgtgaaaaagtctcataaagctaccgtgcatatacaggtaaacgacgtcaacgagtacgccccagttttcaaggagaaaagctacaaggctacagtcatcgagggcaaacagtacgatagcatactgagggtggaagctgtggatgcagactgttccccacagttcagtcagatttgctcatatgagataatcacgcccgacgtgccatttaccgtggacaaggatgggtacatcaagaacactgaaaagctgaattacgggaaggagcatcagtacaaactgaccgtcacagcctacgactgcggcaaaaagcgggcaactgaggatgttctcgttaagatttcaataaaaccgacttgcaccccgggatggcagggttggaataatcggattgagtacgagccgggaaccggtgccctcgctgtgtttccaaatatacacttggagacatgtgacgaaccagtggcctccgtccaggctaccgtcgagctggagactagccacattggtaagggttgtgatcgcgatacttactcagagaagagtctgcaccgcctttgtggcgcagccgctggaactgccgaactcctgcccagccctagcgggtcgttaaattggactatgggtctgccgaccgataacggccatgacagtgaccaggtgtttgagtttaacgggacccaggccgtcagaatacctgatggggtcgtcagtgtttcacccaaggagccattcaccataagtgtgtggatgcgacacggacctttcgggaggaagaaggagactatcctctgttcctcggataagaccgacatgaatcgccaccactactctctgtacgttcacggctgcaggctgatattcctgttccggcaggatccatcagaagagaagaagtatagacccgcagagttccactggaagctgaaccaggtatgcgacgaagagtggcatcactacgtgcttaacgtggaatttccttctgttacgctgtatgtcgatggcaccagccacgagccattttctgtgacggaggactacccgctgcatccaagtaaaatcgagacacaactggtggttggcgcatgctggcagggaggggatctccacatgacccagttctttagaggcaatctcgctggcttaaccctgagaagcgggaagctggcagacaagaaagtgattgactgcctgtacacctgcaaggagggtctggatctgcaggtgcttgaggattccggaagaggggtgcagattcaagcccacccaagtcagctggtcctgactctcgaaggggaggacctaggagaactcgataaggccatgcagcatatatcttatctaaacagccgacaatttcctacccctggcattcgacgactcaaaatcacatccaccattaagtgctttaacgaagccacttgcatttcagtaccccctgtcgatggttacgtgatggtcctccaacccgaggaaccgaagatcagcctgtccggagttcaccatttcgctcgagccgctagcgagttcgaaagttcagagggagtgtttttgttcccagaactgagaataatcagcacaattacgcgggaagttgagccagaaggggatggagccgaggatcccaccgtgcaagagtctctggtgtccgaagagatagtccacgatctagacacatgcgaggttaccgtagaaggcgaggaactgaaccatgaacaagaaagtctagaagtggacatggccagactccagcagaaaggaatcgaggtttccagcagcgagttgggtatgactttcactggggtggataccatggcttcttatgaagaggtcctgcatctgcttaggtataggaattggcatgccagatccctgcttgacagaaaattcaaactaatatgcagtgagctgaacggcaggtacatctccaatgagttcaaggtggaggttaacgtaattcataccgcaaatccaatggaacacgccaaccatatggcggctcaaccacagttcgtgcacccagagcacagaagcttcgttgacctttcaggccacaacctggctaatccccaccccttcgcggtagtaccaagcactgccacggtggtaatcgtggtgtgcgtgtcctttctcgtgttcatgatcattctgggggttttcaggatccgagccgctcaccgccgtacaatgcgcgaccaggatacagggaaggagaacgagatggactgggacgacagcgcgctcacaatcaccgtcaaccccatggagacttatgaagatcagcactcgagtgaggaagaggaggaagaggaggaggaagaggaatctgaggacggggaggaagaagatgacataacttccgccgaatctgagagctctgaggaagaggagggcgaacaaggggatccccaaaatgccacccggcagcagcagctcgaatgggatgactccaccctctcctactag

SEQ ID NO: 114641 - DNA, 2349 bp, Artificial Sequence
  derived and/or modified sequence
tctatcctgagggttgaagccgttgatgccgattgcagccctcagttctctcagatatgtagttatgaaatcataacgccggacgttcctttcaccgtggacaaagatgggtatatcaaaaacactgaaaaattaaactatgggaaagaacaccagtacaaactgactgtcacagcatatgactgcgggaagaagcgggcaacggaagatgtcttagtgaaaatctccatcaagccaacctgcacaccaggctggcaggggtggaataacaggattgaatacgagcctggaaccggggctttggctgtgttccctaatattcatctagaaacctgtgatgagccagtggcctctgtgcaagcaacagtcgagcttgaaactagccacattgggaagggctgtgacagggacacctattccgagaagtctcttcaccggctgtgcggggctgctgcaggcacggcagaacttcttccctcccccagcgggagcctgaactggacaatgggcctccccactgacaatgggcacgattctgatcaagtgtttgaatttaatgggactcaggccgtgcggattcccgatggcgtcgtgtccgtgagccctaaggagcctttcaccatcagcgtgtggatgcggcatgggccatttggaaggaaaaaagagacaatactgtgcagctctgacaagactgacatgaatcgtcaccactatagcttgtatgttcatggatgccgtttgatcttcctgttccgccaggaccccagtgaggagaagaagtacaggcctgctgagtttcattggaagctgaaccaagtctgcgacgaggagtggcaccactacgttttgaacgtcgaattccctagtgtcactttatatgtcgacggaacctctcatgaaccattcagcgtgacagaggactatccgctgcatccctctaagattgaaacacagttagtcgttggggcttgttggcagggcggagatcttcatatgacacagttcttcagagggaatctggccggattaaccctgcgttctggaaaactagctgacaagaaagttatcgactgcctttatacctgcaaggaaggcttggatctgcaggttttggaggattccggcagaggggtacagatccaagctcatccatctcagttggtgcttacattggaaggtgaagatctgggggagttagacaaggctatgcagcacatttcctacctcaatagccgccaattccctaccccaggcatcagacgtctcaagattacatccaccatcaaatgctttaacgaagcaacctgtatttctgttcctcccgtcgatggttacgttatggtcctccaacccgaagagcctaagattagtcttagcggcgtgcatcactttgctcgagccgctagcgagtttgagtcaagcgaaggagttttcctattccctgagcttagaatcatctctactattaccagagaagtcgaacccgagggtgacggcgcagaggatccgaccgtacaggagagcctcgtgagcgaggaaattgttcacgacctggatacctgcgaggtgactgtggagggcgaagagctcaatcacgaacaagagtctttagaggtggacatggcacggctgcagcagaaaggtatcgaagttagcagctcagagctgggcatgacattcaccggagtggacacgatggcctcctacgaggaggtactgcatttactgaggtaccgcaattggcacgcgaggtcgctactggaccgcaagtttaagctgatctgttccgagctcaacgggcgatacattagtaacgagttcaaagttgaagtcaatgtgattcatactgcgaaccctatggagcacgccaatcatatggccgcacagccgcagtttgtccatcccgagcatcgctcttttgtagacttgagcgggcataacttagccaacccccacccatttgccgtggtgcccagtacggccacggtggttattgtcgtttgtgtctccttcctagtgtttatgatcatcctgggcgtcttcagaattagggctgctcatcggcgtaccatgcgggaccaggacaccggcaaggagaatgaaatggattgggacgattctgccctaactatcaccgtcaaccctatggagacctatgaggatcagcattcctcagaggaagaagaagaagaagaggaagaagaggaatctgaagacggagaggaagaggacgacattacgagcgcagagtctgagtctagcgaagaggaggagggcgagcagggggacccccagaacgcgaccaggcagcagcaactcgagtgggatgacagtaccttaagctactag

SEQ ID NO: 114642 - DNA, 2889 bp, Artificial Sequence
  derived and/or modified sequence
atgctgagaaggcccgctcccgctctggcacctgcggctagactgttgttggcagggctcctgtgtgggggaggggtctgggccgctagggtcaacaaacacaagccatggttggagcctacataccatggaattgtgaccgagaacgataataccgtcctgttagacccgcctcttatcgccctggacaaggacgccccactgcgcttcgccgagagttttgaagtgactgtaactaaagaaggcgagatatgtggatttaaaatccacggacagaacgtgcctttcgacgccgtggtggtggataagagcacaggcgaaggcgtaatcagatccaaggagaaactcgattgtgagctacaaaaggactattctttcactattcaggcgtacgattgcggaaagggtcccgatggcacgaatgtcaagaagagccataaggccacggttcatattcaggtgaatgatgttaacgagtacgctcctgtgttcaaagaaaaatcttacaaagctacggtgatcgaaggaaaacagtatgattcaatcctgagagtggaggcagtagacgcagactgtagcccacaatttagccagatttgtagttacgagattattacacccgatgtgccattcaccgtagacaaggacggatacataaaaaatactgagaaattgaattacggtaaggagcaccagtacaaactcaccgtcactgcttacgactgtgggaaaaagagggcaacagaagatgtcttggtcaaaatttcaataaaacccacttgtacccctggatggcagggctggaataacagaatcgagtacgagccaggaaccggggcacttgcagtgttcccaaacattcatcttgagacatgtgacgaacccgtggcatcagtgcaagccactgttgagctggaaactagccacatcggcaagggttgtgacagagacacctacagcgagaagtctctgcaccgattatgtggcgctgcagcaggcacagccgagcttctgccaagtccatcaggctctcttaattggacaatgggcttgcccactgacaatggccacgattctgatcaggtgttcgaatttaacggcacgcaggccgtccggatccccgatggggtcgtgtcagtaagtccaaaagaacctttcaccattagcgtgtggatgcggcatggccctttcggacggaaaaaggaaaccatactgtgcagttcggataagaccgatatgaacaggcaccattacagtctctacgtccatggctgcagattgatctttttgtttcggcaggatccgtccgaggagaagaaatacagaccagctgagtttcattggaagcttaatcaggtctgcgatgaggagtggcaccactacgttctcaatgtggagtttccctctgtgaccctctacgtagacgggaccagccacgagccgttctccgtgacagaggattacccgctgcacccttctaagatcgagacgcagctcgtggtcggtgcttgctggcagggaggcgacttgcatatgacccagttcttcagaggcaatcttgccggactaacactgcgcagtggtaaattggctgataaaaaagtcatcgattgcctgtatacatgtaaagaaggactcgatctgcaagtcctggaggattcaggcaggggcgtgcagatccaagctcacccgtctcagctcgttctgactctggagggcgaggaccttggcgagctggataaggctatgcaacatatatcttaccttaacagccggcagtttcctacacctggcatccgacggttgaagataactagcaccatcaaatgtttcaatgaagctacatgtatatcagtccccccagtcgatggatatgtcatggttctccaaccggaggaacctaagatctcattgagcggtgtacatcactttgccagggccgcatctgagttcgaaagctccgagggagtgtttctcttcccagaattgcgcattattagcaccatcactagggaagttgaacccgaaggagacggggctgaggatcccaccgttcaggagtcgctcgtctctgaggagattgtacacgatctagacacgtgtgaagtcaccgtggagggggaggaactaaatcatgagcaggagagcctggaagtcgacatggccagactgcagcagaaaggaattgaggtcagcagctctgaactggggatgactttcacaggggtggacacaatggcatcttatgaggaagttcttcatctactgcggtatcgtaattggcacgcacgatcattgttggataggaagtttaagctaatctgttccgagttaaatggtcggtatatttccaacgagtttaaagtggaggttaatgttattcataccgctaaccccatggaacatgcaaatcatatggcggcacagcctcagttcgtccatcctgaacaccgcagttttgtggacctgtccgggcataatcttgctaatccgcacccttttgcagtggtcccctccacagcgacagtggtgatcgtagtttgcgtgagcttccttgtttttatgattatcctcggagttttccgcattagagctgcacacaggaggacgatgagggaccaagacaccggaaaagaaaatgagatggattgggatgattctgcccttaccatcacagtaaatcctatggagacctatgaagaccagcatagctccgaggaggaagaagaggaggaggaggaggaggagtctgaggatggtgaagaggaagatgacatcaccagcgctgaaagcgaatctagtgaggaggaagaaggcgaacaaggagaccctcagaatgctacacggcagcagcagctggaatgggatgattcgactttgtcctactag

SEQ ID NO: 114643 - DNA, 2889 bp, Artificial Sequence
  derived and/or modified sequence
atgttgcgtcgaccagctccggctctcgcccctgccgccagactgctgttagcaggcctgctctgcggagggggtgtctgggctgcccgcgtgaataagcataagccttggctcgaaccaacgtatcacggcattgtcacagagaatgataataccgtcctccttgaccctccacttatcgcactagacaaagacgcgccacttaggtttgcagagtcctttgaagtcaccgttacgaaagagggggagatatgtggattcaagatccacggccagaacgttccattcgatgctgtggtcgtggacaagagtaccggagaaggtgtgattagatctaaagaaaagttagattgtgagctccagaaagactacagcttcaccatccaagcgtatgactgtggcaagggcccagatggtactaatgtgaagaagtcccacaaggcaactgtgcatatccaggttaacgatgtgaacgaatacgccccagtttttaaggaaaagtcttataaagcaactgtcatagaggggaagcagtatgactctatcctccgagtggaagccgtggatgctgactgctccccgcagttcagccagatatgcagttatgaaatcatcaccccagatgtccctttcactgttgataaagatggttacattaagaatacagagaagttgaactatggtaaagaacaccaatataaactcactgtcacagcctatgattgcgggaagaagcgggctactgaggatgtgcttgtgaagatcagtattaagcctacgtgtacaccagggtggcagggctggaataaccgcattgagtatgaacccggcacaggagcactggcggtttttcctaatatccaccttgaaacatgcgacgagcctgtggcctcagttcaggcaactgtggagttagagacttcccacattgggaagggatgcgatcgtgatacttacagtgaaaagtctctgcatagattatgtggggctgctgcaggcaccgcagaactcctgcccagcccatcaggatctctaaactggaccatgggcttacctaccgataatggccacgactccgaccaggtctttgaattcaacggcacccaggccgtcaggatcccggacggcgtggtcagtgtgagcccaaaggaaccctttaccatttctgtctggatgagacatgggccattcggacgtaaaaaagagaccatcttatgttcttccgataagactgatatgaaccgtcaccattatagtctttacgtccatggttgccggctgatattcctttttagacaggaccctagcgaagaaaaaaagtacagaccggctgaattccactggaagctcaatcaggtgtgcgatgaagagtggcatcactacgtgctcaacgtcgaattcccctccgtcacattatatgttgatggaacaagccacgaacctttctccgtgactgaggattatccccttcacccatcaaaaattgagacgcagctcgtcgtaggagcttgttggcaagggggcgatcttcatatgacacagttcttcaggggtaatctggcagggctaaccctcagaagcggcaagttggctgataaaaaggtgatcgattgcctgtatacatgcaaagagggccttgacctgcaagtgctcgaagactctggccgcggagtacagattcaggctcacccaagtcagctggtgctaaccctggaaggagaagatctgggtgaactggacaaggccatgcagcacatttcttacctcaattcacgccagtttcccacacctggtataagacggctgaagatcacctcaacaataaaatgcttcaatgaagccacttgcatttctgtgccacccgttgacgggtatgttatggtgctccagccggaggaaccaaaaatttccttgagcggggtccatcacttcgctagggcagcgagcgagttcgagtccagcgaaggcgtgttcttatttccagaactgcgcataatctcaacaatcactcgcgaagtcgaaccagaaggggatggagccgaagaccccactgtacaggagtccctcgtttccgaagagattgttcacgacttagatacctgcgaagtaacggtcgagggcgaagagctgaaccacgagcaggagtccctggaggttgatatggcacgcttacagcagaagggcattgaagtcagcagcagcgaacttggcatgacctttacaggggtagacaccatggctagttacgaggaggtactccatcttcttaggtatcgcaactggcatgcccgcagccttcttgatcgtaaatttaaactaatctgtagtgaacttaacggccggtatatcagcaacgaatttaaagtggaggtgaacgtgatacacactgccaaccccatggagcatgcaaaccacatggcagcccagccacagtttgtacaccccgaacacaggtcgttcgtagatctcagcggacataatcttgccaaccctcatccatttgctgtggtgccatcaacagccacggttgtgatcgtggtttgcgtctcctttctggtcttcatgattatcctgggggtcttcaggatccgagccgcccaccgccggactatgcgagatcaagacaccggtaaggaaaacgagatggactgggacgactcagcattgactatcaccgtgaatcccatggaaacatatgaagatcagcattcatcagaagaagaggaggaggaggaagaggaggaggagtccgaggacggggaagaggaagatgacattacatccgccgagtctgaaagctccgaggaagaagagggggagcagggagacccccagaacgcgacacgccaacaacagttagaatgggatgactctactttaagttattag

SEQ ID NO: 114644 - DNA, 3829 bp, Artificial Sequence
  derived and/or modified sequence
agcattttgagggtggaggccgtggatgccgactgctcccctcagttcagccagatttgcagctacgaaatcatcactccagacgtgccctttactgttgacaaagatggttatataaaaaacacagagaaattaaactacgggaaagaacatcaatataagctgaccgtcactgcctatgactgtgggaagaaaagagccacagaagatgttttggtgaagatcagcattaagcccacctgcacccctgggtggcaaggatggaacaacaggattgagtatgagccgggcaccggcgcgttggccgtctttccaaatatccacctggagacatgtgacgagccagtcgcctcagtacaggccacagtggagctagaaaccagccacatagggaaaggctgcgaccgagacacctactcagagaagtccctccaccggctctgtggtgcggccgcgggcactgccgagctgctgccatccccgagtggatccctcaactggaccatgggcctgcccaccgacaatggccacgacagcgaccaggtgtttgagttcaacggcacccaggcagtgaggatcccggatggcgtcgtgtcggtcagccccaaagagccgttcaccatctcggtgtggatgagacatgggccattcggcaggaagaaggagacaattctttgcagttctgataaaacagatatgaatcggcaccactactccctctatgtccacgggtgccggctgatcttcctcttccgtcaggatccttctgaggagaagaaatacagacctgcagagttccactggaagttgaatcaggtctgtgatgaggaatggcaccactacgtcctcaatgtagaattcccgagtgtgactctctatgtggatggcacgtcccacgagcccttctctgtgactgaggattacccgctccatccatccaagatagaaactcagctcgtggtgggggcttgctggcaaggtggcgacctgcacatgacccagtttttccgaggcaatctggctggcttaactctccgttccgggaaactcgcggataagaaggtgatcgactgtctgtatacctgcaaggaggggctggacctgcaggtcctcgaagacagtggcagaggcgtgcagatccaagcacaccccagccagttggtattgaccttggagggagaagacctcggggaattggataaggccatgcagcacatctcgtacctgaactcccggcagttccccacgcccggaattcgcagactcaaaatcaccagcacaatcaagtgttttaacgaggccacctgcatttcggtccccccggtagatggctacgtgatggttttacagcccgaggagcccaagatcagcctgagtggcgtccaccattttgcccgagcagcttctgaatttgaaagctcagaaggggtgttccttttccctgagcttcgcatcatcagcaccatcacgagagaagtggagcctgaaggggacggggctgaggaccccacagttcaagaatcactggtgtccgaggagatcgtgcacgacctggatacctgtgaggtcacggtggagggagaggagctgaaccacgagcaggagagcctggaggtggacatggcccgcctgcagcagaagggcattgaagtgagcagctctgaactgggcatgaccttcacaggcgtggacaccatggccagctacgaggaggttttgcacctgctgcgctatcggaactggcatgccaggtccttgcttgaccggaagtttaagctcatctgctcagagctgaatggccgctacatcagcaacgaatttaaggtggaggtgaatgtaatccacacggccaaccccatggaacacgccaaccacatggctgcccagccacagttcgtgcacccggaacaccgctcctttgttgacctgtcaggccacaacctggccaacccccacccgttcgcagtcgtccccagcactgcgacagttgtgatcgtggtgtgcgtcagcttcctggtgttcatgattatcctgggggtatttcggatccgggccgcacatcggcggaccatgcgggatcaggacaccgggaaggagaacgagatggactgggacgactctgccctgaccatcaccgtcaaccccatggagacctatgaggaccagcacagcagtgaggaggaggaggaagaggaagaggaagaggaaagcgaggacggcgaagaagaggatgacatcaccagcgccgagtcggagagcagcgaggaggaggagggggagcagggcgacccccagaacgcaacccggcagcagcagctggagtgggatgactccaccctcagctactgacccgtgcccccggccacctcggtttctgctttcgaagactctgctgccatccgttctcccagtcccaagggtccacgatgtacaaagtcatttcggccagtaggtgtgcagacccctccccgccacgatcgtcgctgtgcttggtgtgtaggaccctaggctccccgcccaccctctgcctggtcgcgctcttcagtcccacgaggagctgacacgtcctctctggccgccatccggctcgcacaggggcctcccagcgcctcaggccccgcgtttgtgtctggagtctccccccggggagaggacactggcccctcgcactccagaaaagccatgccagctgggctcgttgacaaagggtaaaacatgctcactcccacccggtaatcatttttttctttttttaaaaaaagtttttattttttccaaactagtgcatgtataaataatggcaggatggggggtactgtgtagatgattaactgactttttaatattttgtaaataaatcggattccttgtgtcctttgtgctagtgtaacccgggactggaatgtaaagtgaagttcggagctctgagcacgggctcttcccgccgggtcctccctccccagaccccagagggagaggcccaccccgcccagccccgccccagcccctgctcaggtctgagtatggctgggagtcgggggccacaggcctctagctgtgctgctcaagagactggatcagggtagctacaagtggccgggccttgcctttgggattctacctgttcctaatttggtgtggggtgcggggtccctggccccttttccacactcctcctccgacagcagctccctgggcagtggcctggtctcaccgtgtgcagccttgtggtttatgcttaaatgtacattttcctgctggtaaaaggagaaactgagaggtgtcctgcagaccggctgaccactccttttggagacggcaggaggcctgagcgatccgtactcagaacgtccaggagagacgcatggcccgaagtcaaagtgctggaattttccaaaacagcctgttctctcctctctcctccccagagcaccccctgccatcaggggggttgaaatccctctcccccaggagccctgctgctttgcttggtggtagggcaggagagcaaacaaacagtcatggtctaaaacccacatagcactttgctcttagttacatgtaaaattttagatttctaaaacaggtgggcaatcattttgaatactgttctgtgaccctgactgctagttctgaggacactggtggctgtgctatgtgtggccatcctccatgtcccgtccctgtagctgctctgtttagacagcggacagacgctcacgcccaggggatgtcctcacgctgtcgccgcgcggtttcccttcgcagatgtgtatactcatgataggtcagaaagtgtatccgctacaataaagttctggttctaact

SEQ ID NO: 114645 - DNA, 2349 bp, Artificial Sequence
  derived and/or modified sequence
agtatcctgagggtagaagccgtagatgccgactgttcccctcaattttcccagatttgttcatatgagatcatcaccccagacgtcccgttcacagtcgacaaagatggctacataaaaaatactgagaagctcaattatggcaaggaacaccaatataagctgacggtcactgcttatgattgcggcaaaaagagggccactgaagacgtgctagtgaagattagtatcaaacccacctgcacaccgggttggcagggatggaataaccggatcgagtacgaacctgggactggggccttagccgtgttcccaaacatccacctcgagacttgcgatgagccagtggcatctgtgcaggcgactgtagaattagagacgtcgcacattggcaagggttgcgacagagacacctactcagagaagtcactacacagactctgcggtgcagctgccgggacagccgagctgcttcctagccccagcgggtccctgaattggacaatgggcctccccacagacaatggccatgactcagaccaggtatttgaattcaacggtacccaggcagtcaggattcccgacggagtggtgtcagtttcacctaaagagccgtttactatatctgtctggatgcgccacggtccattcggacgtaagaaggagactatcctctgctcctctgacaagaccgatatgaaccgccatcactactcactctatgttcacggctgtcgcctcatcttcctgttccgacaggaccccagcgaggaaaagaaatacagacctgcagagttccattggaagctgaatcaagtctgcgatgaagagtggcaccactacgtcctcaacgtcgaattcccaagcgtaaccctgtacgtggacggtacgtcacacgagccgttttcggtgaccgaggattatcctctgcacccctccaagatcgaaacccagctggtagtcggcgcatgctggcaagggggggacctgcacatgacacaattcttcagaggaaatctggcaggccttacactgcggagtggcaaactggccgacaagaaggtgattgactgtctctatacttgtaaagagggcctggatctccaggtcctggaagattccggaagaggcgttcaaattcaggcccatccctcacagctcgttttgactttggaaggagaggacctgggagagctcgataaggcaatgcaacacatatcctatttgaattccaggcagtttcccaccccaggcattagaagactgaagattacgtccaccattaagtgcttcaatgaggctacttgtattagcgttcccccggtagacggctatgtaatggttctgcagccagaagagccaaaaatctctctatcaggggtccaccacttcgccagggcagctagtgagtttgagtcttccgagggtgtgtttctctttcctgaattgagaatcattagcactattacccgggaggtcgagcctgagggggatggcgctgaagacccaaccgtgcaggagtccctggtatccgaggagatagtacacgatctggacacttgtgaagttaccgtggagggggaagaacttaaccacgagcaggaaagcttggaagtggacatggcacgcctgcaacaaaaagggattgaggtgagctcttccgaacttggaatgactttcaccggagtcgacacaatggcatcttacgaggaagtgctccatctgctgaggtaccgtaactggcatgcccgatctctcctcgatcgaaaatttaaactgatttgctcagagctgaacggcagatacatctccaacgagttcaaggttgaggtcaacgtgattcacactgcgaatccaatggagcatgcgaaccatatggccgcccaacctcagtttgtccatccagaacacagatccttcgttgacttatctggacacaacttggcaaatccccatccttttgccgtcgtgccgtctacagccacagtggttatagtggtgtgtgtctctttccttgtttttatgattatcctcggcgtgttcagaatacgggccgcccacaggaggaccatgcgcgatcaggacaccggcaaagaaaatgaaatggattgggacgactcagctcttacaattacagtgaaccccatggagacctacgaagaccagcactctagcgaggaggaggaggaggaggaagaggaagaagaaagcgaggacggcgaggaagaggacgatattacgagcgccgagtccgaatccagcgaagaagaagaaggcgagcaaggagatccccaaaatgctactagacaacagcaactggagtgggacgatagtacgttatcttactag

SEQ ID NO: 114646 - DNA, 2889 bp, Artificial Sequence
  derived and/or modified sequence
atgctcaggcgaccggcaccagctctagctccagccgctagattgctgcttgcggggctgctgtgcggaggcggtgtctgggctgccagggtaaacaagcataagccatggctcgagccgacttatcatgggatcgtgaccgaaaacgataatacagtgctcctggatcccccgctgatcgcactggacaaggacgcccccctgcgtttcgcagaatccttcgaggtcacggttacaaaggagggagagatctgtggttttaaaatccacggccagaatgtcccatttgacgcagtagtagtcgacaagtctaccggagagggcgtgatccggtcaaaggaaaaactagactgcgagttacaaaaagattactctttcacaatacaggcatacgactgtgggaaaggcccagacggaactaacgtgaaaaagtctcataaagcaacagtgcacatacaggtgaacgacgttaatgagtatgccccggtattcaaggagaaatcttacaaggccactgttatcgagggaaagcagtatgactccatcctgagagttgaggccgttgacgctgactgcagccctcagttctctcagatctgcagctacgagatcattacacctgatgtgccgtttaccgtggataaagacggatacatcaagaacaccgagaagctcaattatgggaaggagcaccaatacaaactcaccgtcacagcatatgattgtggcaaaaaacgagccaccgaggatgtgttggtgaagatttctatcaaacctacttgcaccccaggatggcaaggatggaataacaggattgagtacgagccaggcaccggcgctcttgccgtgtttcccaatatccacttagaaacctgcgacgagcccgtagcatccgtgcaggcgaccgtggaattggagacctcccacattggaaagggctgcgaccgggatacctatagtgaaaaaagccttcacagactttgtggcgctgccgccggcactgccgagctcttgccttcccccagtggttccctgaattggacaatgggcctgcccacggataatggacacgattcggatcaggtgttcgagtttaacggcacccaggcagtaagaatccccgatggagtagtcagtgtttccccaaaagaacctttcacaatttccgtttggatgcgtcacgggccgttcgggcgcaaaaaagaaacgattctgtgctcatctgacaagaccgatatgaatcggcatcactattccttgtacgtccacggttgcaggcttatcttcttgttccggcaggatcctagtgaagaaaagaaatatagacctgctgagttccactggaaattaaaccaggtctgtgatgaggaatggcaccactacgttctaaacgttgagtttcccagcgttacattgtatgtcgacggcacctcacacgagcccttttccgtgacagaagactaccccctgcatccgtcaaagatcgaaactcagttggtcgttggggcatgttggcagggcggggacctgcacatgactcaatttttcagagggaacttagcggggctgaccctcagatccggaaagctggctgataagaaggtcatcgactgtttgtatacttgcaaggagggtctagatttgcaggtcctagaggacagtggacgtggggtacagattcaagctcacccctcccaactcgtgctgacattggagggcgaagatctcggggaattggacaaggctatgcagcacatttcgtatttgaactcccgccaattcccaaccccgggtattcgtcgcttgaagatcaccagtaccattaagtgcttcaatgaagccacctgtataagcgtgcccccagtcgacggatacgttatggtgcttcaacctgaggaacctaagatttctttgtctggcgtgcaccacttcgctagagctgcatcggagtttgagtcaagcgaaggagtgttcctgtttcccgaactgagaatcatctcgaccattactcgggaggtggagcctgaaggagacggagccgaggacccaaccgtccaggaatccctggtttctgaagagatagtacatgacctagacacatgtgaggtgactgtcgaaggtgaagaactgaatcacgagcaagagagcctcgaagtggacatggcgcgactccagcaaaagggaatcgaagtaagttcctctgaactggggatgacttttaccggagtggatacgatggcaagttacgaagaggtgctccacctgctacggtatcgaaattggcacgcccgcagcctcctcgacagaaaattcaagttgatatgttctgagctgaacggaagatacatcagcaatgagtttaaagtggaagtgaacgtgattcataccgccaatcctatggagcacgctaatcacatggctgctcaaccccagtttgtgcaccccgaacaccgctctttcgtggatctgtcaggacataacttggccaaccctcatcccttcgccgtggttcccagcactgccaccgtggtgatcgttgtttgcgtgtcctttctggtattcatgattatcctgggcgtgttccgtatccgcgccgcacacaggaggacaatgcgcgatcaagatacgggtaaagagaatgaaatggactgggacgatagcgctttaaccattacagtcaatcccatggagacatacgaagatcagcacagcagcgaggaagaagaggaggaggaggaggaagaagaatccgaagacggagaggaggaggatgacatcacaagtgccgaaagtgaaagctccgaagaagaggaaggcgagcagggcgatccccagaacgccaccaggcagcagcaactcgaatgggacgattctacactctcatattag

SEQ ID NO: 114647 - DNA, 2889 bp, Artificial Sequence
  derived and/or modified sequence
atgcttaggagacctgcaccagcactggcacctgccgcgcggctgctactcgccggtcttttatgcgggggcggcgtgtgggccgctcgtgtcaacaaacacaaaccttggctagaacctacctatcacggcatcgtcaccgaaaacgacaacactgtactactggaccctcccttaatcgcgcttgacaaggatgccccgctgcggtttgctgaaagctttgaagtgactgtgacaaaagaaggcgaaatatgcggctttaagatccacggccagaacgtccccttcgacgccgtggtagttgataaatccactggcgaaggtgttatcagaagtaaagagaagctggactgtgagttacagaaggattactcttttactatccaagcatacgactgcggtaaaggccccgatggaaccaacgttaagaaatcacataaggcaacagtacacattcaggtgaacgacgttaacgaatacgctcccgtgtttaaagagaagagttacaaagcaacagtcattgaaggaaagcagtatgacagtatactcagagtggaagctgtggacgctgactgctcccctcagttctcccaaatctgctcatacgagatcatcacccctgacgtcccattcaccgttgacaaagatgggtatataaaaaatacagaaaagttaaattacggaaaggaacaccaatataagctcactgtcacagcctatgattgcgggaagaaaagagcaacagaagacgtcctcgttaaaatttctataaagccaacatgcacaccaggctggcagggctggaataatcggatcgaatacgaacccggcactggggcacttgctgtcttcccaaatattcacctggagacttgcgacgagcccgtggcttccgtgcaggccactgtggaacttgaaaccagccacattggtaaaggctgtgatagggacacttactcagaaaagagccttcatcgactgtgcggcgctgctgcgggtactgccgagctcttgccctccccctctggatctctcaattggactatgggtctgccaaccgacaacgggcacgacagcgatcaggtctttgaattcaacggaacccaagccgtccggattcccgatggggtcgtgtctgtgagccccaaagaaccctttactatctctgtgtggatgcggcacggaccctttgggcgcaagaaagagaccatcctatgcagcagcgacaaaaccgatatgaatagacaccactactccctttacgtgcacggttgtcgtttgatctttttatttagacaggatcctagcgaagagaaaaagtatcgccccgccgagtttcactggaaattgaaccaagtttgcgacgaagaatggcatcattacgtgctgaacgtggaatttccatctgtaaccctctacgtggacggaaccagtcacgagccctttagtgttacagaggactaccccctgcaccctagtaaaattgagacacaactcgttgtgggggcctgttggcagggcggagaccttcatatgacacagttctttcgcggaaacctcgccgggcttacactgagatctggcaaactggcagataaaaaggttatcgactgtctctatacttgtaaggagggtctggatttgcaggtacttgaagattccggaaggggcgtacagattcaggctcatccctcccagctcgtcttgaccctggaaggagaagatctaggagagctggataaagcgatgcagcacattagctatctgaattcccgacaattcccaacccctggcattcgccggctcaagatcacctccactatcaaatgcttcaacgaagcaacttgtatttcagttcctccagtggatggctatgtgatggtgctccaacccgaagaaccaaaaatatccctgtcaggcgtccaccacttcgctagggctgcttccgagtttgagtcatctgaaggcgtgttcctgttcccggaattgcgtatcatctcaaccattacacgggaagtagagccggagggcgatggagcagaagatcctactgttcaggaatctctcgtgtcagaagaaatcgtccatgacctcgacacctgcgaggtgacagtggagggagaggaattgaaccacgaacaggaatccttggaggtagacatggccaggctacagcagaagggtatcgaagtgtcgtcatcagagctaggtatgacctttaccggtgtggataccatggccagttatgaagaagtgttgcacctccttagatacagaaactggcacgcacgctcactcctcgatcgaaagttcaagctcatttgttctgagttaaacggaaggtacatatcaaatgaatttaaggtagaagtcaacgtcatccataccgccaaccctatggaacatgctaatcacatggctgcacaacctcaattcgttcatcccgagcacagatcattcgtagatctatcaggccataatctggccaacccccatccatttgccgtggtcccaagcacagccactgttgttatcgttgtgtgtgtgtcattccttgtgttcatgattatacttggagtattcagaatcagggccgctcaccgacggacaatgcgcgatcaggacacaggaaaagaaaatgaaatggactgggacgactccgccctgacgataacagtgaaccccatggagacttacgaggaccagcacagcagtgaagaagaggaagaggaggaggaggaggaagagagtgaggacggggaagaggaggatgacatcacaagtgcagagtcagagagttcggaggaggaagagggtgagcaaggcgacccgcaaaacgcaactagacagcagcagctggagtgggacgattctacgttgagttactag

SEQ ID NO: 114648 - DNA, 2349 bp, Artificial Sequence
  derived and/or modified sequence
tctatcctgagagtagaggctgtagacgcagattgcagcccccagttcagtcaaatttgtagctatgaaatcatcacgcctgacgtaccttttactgtggacaaggatggctacattaaaaacaccgaaaaactcaactatggcaaggaacatcagtacaaactgacggttacagcctacgactgtggaaagaagagagctaccgaagacgtactagtgaaaataagtataaaaccaacgtgcacaccgggttggcagggctggaataatcgcattgaatacgagccgggtactggtgcgctagcggtctttccaaatattcatctagaaacttgtgatgaaccagttgcaagcgtgcaggccacggtcgaactcgagactagtcatatcggaaagggatgtgatcgcgatacctactctgagaagtcactgcataggctttgcggcgctgctgccggaaccgctgagctgctgccatccccctctggctccctcaattggacgatgggcctaccaaccgataatgggcatgactccgaccaggtttttgaatttaacggcacccaggcggtaagaattcctgatggggtggtgtctgtgtcacctaaagaacctttcactatctccgtgtggatgcggcacggccctttcggcagaaaaaaagaaaccattttgtgctcatccgataaaactgatatgaatagacatcactacagcttatacgtgcacggatgtaggctcatttttctatttaggcaagatccttccgaagaaaaaaagtaccgccctgccgaatttcactggaaacttaaccaagtgtgtgatgaagagtggcaccactatgtgctgaacgttgagtttccctccgtgactctctatgtcgacggtacctcccacgaacctttctctgtgacagaggactatccactgcatccatccaaaattgagactcaattagtagttggggcttgctggcaaggcggtgaccttcacatgacccagtttttcagaggtaatttagccgggctcacattgcggtcagggaagctagcagacaaaaaggtgattgactgtctttacacttgtaaagaaggcctggatctgcaagtactcgaggacagcggacggggcgtgcaaatccaagctcatccctctcagctggtgctcacattagaaggggaggatctcggcgaattagacaaagccatgcagcatatttcatacttaaattcgagacaatttcccaccccaggaatcaggagactgaagataacttctaccatcaaatgtttcaacgaagcgacatgcatctccgtgccacctgttgacggttacgtgatggttttacagcccgaggaacctaaaatcagtctttctggagtgcaccatttcgcaagagccgcttctgagttcgaatcttctgaaggtgtgttcttgttccctgagctgcgcatcattagtaccataacccgagaagtagagcctgagggagacggagcagaggatcctaccgttcaggaatcattagtctcagaggagatcgttcacgatttggacacctgtgaggtcacagtagagggagaagaactcaatcacgaacaggaaagtcttgaagtggatatggcccggctgcagcagaaaggaatagaggtctcatcaagcgaattaggtatgacatttactggcgttgacaccatggcaagttatgaagaggtactgcacctattacggtacagaaattggcatgctaggagcctcctcgaccgcaaatttaagctcatttgttctgaacttaatgggagatatatcagcaacgagtttaaggtcgaggttaacgttatccataccgccaaccccatggagcacgcaaatcacatggcagctcaaccacaatttgtgcacccagaacatcgctcgtttgtagatttgtccggccataatctcgccaatccccatcccttcgcagtagtgccctccaccgcaacagtggttatcgtcgtttgtgtaagcttcctcgtgtttatgattatactgggcgttttccgtatccgcgctgcacatcgacggacaatgcgcgaccaggacactgggaaagaaaacgaaatggactgggatgattccgccctgacaataacggtaaaccccatggagacttatgaggaccaacatagctcagaagaagaagaagaggaagaagaagaggaggaaagcgaagacggtgaggaagaagacgacatcacatcagcagaaagtgaatcgagcgaggaggaagagggggagcagggagacccacagaacgctaccaggcagcagcagttagagtgggacgacagcactttgtcctactag

SEQ ID NO: 114649 - DNA, 2889 bp, Artificial Sequence
  derived and/or modified sequence
atgttgcgaagacctgcccccgctctcgcccctgccgcccgtttacttcttgccggcctgttgtgcggcggaggagtttgggccgcccgagtcaacaaacacaaaccatggctggagcccacctaccacggtatcgtcaccgagaatgacaataccgtgctgctcgatccccctttgattgccctggacaaggatgccccgctcagatttgccgagagttttgaagtcacagtgaccaaggaaggtgaaatctgcgggtttaaaatacacggacaaaatgtgccttttgacgctgtggtagtggataagagcaccggagagggtgtcattagatccaaggagaagttggactgcgaactgcagaaggactacagcttcactatacaagcctacgactgcgggaagggcccagacggtaccaatgtaaagaagtcccataaagccacagtccacattcaggtaaatgacgtaaacgaatatgcccctgtttttaaggagaaatcatacaaagctacagttatcgaaggaaagcaatacgattcaatcctgcgggtggaagccgtcgacgccgattgttcaccacagttttctcagatttgttcttacgaaatcatcacccccgacgtcccctttaccgtcgacaaagatggatacattaaaaacaccgaaaaattgaactatggtaaagaacatcagtacaaattaacagtaactgcttatgattgtggtaagaagcgcgctaccgaagacgtcctggtcaaaatctctatcaagcccacttgcacgcctggatggcagggctggaataatcgcatcgagtatgagcccggcaccggcgccttggccgtgtttcctaacattcacctcgaaacatgtgatgaacctgtggcctctgtgcaggcgaccgtggaattggagacctcccacattggaaagggctgcgaccgggatacctatagtgaaaaaagccttcacagactttgtggcgctgccgccggcactgccgagctcttgccttcccccagtggttccctgaattggacaatgggcctgcccacggataatggacacgattcggatcaggtgttcgagtttaacggcacccaggcagtaagaatccccgatggagtagtcagtgtttccccaaaagaacctttcacaatttccgtttggatgcgtcacgggccgttcgggcgcaaaaaggaaaccatcctgtgcagcagtgataagaccgacatgaataggcatcattactcactttacgtccacggctgccgactcatttttttatttcgacaggacccttctgaggaaaagaaatacagacccgccgagtttcactggaagctgaaccaggtctgcgacgaagaatggcaccactacgtcttgaatgttgaattcccatccgtcaccttatacgttgacggtacttctcatgagcccttttccgttaccgaggactatcccctgcaccctagcaagatcgaaacgcagttagtggttggggcatgctggcagggaggtgacttacacatgacacaattcttccgggggaatctggcgggcctgaccctgaggagtggcaaactagcagacaagaaggtcatcgattgcctctatacttgtaaagaaggcctagatcttcaagtgcttgaagattcaggaaggggtgtgcagattcaggcccacccatctcaacttgtcttgactctcgagggggaagatttgggtgaattggacaaagcaatgcaacacatctcgtatttgaacagcagacaatttcctacaccaggaattcggcggttgaagattacctccacaattaagtgctttaacgaagctacatgcattagtgtgcctcccgtcgatggctatgtgatggtgttgcagccggaggagccaaaaatctctcttagtggagtccaccactttgccagagccgcgtctgagttcgaatcgtctgaaggcgtgtttttgttcccagaactgcgtatcatcagcacaataacccgcgaggttgaaccagagggggacggggccgaagatcctacagtccaagaatccctagtgtcagaagaaatcgttcatgatctggatacatgcgaagttaccgtggaaggcgaagaactcaatcatgaacaagagagtcttgaggtagatatggcgagactacaacaaaagggtatagaagtcagttcctccgaattgggcatgacattcacaggggtcgacacaatggcttcatacgaggaagtcttacatctgctgcggtatagaaactggcatgctagaagcctgctcgaccgaaaattcaagcttatctgtagcgaactcaatggccggtacatatcaaacgaattcaaggttgaggttaatgtcatacatactgctaatcccatggagcatgccaaccacatggccgctcagcctcagttcgtccacccggaacatagatccttcgtcgacctgtctgggcacaacttagccaacccgcacccatttgcagtcgtcccttctacagcaactgttgtcatagtggtatgtgtgagctttttggtatttatgattatactcggagtctttcggattagagccgcccacaggcgcacgatgcgcgatcaggatacaggaaaggaaaatgagatggactgggacgattcagccctgacgatcacagttaaccctatggagacttatgaggatcagcatagcagcgaggaagaagaagaggaggaagaagaagaggaaagtgaggacggagaggaggaggacgatatcacctctgctgagagtgagtctagcgaggaagaagagggggagcaaggtgacccacagaatgccacaagacaacaacaactggaatgggatgatagcacattatcatactag

SEQ ID NO: 114650 - DNA, 3187 bp, Artificial Sequence
  derived and/or modified sequence
atcttagttgctgccgctcccgccccgggctggcgatgctgcgccgccccgctcccgcgctggccccggccgcccggctgctgctggccgggctgctgtgcggcggcggggtctgggccgcgcgagttaacaagcacaagccctggctggagcccacctaccacggcatagtcacagagaacgacaacaccgtgctcctcgaccccccactgatcgcgctggataaagatgcgcctctgcgatttgcagagagttttgaggtgacagtcaccaaagaaggtgagatttgtggatttaaaattcacgggcagaatgtcccctttgatgcagtggtagtggataaatccactggtgagggagtcattcgctccaaagagaaactggactgtgagctgcagaaagactattcattcaccatccaggcctatgattgtgggaagggacctgatggcaccaacgtgaaaaagtctcataaagcaactgttcatattcaggtgaacgacgtgaatgagtacgcgcccgtgttcaaggagaagtcctacaaagccacggtcatcgaggggaagcagtacgacagcattttgagggtggaggccgtggatgccgactgctcccctcagttcagccagatttgcagctacgaaatcatcactccagacgtgccctttactgttgacaaagatggttatataaaaaacacagagaaattaaactacgggaaagaacatcaatataagctgaccgtcactgcctatgactgtgggaagaaaagagccacagaagatgttttggtgaagatcagcattaagcccacctgcacccctgggtggcaaggatggaacaacaggattgagtatgagccgggcaccggcgcgttggccgtctttccaaatatccacctggagacatgtgacgagccagtcgcctcagtacaggccacagtggagctagaaaccagccacatagggaaaggctgcgaccgagacacctactcagagaagtccctccaccggctctgtggtgcggccgcgggcactgccgagctgctgccatccccgagtggatccctcaactggaccatgggcctgcccaccgacaatggccacgacagcgaccaggtgtttgagttcaacggcacccaggcagtgaggatcccggatggcgtcgtgtcggtcagccccaaagagccgttcaccatctcggtgtggatgagacatgggccattcggcaggaagaaggagacaattctttgcagttctgataaaacagatatgaatcggcaccactactccctctatgtccacgggtgccggctgatcttcctcttccgtcaggatccttctgaggagaagaaatacagacctgcagagttccactggaagttgaatcaggtctgtgatgaggaatggcaccactacgtcctcaatgtagaattcccgagtgtgactctctatgtggatggcacgtcccacgagcccttctctgtgactgaggattacccgctccatccatccaagatagaaactcagctcgtggtgggggcttgctggcaaggtggcgacctgcacatgacccagtttttccgaggcaatctggctggcttaactctccgttccgggaaactcgcggataagaaggtgatcgactgtctgtatacctgcaaggaggggctggacctgcaggtcctcgaagacagtggcagaggcgtgcagatccaagcacaccccagccagttggtattgaccttggagggagaagacctcggggaattggataaggccatgcagcacatctcgtacctgaactcccggcagttccccacgcccggaattcgcagactcaaaatcaccagcacaatcaagtgttttaacgaggccacctgcatttcggtccccccggtagatggctacgtgatggttttacagcccgaggagcccaagatcagcctgagtggcgtccaccattttgcccgagcagcttctgaatttgaaagctcagaaggggtgttccttttccctgagcttcgcatcatcagcaccatcacgagagaagtggagcctgaaggggacggggctgaggaccccacagttcaagaatcactggtgtccgaggagatcgtgcacgacctggatacctgtgaggtcacggtggagggagaggagctgaaccacgagcaggagagcctggaggtggacatggcccgcctgcagcagaagggcattgaagtgagcagctctgaactgggcatgaccttcacaggcgtggacaccatggccagctacgaggaggttttgcacctgctgcgctatcggaactggcatgccaggtccttgcttgaccggaagtttaagctcatctgctcagagctgaatggccgctacatcagcaacgaatttaaggtggaggtgaatgtaatccacacggccaaccccatggaacacgccaaccacatggctgcccagccacagttcgtgcacccggaacaccgctcctttgttgacctgtcaggccacaacctggccaacccccacccgttcgcagtcgtccccagcactgcgacagttgtgatcgtggtgtgcgtcagcttcctggtgttcatgattatcctgggggtatttcggatccgggccgcacatcggcggaccatgcgggatcaggacaccgggaaggagaacgagatggactgggacgactctgccctgaccatcaccgtcaaccccatggagacctatgaggaccagcacagcagtgaggaggaggaggaagaggaagaggaagaggaaagcgaggacggcgaagaagaggatgacatcaccagcgccgagtcggagagcagcgaggaggaggagggggagcagggcgacccccagaacgcaacccggcagcagcagctggagtgggatgactccaccctcagctactgacccgtgcccccggccacctcggtttctgctttcgaagactctgctgccatccgttctcccagtcccaagggtccacgatgtacaaagtcatttcggccagtaggtgtgcagacccctccccgccacgatcgtcgctgtgcttggtgtgtaggaccctaggctccccgcccaccctctgcctggtcgcgctcttcagtcccacgaggagctgacacgtcctctctggccgccatccggctcgcacaggggcctcccagcgcctc

SEQ ID NO: 114651 - DNA, 2889 bp, Artificial Sequence
  derived and/or modified sequence
atgctgagaagacccgcccccgccctggcccccgccgccagactgctgctggccggcctgctgtgcggcggcggcgtgtgggccgccagagtgaacaagcacaagccctggctggagcccacctaccacggcatcgtgaccgagaacgacaacaccgtgctgctggacccccccctgatcgccctggacaaggacgcccccctgagattcgccgagagcttcgaggtgaccgtgaccaaggagggcgagatctgcggcttcaagatccacggccagaacgtgcccttcgacgccgtggtggtggacaagagcaccggcgagggcgtgatcagaagcaaggagaagctggactgcgagctgcagaaggactacagcttcaccatccaggcctacgactgcggcaagggccccgacggcaccaacgtgaagaagagccacaaggccaccgtgcacatccaggtgaacgacgtgaacgagtacgcccccgtgttcaaggagaagagctacaaggccaccgtgatcgagggcaagcagtacgacagcatcctgagagtggaggccgtggacgccgactgcagcccccagttcagccagatctgcagctacgagatcatcacccccgacgtgcccttcaccgtggacaaggacggctacatcaagaacaccgagaagctgaactacggcaaggagcaccagtacaagctgaccgtgaccgcctacgactgcggcaagaagagagccaccgaggacgtgctggtgaagatcagcatcaagcccacctgcacccccggctggcagggctggaacaacagaatcgagtacgagcccggcaccggcgccctggccgtgttccccaacatccacctggagacctgcgacgagcccgtggccagcgtgcaggccaccgtggagctggagaccagccacatcggcaagggctgcgacagagacacctacagcgagaagagcctgcacagactgtgcggcgccgccgccggcaccgccgagctgctgcccagccccagcggcagcctgaactggaccatgggcctgcccaccgacaacggccacgacagcgaccaggtgttcgagttcaacggcacccaggccgtgagaatccccgacggcgtggtgagcgtgagccccaaggagcccttcaccatcagcgtgtggatgagacacggccccttcggcagaaagaaggagaccatcctgtgcagcagcgacaagaccgacatgaacagacaccactacagcctgtacgtgcacggctgcagactgatcttcctgttcagacaggaccccagcgaggagaagaagtacagacccgccgagttccactggaagctgaaccaggtgtgcgacgaggagtggcaccactacgtgctgaacgtggagttccccagcgtgaccctgtacgtggacggcaccagccacgagcccttcagcgtgaccgaggactaccccctgcaccccagcaagatcgagacccagctggtggtgggcgcctgctggcagggcggcgacctgcacatgacccagttcttcagaggcaacctggccggcctgaccctgagaagcggcaagctggccgacaagaaggtgatcgactgcctgtacacctgcaaggagggcctggacctgcaggtgctggaggacagcggcagaggcgtgcagatccaggcccaccccagccagctggtgctgaccctggagggcgaggacctgggcgagctggacaaggccatgcagcacatcagctacctgaacagcagacagttccccacccccggcatcagaagactgaagatcaccagcaccatcaagtgcttcaacgaggccacctgcatcagcgtgccccccgtggacggctacgtgatggtgctgcagcccgaggagcccaagatcagcctgagcggcgtgcaccacttcgccagagccgccagcgagttcgagagcagcgagggcgtgttcctgttccccgagctgagaatcatcagcaccatcaccagagaggtggagcccgagggcgacggcgccgaggaccccaccgtgcaggagagcctggtgagcgaggagatcgtgcacgacctggacacctgcgaggtgaccgtggagggcgaggagctgaaccacgagcaggagagcctggaggtggacatggccagactgcagcagaagggcatcgaggtgagcagcagcgagctgggcatgaccttcaccggcgtggacaccatggccagctacgaggaggtgctgcacctgctgagatacagaaactggcacgccagaagcctgctggacagaaagttcaagctgatctgcagcgagctgaacggcagatacatcagcaacgagttcaaggtggaggtgaacgtgatccacaccgccaaccccatggagcacgccaaccacatggccgcccagccccagttcgtgcaccccgagcacagaagcttcgtggacctgagcggccacaacctggccaacccccaccccttcgccgtggtgcccagcaccgccaccgtggtgatcgtggtgtgcgtgagcttcctggtgttcatgatcatcctgggcgtgttcagaatcagagccgcccacagaagaaccatgagagaccaggacaccggcaaggagaacgagatggactgggacgacagcgccctgaccatcaccgtgaaccccatggagacctacgaggaccagcacagcagcgaggaggaggaggaggaggaggaggaggaggagagcgaggacggcgaggaggaggacgacatcaccagcgccgagagcgagagcagcgaggaggaggagggcgagcagggcgacccccagaacgccaccagacagcagcagctggagtgggacgacagcaccctgagctactag

SEQ ID NO: 114652 - DNA, 2349 bp, Artificial Sequence
  derived and/or modified sequence
agcatcctgagagtggaggccgtggacgccgactgcagcccccagttcagccagatctgcagctacgagatcatcacccccgacgtgcccttcaccgtggacaaggacggctacatcaagaacaccgagaagctgaactacggcaaggagcaccagtacaagctgaccgtgaccgcctacgactgcggcaagaagagagccaccgaggacgtgctggtgaagatcagcatcaagcccacctgcacccccggctggcagggctggaacaacagaatcgagtacgagcccggcaccggcgccctggccgtgttccccaacatccacctggagacctgcgacgagcccgtggccagcgtgcaggccaccgtggagctggagaccagccacatcggcaagggctgcgacagagacacctacagcgagaagagcctgcacagactgtgcggcgccgccgccggcaccgccgagctgctgcccagccccagcggcagcctgaactggaccatgggcctgcccaccgacaacggccacgacagcgaccaggtgttcgagttcaacggcacccaggccgtgagaatccccgacggcgtggtgagcgtgagccccaaggagcccttcaccatcagcgtgtggatgagacacggccccttcggcagaaagaaggagaccatcctgtgcagcagcgacaagaccgacatgaacagacaccactacagcctgtacgtgcacggctgcagactgatcttcctgttcagacaggaccccagcgaggagaagaagtacagacccgccgagttccactggaagctgaaccaggtgtgcgacgaggagtggcaccactacgtgctgaacgtggagttccccagcgtgaccctgtacgtggacggcaccagccacgagcccttcagcgtgaccgaggactaccccctgcaccccagcaagatcgagacccagctggtggtgggcgcctgctggcagggcggcgacctgcacatgacccagttcttcagaggcaacctggccggcctgaccctgagaagcggcaagctggccgacaagaaggtgatcgactgcctgtacacctgcaaggagggcctggacctgcaggtgctggaggacagcggcagaggcgtgcagatccaggcccaccccagccagctggtgctgaccctggagggcgaggacctgggcgagctggacaaggccatgcagcacatcagctacctgaacagcagacagttccccacccccggcatcagaagactgaagatcaccagcaccatcaagtgcttcaacgaggccacctgcatcagcgtgccccccgtggacggctacgtgatggtgctgcagcccgaggagcccaagatcagcctgagcggcgtgcaccacttcgccagagccgccagcgagttcgagagcagcgagggcgtgttcctgttccccgagctgagaatcatcagcaccatcaccagagaggtggagcccgagggcgacggcgccgaggaccccaccgtgcaggagagcctggtgagcgaggagatcgtgcacgacctggacacctgcgaggtgaccgtggagggcgaggagctgaaccacgagcaggagagcctggaggtggacatggccagactgcagcagaagggcatcgaggtgagcagcagcgagctgggcatgaccttcaccggcgtggacaccatggccagctacgaggaggtgctgcacctgctgagatacagaaactggcacgccagaagcctgctggacagaaagttcaagctgatctgcagcgagctgaacggcagatacatcagcaacgagttcaaggtggaggtgaacgtgatccacaccgccaaccccatggagcacgccaaccacatggccgcccagccccagttcgtgcaccccgagcacagaagcttcgtggacctgagcggccacaacctggccaacccccaccccttcgccgtggtgcccagcaccgccaccgtggtgatcgtggtgtgcgtgagcttcctggtgttcatgatcatcctgggcgtgttcagaatcagagccgcccacagaagaaccatgagagaccaggacaccggcaaggagaacgagatggactgggacgacagcgccctgaccatcaccgtgaaccccatggagacctacgaggaccagcacagcagcgaggaggaggaggaggaggaggaggaggaggagagcgaggacggcgaggaggaggacgacatcaccagcgccgagagcgagagcagcgaggaggaggagggcgagcagggcgacccccagaacgccaccagacagcagcagctggagtgggacgacagcaccctgagctactag

SEQ ID NO: 114653 - DNA, 2889 bp, Artificial Sequence
  derived and/or modified sequence
atgctgcggcgtcctgctccggccctcgcgcccgccgcgcggctactcctggctgggctgctgtgcggcggcggtgtatgggctgcaagagtgaataagcataaaccctggttagagcctacctatcacggtattgtaacggaaaatgacaatacagtgctcctcgacccccccctgatcgcactggacaaagatgcccctctaaggttcgccgagagcttcgaagtcaccgtgactaaagaaggagagatttgcggcttcaagatccatgggcaaaatgtgccgtttgatgccgtggtcgtcgacaagtcgaccggagaaggagtcatccgtagcaaagagaaactggattgcgagctgcaaaaggactactcattcacaatccaggcttatgactgtggcaaaggccccgacggtaccaatgttaagaagagtcacaaggctaccgtccatattcaggttaacgatgtcaacgagtatgcacccgtttttaaagaaaagagctacaaagccacagttatagagggcaagcagtacgacagtatcctccgggttgaagcagtggatgctgattgtagccctcagttttcccagatctgttcctacgagattatcactcctgatgtccctttcacagtggataaagacggatatatcaaaaacaccgagaaattgaactatggaaaagaacaccagtataagctgaccgtcaccgcgtacgactgcggaaagaaacgcgcgactgaagacgtgctggttaagatcagtattaaacctacgtgcactcccggatggcagggctggaacaacagaatcgagtatgaacccggaaccggcgccttagccgtatttcctaatatccacttggaaacctgcgacgagccagtggcatctgtgcaagctacagtggagctggagacatctcacatcggtaagggctgtgatcgtgacacatatagcgagaagtcacttcatcgcttatgtggcgccgctgccgggactgctgaactcttgccatcaccatccggttccctcaattggaccatgggcttgcctactgacaatggacatgactcagatcaggtcttcgagttcaatggtacccaggcagtccgtattcccgatggggtggtgagcgttagcccaaaggagcccttcacaatctctgtgtggatgcgccacgggccatttgggcgcaagaaagagacgattctctgttcctctgacaaaaccgacatgaacagacaccactacagcctgtacgttcacggctgcagactgatcttcctgttcagacaggatccttctgaagagaagaagtacagaccggcggagttccactggaaattaaaccaggtctgtgacgaagaatggcaccactatgtgcttaatgtggaattccccagcgtgaccctctacgtggatggtaccagccatgagcccttctccgtgacagaagactaccccttacacccatctaagatcgaaactcagctggtggtgggcgcgtgctggcaaggaggagacctgcacatgacacagtttttccggggtaacctggccggtctgacactgcggtctgggaagctggcagataaaaaagtgatcgattgtctgtatacttgcaaggaaggcctcgatctgcaggtcctcgaagactcaggtcggggggtgcagattcaggctcaccctagccaactggtgcttacgctcgagggagaggatttgggtgaattggataaagccatgcagcacattagctacctgaactcccgacaattccctacaccaggcatcagacgcctgaaaattacatcaacaattaaatgtttcaatgaggccacgtgtatttccgtgccaccagtggatggttacgtgatggtgctgcagcccgaggaaccgaaaatctccctgtcaggcgtacaccatttcgcccgggctgctagcgagtttgagtcatcagagggcgtgttcctcttccctgagctgagaatcatctcaacaattacaagggaggttgaacctgagggcgacggggccgaagatccgacagtccaggagtccctggtcagtgaggagatcgtgcatgatctggacacctgcgaggtgaccgtcgaaggggaagagctcaaccacgaacaggagtctcttgaggtcgatatggcccggcttcagcaaaagggcatcgaggtaagcagtagcgaactggggatgaccttcaccggggtggacaccatggcttcatacgaagaggtcctgcacctgctcagatatcggaactggcacgcgaggagcttgctagacagaaagtttaagctgatctgctcagagctaaacgggcgctatattagcaatgagttcaaggtggaagtcaatgttatacataccgcgaatcccatggagcacgccaaccacatggccgcccagccccagttcgtgcatccagaacatagaagctttgtcgacctctccggccacaacctcgccaaccctcatccttttgccgtggttccttctacggcaaccgttgttattgtagtttgcgtgtcattcctggtattcatgataattttaggagtgtttagaattcgagccgctcatcgcagaacgatgcgcgaccaggacacaggtaaggaaaacgaaatggactgggatgactccgccctcactatcacagtcaatcccatggagacttacgaagaccaacattcctccgaggaggaagaagaggaggaagaggaggaggaaagcgaggatggggaagaggaggatgatataacaagtgccgaaagcgagtcctccgaggaagaagagggggagcagggagaccctcaaaatgcaactcgtcagcaacagctggagtgggatgatagtaccttgtcttactag

SEQ ID NO: 114654 - DNA, 2349 bp, Artificial Sequence
  derived and/or modified sequence
agcatcctgcgcgtcgaggccgtcgacgccgactgcagcccacaatttagccaaatctgtagctatgaaatcataacaccggatgtgccattcactgtggataaggatggctacatcaagaacaccgaaaaacttaattatggcaaggagcatcagtacaagctcacagtcaccgcttacgattgcgggaagaaacgtgccaccgaggacgtcctcgtcaaaatctcaatcaagccaacatgtacacccggctggcaaggttggaataaccgaatcgagtacgagccaggaactggggccctggccgttttccccaacattcatctagagacttgcgatgagccggtagcctctgtacaagcaacagtggagctggagacaagccatatcggcaaagggtgtgacagagatacatactctgagaaatctttacatcggctctgcggcgcagccgctggtaccgctgaactcctgccaagtccttcaggcagtctgaactggacgatgggattgcctaccgacaacgggcacgatagcgaccaagtctttgaattcaatggcacgcaggcagttcgcatccctgatggcgtggttagcgttagcccaaaagaaccgttcacaatcagcgtttggatgaggcacggaccctttggcaggaagaaggagaccatattatgctcctctgataagaccgacatgaaccggcaccattatagcctttacgttcatggctgtaggttgatttttctgttcaggcaggacccgtcagaagagaagaagtacaggcctgcagaatttcactggaagctgaaccaggtgtgtgatgaggaatggcatcactatgtactgaatgtggaattcccatccgtaacgctgtatgtcgacgggacctcccatgaacctttcagcgtcaccgaggattacccccttcacccatcaaagatagaaacacagcttgtagtaggagcatgttggcagggaggagacttacatatgacccagttcttccggggaaacctcgcaggtctgactctgaggtctggcaagctggcagacaaaaaagtaatagattgtctttatacatgcaaagaaggcctcgatttacaggtcttggaggatagcggacgaggggtgcagattcaggcccatccctcgcagttggtactgacccttgaaggagaggatttaggcgaactcgataaggccatgcagcacatcagctatcttaattcaagacagttccctacgccagggatccggcggctgaaaattacctctaccattaaatgcttcaatgaagcaacctgtataagcgtgccacccgtagatggatacgtcatggtgctccagcctgaggaacctaaaatatctctttcaggggtgcatcatttcgcacgtgcagctagtgaatttgaatcctcagagggcgtttttcttttcccagaactgcgaataatatcaaccattacacgggaggtggagccagagggtgatggtgccgaggatcctactgtgcaagagtccctggtgtcagaggaaattgttcacgacctcgatacctgtgaagtcactgtggagggggaggagcttaaccacgagcaggaatcactggaagtagatatggcccgcctgcagcagaaaggcattgaagtgagctcatccgaacttggaatgacctttacaggcgtggacacaatggcctcctatgaggaagtgcttcacctgctgagatataggaattggcatgccaggagcctgctggatagaaagttcaaattgatttgttccgaattaaatggcaggtacatttctaacgaattcaaagtcgaggttaacgtgatccataccgccaaccccatggagcatgcgaaccacatggctgcccaacctcagtttgttcacccggagcataggtcttttgtggacctgtcagggcacaatttggctaatcctcacccttttgctgtagtcccctcgacggccacagttgtgatcgttgtttgtgtgtcgttcctggtattcatgatcatcctgggcgtgttccggattcgtgctgctcataggaggaccatgcgagatcaggataccgggaaggagaatgaaatggattgggatgattcagctctgacaattaccgttaatccaatggagacctatgaggaccaacactctagcgaggaggaggaggaggaggaggaggaggaagagtccgaggatggagaagaagaggacgatatcacatccgctgagtcagagagttctgaagaggaagaaggtgaacagggggacccccagaacgcgacccgacagcagcagcttgagtgggacgacagtaccctgtcatactag

SEQ ID NO: 114655 - DNA, 2889 bp, Artificial Sequence
  derived and/or modified sequence
atgttacgccggccagcgcccgctctcgctcccgcggcccggctgctactggcagggctgctatgtggcgggggcgtgtgggccgccagagtcaataaacataagccttggctcgagcccacttaccacggtatcgttacggaaaacgacaataccgtgctgttggatccgccactcattgccctggataaagatgccccattaagattcgctgaatccttcgaggtaactgtcaccaaagaaggcgagatttgcggctttaagatccatggccagaatgtcccgttcgatgctgtggttgttgacaaatccactggtgaaggggtgattcgctccaaggagaaattggactgtgagttgcagaaggattactccttcactatacaggcctacgactgtggcaagggaccagatggaactaacgtgaaaaagagccacaaagcgactgttcacatacaggttaacgacgttaacgagtacgcgcccgtgttcaaagagaagagctataaagctactgtgatcgaaggaaagcagtatgacagtattctgcgtgtggaagccgtcgacgccgactgttccccccaatttagccagatttgcagttatgagataatcactccagatgtcccgttcactgttgacaaggatggatatatcaagaacaccgaaaagctgaattacggtaaagaacaccagtataagctaactgtcacggcatatgactgcggaaaaaagcgcgccacagaggacgttctagtgaagatctccatcaagccaacttgtactcccggctggcagggatggaataacagaattgagtatgagcccggaaccggtgctctggcagtcttccccaatattcacctcgaaacatgcgatgagccagttgcatctgttcaggctacagttgaactggagacatcacacatagggaaggggtgtgacagggatacttattcagagaagagccttcacagactgtgtggcgccgccgccggtaccgcagagctgctaccatccccaagtgggtcccttaactggaccatgggcctgcctacggataatggccacgactctgatcaggtgttcgaattcaacggaacacaggcagtgcgtatccctgacggtgtcgtctccgtgtctccaaaggaaccttttacaatcagcgtatggatgcgtcatggccccttcgggcgtaagaaagaaacaatactgtgctctagcgacaagactgacatgaaccggcaccactactcgctttacgttcacggctgcagactgatcttcttgttcaggcaggacccgagtgaggaaaaaaaatataggcctgcagagttccactggaagctgaaccaagtctgtgacgaagaatggcaccattacgtgctgaacgtcgagttcccgtccgtcactctgtatgtggacggcacctctcacgagccattctccgtgaccgaagactatcctctgcacccctcgaaaatagagacacagctcgtggtaggggcttgttggcagggtggtgacctgcatatgacacagttcttcagaggaaatttagccggactaacacttcgcagcggtaagctagccgataagaaagtcatcgattgtctgtatacttgcaaggaaggactcgatctgcaggtgctggaagactctggtaggggggtgcagattcaggcacatcctagtcagctagtcttgacactagaaggcgaagacttaggcgaactggataaggcaatgcagcatatttcttaccttaactcccgccagtttcccacccctggtattagaagactgaaaatcacctccacgattaagtgttttaatgaggcaacctgtatttccgttccccctgtggacggctacgtgatggtgctgcagcccgaggagcccaagattagtctttcgggcgtccatcactttgcaagggctgcttccgaattcgagagctcagagggtgtgttcctcttccccgagctgagaattatctcgaccattactagggaggtcgagcctgagggggacggtgcagaggatcctaccgtgcaggagagcctggtgagcgaggagattgtgcatgacctggacacttgtgaagtgaccgtggaaggcgaggagctgaaccacgagcaggagagcttggaggtggatatggcgcggctgcagcagaaaggtatcgaagtgtcatcctccgagctaggaatgacatttaccggcgtggacacaatggcctcttatgaggaagtactccatttacttcgttacaggaactggcatgctcgatccctcttggatagaaaatttaagctcatctgcagcgaactgaacggaaggtacatctccaatgaatttaaggtggaagtgaacgtcattcatactgccaatcccatggaacatgctaaccatatggctgcccagccccagttcgtgcaccctgagcacaggagctttgttgatctgtctggccataatctggctaacccacatccgtttgctgtggtaccttccacggctaccgttgtaatcgtagtgtgtgtaagctttctggtgtttatgataattctaggcgtgtttcgaattcgcgctgcccaccgtagaacaatgcgagatcaggacacaggtaaggaaaatgagatggactgggacgactccgcattaactatcacagtcaaccctatggaaacatacgaggaccaacattctagcgaggaagaagaggaagaagaagaggaagaggagagtgaggacggagaggaagaggatgatattacaagtgcggaatctgaaagctctgaggaggaggaaggagagcagggggatccacagaacgccactcgccaacaacagcttgaatgggatgacagcactctgagctactag

SEQ ID NO: 114656 - DNA, 2889 bp, Artificial Sequence
  derived and/or modified sequence
atgctgcggcggcctgccccagccctggccccagctgcccggctgctgctggccggcctgctgtgtggcggcggcgtgtgggccgcccgggtgaacaagcacaagccctggctggagcccacctaccatggaattgtgacagaaaatgacaacacagtgctgctggaccccccactcatcgccctggacaaggatgcccccctgcgctttgctgagagctttgaggtgacagtgaccaaggagggggagatctgtggcttcaagatccacggccagaatgtgccctttgatgctgtggtggtggacaagagcactggagagggcgtcatccgcagcaaggagaagctggactgtgagctgcagaaggactacagcttcaccatccaggcctatgactgtgggaaaggaccagatggcaccaacgtgaagaagagccacaaggccaccgtgcacatccaggtgaatgatgtgaatgaatatgcccctgtgttcaaggagaagagctacaaggccaccgtcatcgagggcaagcagtatgacagcatcctgcgggtggaggccgtggatgctgactgcagcccccagttcagccagatctgcagctatgagatcatcaccccagatgtgcccttcaccgtggacaaggatggctacatcaagaacacagagaagctgaactacggcaaggagcaccagtacaagctgactgtgacagcctatgactgtgggaagaagagggccacagaagatgtgctggtgaagatcagcatcaagcccacctgcaccccaggctggcagggctggaacaaccgcatcgagtatgagcccggcaccggggccctggccgtgttccccaacatccacctggagacctgtgatgagcctgtggcctctgtgcaggccaccgtggagctggagaccagccacatcggcaagggctgtgaccgggacacctacagcgagaagagcctgcaccggctgtgtggggctgctgctggaacagctgagctgctgcccagccccagcggcagcctgaactggaccatgggcctgcccacagacaatggacatgacagcgaccaggtgtttgagttcaacggcacccaggccgtgcgcatcccagatggagtggtgtctgtgagccccaaggagcccttcaccatctctgtgtggatgagacatggcccctttggaaggaagaaggagaccatcctgtgcagcagtgacaagacagacatgaacagacaccactacagcctgtatgtgcacggctgccgcctcatcttcctgttccggcaggaccccagcgaggagaagaagtacagacctgctgagttccactggaagctgaaccaggtgtgtgatgaggagtggcaccactacgtgctgaatgtggagttccccagcgtgaccctgtatgtggatggcaccagccatgagcccttctctgtgacagaggactaccccctgcaccccagcaagattgagacccagctggtggtgggcgcctgctggcagggcggggacctgcacatgacccagttcttccggggcaacctggccggcctgaccctgcggagcggcaagctggccgacaagaaggtgattgactgcctgtacacctgcaaggagggcctggacctgcaggtgctggaggacagcggccggggcgtgcagatccaggcccaccccagccagctggtgctgaccctggagggggaggacctgggggagctggacaaggccatgcagcacatctcctacctgaacagccggcagttccccaccccaggcatccggcggctgaagatcaccagcaccatcaagtgcttcaatgaggccacctgcatctctgtgccccctgtggatggctacgtgatggtgctgcagcctgaggagcccaagatcagcctgtctggagtgcaccactttgcccgggccgccagcgagtttgagagcagcgagggcgtcttcctgtttcctgagctgcgcatcatcagcaccatcacccgggaggtggagccagaaggagatggagctgaggaccccaccgtgcaggagagcctggtgtctgaggagatcgtgcatgacctggacacctgtgaggtgacagtggagggggaggagctgaaccacgagcaggagagcctggaggtggacatggcccggctgcagcagaagggcatcgaggtgagcagcagcgagctgggcatgaccttcaccggggtggacaccatggccagctatgaggaggtgctgcacctgctgcgctacagaaactggcacgcccggagcctgctggacaggaagttcaagctgatctgcagcgagctgaatggccgctacatcagcaatgagttcaaggtggaggtgaatgtcatccacacagccaaccccatggagcacgccaaccacatggccgcccagccccagtttgtgcaccctgagcacaggagctttgtggacctgagcggccacaacctggccaacccccacccctttgctgtggtgcccagcacagccaccgtggtgattgtggtgtgtgtgtccttcctggtgttcatgatcatcctgggcgtcttccgcatccgggccgcccacaggaggaccatgagggaccaggacaccgggaaggaaaatgagatggactgggatgattctgccctgaccatcaccgtgaaccccatggagacctatgaggaccagcacagcagcgaggaggaggaggaggaggaggaggaggaggagagtgaagatggagaggaggaggatgacatcaccagcgctgagagcgagagcagcgaggaggaggagggggagcagggcgacccccagaatgccacccggcagcagcagctggagtgggatgacagcaccctgagctactag

SEQ ID NO: 114657 - DNA, 2349 bp, Artificial Sequence
  derived and/or modified sequence
tccatcctgcgggtggaggccgtggatgctgactgcagcccccagttcagccagatctgcagctatgagatcatcaccccagatgtgcccttcaccgtggacaaggatggctacatcaagaacacagagaagctgaactacggcaaggagcaccagtacaagctgactgtgacagcctatgactgtgggaagaagagggccacagaagatgtgctggtgaagatcagcatcaagcccacctgcaccccaggctggcagggctggaacaaccgcatcgagtatgagcccggcaccggggccctggccgtgttccccaacatccacctggagacctgtgatgagcctgtggcctctgtgcaggccaccgtggagctggagaccagccacatcggcaagggctgtgaccgggacacctacagcgagaagagcctgcaccggctgtgtggggctgctgctggaacagctgagctgctgcccagccccagcggcagcctgaactggaccatgggcctgcccacagacaatggacatgacagcgaccaggtgtttgagttcaacggcacccaggccgtgcgcatcccagatggagtggtgtctgtgagccccaaggagcccttcaccatctctgtgtggatgagacatggcccctttggaaggaagaaggagaccatcctgtgcagcagtgacaagacagacatgaacagacaccactacagcctgtatgtgcacggctgccgcctcatcttcctgttccggcaggaccccagcgaggagaagaagtacagacctgctgagttccactggaagctgaaccaggtgtgtgatgaggagtggcaccactacgtgctgaatgtggagttccccagcgtgaccctgtatgtggatggcaccagccatgagcccttctctgtgacagaggactaccccctgcaccccagcaagattgagacccagctggtggtgggcgcctgctggcagggcggggacctgcacatgacccagttcttccggggcaacctggccggcctgaccctgcggagcggcaagctggccgacaagaaggtgattgactgcctgtacacctgcaaggagggcctggacctgcaggtgctggaggacagcggccggggcgtgcagatccaggcccaccccagccagctggtgctgaccctggagggggaggacctgggggagctggacaaggccatgcagcacatctcctacctgaacagccggcagttccccaccccaggcatccggcggctgaagatcaccagcaccatcaagtgcttcaatgaggccacctgcatctctgtgccccctgtggatggctacgtgatggtgctgcagcctgaggagcccaagatcagcctgtctggagtgcaccactttgcccgggccgccagcgagtttgagagcagcgagggcgtcttcctgtttcctgagctgcgcatcatcagcaccatcacccgggaggtggagccagaaggagatggagctgaggaccccaccgtgcaggagagcctggtgtctgaggagatcgtgcatgacctggacacctgtgaggtgacagtggagggggaggagctgaaccacgagcaggagagcctggaggtggacatggcccggctgcagcagaagggcatcgaggtgagcagcagcgagctgggcatgaccttcaccggggtggacaccatggccagctatgaggaggtgctgcacctgctgcgctacagaaactggcacgcccggagcctgctggacaggaagttcaagctgatctgcagcgagctgaatggccgctacatcagcaatgagttcaaggtggaggtgaatgtcatccacacagccaaccccatggagcacgccaaccacatggccgcccagccccagtttgtgcaccctgagcacaggagctttgtggacctgagcggccacaacctggccaacccccacccctttgctgtggtgcccagcacagccaccgtggtgattgtggtgtgtgtgtccttcctggtgttcatgatcatcctgggcgtcttccgcatccgggccgcccacaggaggaccatgagggaccaggacaccgggaaggaaaatgagatggactgggatgattctgccctgaccatcaccgtgaaccccatggagacctatgaggaccagcacagcagcgaggaggaggaggaggaggaggaggaggaggagagtgaagatggagaggaggaggatgacatcaccagcgctgagagcgagagcagcgaggaggaggagggggagcagggcgacccccagaatgccacccggcagcagcagctggagtgggatgacagcaccctgagctactag

SEQ ID NO: 114658 - DNA, 5162 bp, Artificial Sequence
  derived and/or modified sequence
gtctcctggaccccctttcgtgacccctctcaacacctctactggggagacgaggaccccgaggttctggggggcgacgcgacctgcccgaagtgacaagggtcctgggccgcactgctccgccggggtctgcgctcctcggcggagcgggtgggaaggatgagtcctcggggtggagaaggaggagcgggtccccgggtaccgctcacccggccttaggagcccgggagcgcgcgtagggacgcggagttgaggctctccatctgcggccagggaaagggatacagtcccccgggcccctcccggccgctcggaacccaccccaggcgcgtccccgcgggcgcgcgctccaggcggggccgacgggctcggaggcgcgcgcccgctgccgggtccgccgcgcgcgctccctccgctcctctcccccgcccctcccgggcccgcgcgctcccagggtccgccgcgcgcgcgcctcgcgtcgctccccatccccgcccctcccgccgccaccccgcccccggccgggtaccctcgccggacccgagagagagcgccgccgccatcttagttgctgccgctgccttcagcaagacgctgctctgaggcggggagggcgccgcgtcctgagcgcgcggcccagcgtcacggcggcggcggcggcggctcctccttggacccccggagctccccgcgccgcggagcagctagccccaggcccctagagccccgagagctccgagagctccgctcggcgtcccgcgcgcctccctgccgctcccgccccgggctggcgatgctgcgccgccccgctcccgcgctggccccggccgcccggctgctgctggccgggctgctgtgcggcggcggggtctgggccgcgcgagttaacaagcacaagccctggctggagcccacctaccacggcatagtcacagagaacgacaacaccgtgctcctcgaccccccactgatcgcgctggataaagatgcgcctctgcgatttgcagagagttttgaggtgacagtcaccaaagaaggtgagatttgtggatttaaaattcacgggcagaatgtcccctttgatgcagtggtagtggataaatccactggtgagggagtcattcgctccaaagagaaactggactgtgagctgcagaaagactattcattcaccatccaggcctatgattgtgggaagggacctgatggcaccaacgtgaaaaagtctcataaagcaactgttcatattcaggtgaacgacgtgaatgagtacgcgcccgtgttcaaggagaagtcctacaaagccacggtcatcgaggggaagcagtacgacagcattttgagggtggaggccgtggatgccgactgctcccctcagttcagccagatttgcagctacgaaatcatcactccagacgtgccctttactgttgacaaagatggttatataaaaaacacagagaaattaaactacgggaaagaacatcaatataagctgaccgtcactgcctatgactgtgggaagaaaagagccacagaagatgttttggtgaagatcagcattaagcccacctgcacccctgggtggcaaggatggaacaacaggattgagtatgagccgggcaccggcgcgttggccgtctttccaaatatccacctggagacatgtgacgagccagtcgcctcagtacaggccacagtggagctagaaaccagccacatagggaaaggctgcgaccgagacacctactcagagaagtccctccaccggctctgtggtgcggccgcgggcactgccgagctgctgccatccccgagtggatccctcaactggaccatgggcctgcccaccgacaatggccacgacagcgaccaggtgtttgagttcaacggcacccaggcagtgaggatcccggatggcgtcgtgtcggtcagccccaaagagccgttcaccatctcggtgtggatgagacatgggccattcggcaggaagaaggagacaattctttgcagttctgataaaacagatatgaatcggcaccactactccctctatgtccacgggtgccggctgatcttcctcttccgtcaggatccttctgaggagaagaaatacagacctgcagagttccactggaagttgaatcaggtctgtgatgaggaatggcaccactacgtcctcaatgtagaattcccgagtgtgactctctatgtggatggcacgtcccacgagcccttctctgtgactgaggattacccgctccatccatccaagatagaaactcagctcgtggtgggggcttgctggcaaggtggcgacctgcacatgacccagtttttccgaggcaatctggctggcttaactctccgttccgggaaactcgcggataagaaggtgatcgactgtctgtatacctgcaaggaggggctggacctgcaggtcctcgaagacagtggcagaggcgtgcagatccaagcacaccccagccagttggtattgaccttggagggagaagacctcggggaattggataaggccatgcagcacatctcgtacctgaactcccggcagttccccacgcccggaattcgcagactcaaaatcaccagcacaatcaagtgttttaacgaggccacctgcatttcggtccccccggtagatggctacgtgatggttttacagcccgaggagcccaagatcagcctgagtggcgtccaccattttgcccgagcagcttctgaatttgaaagctcagaaggggtgttccttttccctgagcttcgcatcatcagcaccatcacgagagaagtggagcctgaaggggacggggctgaggaccccacagttcaagaatcactggtgtccgaggagatcgtgcacgacctggatacctgtgaggtcacggtggagggagaggagctgaaccacgagcaggagagcctggaggtggacatggcccgcctgcagcagaagggcattgaagtgagcagctctgaactgggcatgaccttcacaggcgtggacaccatggccagctacgaggaggttttgcacctgctgcgctatcggaactggcatgccaggtccttgcttgaccggaagtttaagctcatctgctcagagctgaatggccgctacatcagcaacgaatttaaggtggaggtgaatgtaatccacacggccaaccccatggaacacgccaaccacatggctgcccagccacagttcgtgcacccggaacaccgctcctttgttgacctgtcaggccacaacctggccaacccccacccgttcgcagtcgtccccagcactgcgacagttgtgatcgtggtgtgcgtcagcttcctggtgttcatgattatcctgggggtatttcggatccgggccgcacatcggcggaccatgcgggatcaggacaccgggaaggagaacgagatggactgggacgactctgccctgaccatcaccgtcaaccccatggagacctatgaggaccagcacagcagtgaggaggaggaggaagaggaagaggaagaggaaagcgaggacggcgaagaagaggatgacatcaccagcgccgagtcggagagcagcgaggaggaggagggggagcagggcgacccccagaacgcaacccggcagcagcagctggagtgggatgactccaccctcagctactgacccgtgcccccggccacctcggtttctgctttcgaagactctgctgccatccgttctcccagtcccaagggtccacgatgtacaaagtcatttcggccagtaggtgtgcagacccctccccgccacgatcgtcgctgtgcttggtgtgtaggaccctaggctccccgcccaccctctgcctggtcgcgctcttcagtcccacgaggagctgacacgtcctctctggccgccatccggctcgcacaggggcctcccagcgcctcaggccccgcgtttgtgtctggagtctccccccggggagaggacactggcccctcgcactccagaaaagccatgccagctgggctcgttgacaaagggtaaaacatgctcactcccacccggtaatcatttttttctttttttaaaaaaagtttttattttttccaaactagtgcatgtataaataatggcaggatggggggtactgtgtagatgattaactgactttttaatattttgtaaataaatcggattccttgtgtcctttgtgctagtgtaacccgggactggaatgtaaagtgaagttcggagctctgagcacgggctcttcccgccgggtcctccctccccagaccccagagggagaggcccaccccgcccagccccgccccagcccctgctcaggtctgagtatggctgggagtcgggggccacaggcctctagctgtgctgctcaagagactggatcagggtagctacaagtggccgggccttgcctttgggattctacctgttcctaatttggtgtggggtgcggggtccctggccccttttccacactcctcctccgacagcagctccctgggcagtggcctggtctcaccgtgtgcagccttgtggtttatgcttaaatgtacattttcctgctggtaaaaggagaaactgagaggtgtcctgcagaccggctgaccactccttttggagacggcaggaggcctgagcgatccgtactcagaacgtccaggagagacgcatggcccgaagtcaaagtgctggaattttccaaaacagcctgttctctcctctctcctccccagagcaccccctgccatcaggggggttgaaatccctctcccccaggagccctgctgctttgcttggtggtagggcaggagagcaaacaaacagtcatggtctaaaacccacatagcactttgctcttagttacatgtaaaattttagatttctaaaacaggtgggcaatcattttgaatactgttctgtgaccctgactgctagttctgaggacactggtggctgtgctatgtgtggccatcctccatgtcccgtccctgtagctgctctgtttagacagcggacagacgctcacgcccaggggatgtcctcacgctgtcgccgcgcggtttcccttcgcagatgtgtatactcatgataggtcagaaagtgtatccgctacaataaagttctggttctaact

SEQ ID NO: 114659 - DNA, 2889 bp, Artificial Sequence
  derived and/or modified sequence
atgctgcggcggcccgcccccgccctggcccccgccgcccggctgctgctggcaggtctgttatgcggcggaggcgtatgggccgctcgggtgaacaagcacaaaccctggctagaacccacgtaccatggcatagtgactgagaatgacaatacagtacttctggacccaccgctgatcgctctggacaaagacgctccgctccggttcgccgaaagcttcgaagtgacggttaccaaggagggagagatctgcgggtttaaaatccacggacaaaacgtgccgtttgacgcagtggtggtcgataagagcacaggagaaggcgttatacgctcaaaggaaaaattggactgtgagctacagaaggactactcatttactattcaagcctatgattgcgggaaaggacccgatggtacaaatgttaaaaagtcccataaggctaccgttcatatccaagtcaacgacgtcaatgagtacgctcccgtgttcaaagagaaatcctacaaggccacagtgatcgagggaaagcagtatgacagcatcctgcgcgttgaagctgtcgatgccgactgcagtccacagttttctcaaatctgctcatatgaaattattacacctgacgtcccatttacagttgacaaggatggctacatcaaaaatacggaaaaactgaactacgggaaggagcaccagtacaaacttaccgtgactgcttatgactgcggaaaaaaaagagctacagaggatgttctggtgaaaatcagcattaagcccacttgtacgccgggatggcagggttggaacaatagaatcgaatatgagcctggcacgggtgcccttgccgtctttcccaacatccatctggaaacttgtgatgaaccagttgcctcggtgcaggccacggtcgagttggagacatctcacattggaaaaggctgcgatcgggatacatactccgagaaaagcctgcatcgtctatgtggcgctgcagctggaacggcagagctgcttccatctccgagcggatcccttaactggacaatgggcctgcccacagataacggtcacgattccgatcaggtcttcgaatttaacggtactcaggccgtaaggattcccgacggggtcgtcagcgtctctccaaaggagcctttcactatctcggtctggatgcgccatggtccttttggccgaaagaaggagaccattctgtgctcatctgacaagactgacatgaaccggcaccactactccctgtacgttcatgggtgccggttgatttttcttttcaggcaagatccatccgaagaaaagaagtacagaccagcagaattccactggaagctgaatcaggtatgcgacgaagaatggcatcattacgttctgaacgtggagtttccttccgtgacactttatgtggatggcaccagccacgagcctttttccgtcaccgaggattatccactccacccctctaaaattgaaacacagctggtggttggtgcgtgctggcaaggaggcgacttacatatgacgcagttttttcgcggaaacctggcgggcctgactctgcggagtgggaagcttgcagataagaaggtgatcgactgcctgtacacctgtaaggaaggcctggacctgcaagttttagaggactctggtagaggggttcagattcaggcacatcccagtcagcttgtattgaccctggaaggggaggaccttggtgagttagataaagctatgcaacacatcagttacctcaatagtcgccaatttccgacgccgggcatcaggaggctgaaaattacaagtacgataaaatgcttcaacgaggcaacatgcattagcgtgcctcccgtcgatggctatgtcatggtgctgcagcctgaggagccaaagattagcttgagcggagttcatcattttgcacgtgctgcttctgaattcgagtcgagcgagggtgtgtttctgtttcctgaactccgcataattagtactattaccagagaggtggagcctgaaggagatggcgctgaggatcccactgtgcaggagagtttggtgtcagaggagattgttcatgatctggacacgtgtgaggtgactgtggaaggcgaggaactgaatcatgagcaggagtccctggaggtggacatggcacgactgcaacagaagggcatcgaagtcagctctagtgaactaggcatgactttcaccggcgtggacactatggcatcttacgaagaggtattgcacctccttaggtataggaattggcatgccaggtctttgttagatcggaaatttaaactgatttgcagtgaattaaacggcaggtatatatccaacgagttcaaagtcgaagttaatgtaatccatacagccaacccaatggaacacgctaaccacatggcagcacaaccgcagtttgtgcatcccgagcatagaagcttcgttgacttgtcagggcacaacctggccaatcctcatccttttgccgttgtcccatctacggctactgttgtcatcgtggtgtgtgtctccttcctggtgtttatgatcatccttggggtgttcagaattcgcgcagcgcacaggcggaccatgagggatcaagataccggaaaggaaaacgagatggactgggatgattcagctctgacgatcacagtgaaccccatggaaacttacgaggaccagcactccagtgaggaagaagaggaggaggaagaggaggaggagtcagaggatggggaagaggaggacgatatcacctctgctgagtccgaatcatcggaagaggaagagggcgagcaaggggacccacaaaacgccactcggcaacagcagctcgagtgggacgattctactctcagttattag

SEQ ID NO: 114660 - DNA, 2349 bp, Artificial Sequence
  derived and/or modified sequence
agcatcctgcgggtggaggccgtggacgccgactgcagcccccagtttagccagatctgttcttacgagataatcacgcctgacgtccccttcaccgtggataaggatggatacatcaaaaataccgaaaagttaaattatgggaaggaacatcagtacaagcttactgtgacagcatatgactgtggaaaaaagagggcgacagaagatgtactggtcaaaatcagcattaaacccacatgtacacctggatggcagggatggaataatcgcattgagtacgagcccgggaccggtgctttggctgtcttcccaaatatccatctggagacgtgtgatgaacccgtcgcatccgtgcaagccactgtagagctagagacctcgcacatcgggaaaggatgtgaccgcgacacttacagcgagaaatcactacatcgactgtgcggcgctgctgccggcacagccgaactcctcccctcaccatccgggtcactgaattggacaatggggctgcccacagataacggacatgactcagaccaagtgtttgaattcaacgggacacaggctgtgcggatacctgatggcgttgtgagtgtgtcaccaaaagaaccatttactatctcagtatggatgcggcacggccccttcggacggaaaaaggaaactatcctctgctcttccgacaaaacggacatgaataggcaccactacagtctgtacgtgcatggatgcaggttgatcttcttattccgccaagaccccagtgaagagaagaagtatagaccggctgaatttcattggaaactaaaccaggtgtgtgacgaggaatggcaccattatgtgctgaacgtagaatttccttctgtcacgctttatgttgacggaacctcccacgagccgttcagtgtgactgaagactaccccctgcatccatctaagattgagacccagctggtggtgggtgcctgctggcagggcggggacctgcacatgactcagttttttcggggcaatctggccggacttacattgcggtcgggaaagctggcagacaagaaagtgattgattgtttatacacctgcaaggaggggctggatctgcaggtgctcgaggatagcggcaggggcgtgcagattcaagcacacccttcacagctggtcctgacactcgagggggaggatttaggagaattggacaaagcaatgcaacacatttcttacctgaactccagacagttccccactcccgggatccggcggctcaagatcacttcgacaatcaaatgcttcaacgaagctacatgtatctccgtgcctcctgtagacggttacgtgatggtgcttcagcccgaagagccaaaaattagccttagcggcgtgcaccactttgctcgcgctgcttcagaatttgaatcttccgaaggagtgttcctgttcccagagctgcgcattatttctaccattacccgagaggtggaacccgaaggggacggggccgaggaccctaccgtgcaagaatctctcgtctccgaagaaatcgtacacgatctggacacctgcgaggtgacagtagagggcgaagagctgaaccacgagcaggaatctttagaggtagatatggcccggctccaacagaaagggatcgaggtgagcagttctgaactcggcatgacattcaccggtgtcgacaccatggcctcttacgaagaggtgctccatcttctgagatacagaaactggcatgccaggtctttactcgatagaaaatttaagctaatctgctctgagttgaacgggcgatacatctcaaatgagtttaaggtcgaggttaacgtgatccatactgccaaccccatggagcacgctaatcacatggcagcccagccccaatttgtgcatccggaacaccgctcctttgtcgacttatctggtcataatttagcaaatccccaccccttcgccgtggtgccctcgaccgcaacagtggtgatcgtcgtgtgcgttagctttctggtgtttatgatcattctgggcgtcttccgcatcagggcggctcataggagaacaatgagggatcaggacacaggcaaggagaatgagatggattgggatgattcagctctgacaattaccgtgaacccgatggaaacctatgaagatcagcatagctcagaagaggaagaagaagaggaggaagaggaagaatcagaagacggagaagaggaggacgatatcacatccgccgaatcagagagcagcgaggaggaggagggagagcaaggcgacccccaaaatgccacgaggcaacagcagctggaatgggacgactctaccctgtcatactag

SEQ ID NO: 114661 - RNA, 2889 nt, Artificial Sequence
  derived and/or modified sequence
auguugcgucgaccagcuccggcucucgccccugccgccagacugcuguuagcaggccugcucugcggagggggugucugggcugcccgcgugaauaagcauaagccuuggcucgaaccaacguaucacggcauugucacagagaaugauaauaccguccuccuugacccuccacuuaucgcacuagacaaagacgcgccacuuagguuugcagaguccuuugaagucaccguuacgaaagagggggagauauguggauucaagauccacggccagaacguuccauucgaugcuguggucguggacaagaguaccggagaaggugugauuagaucuaaagaaaaguuagauugugagcuccagaaagacuacagcuucaccauccaagcguaugacuguggcaagggcccagaugguacuaaugugaagaagucccacaaggcaacugugcauauccagguuaacgaugugaacgaauacgccccaguuuuuaaggaaaagucuuauaaagcaacugucauagaggggaagcaguaugacucuauccuccgaguggaagccguggaugcugacugcuccccgcaguucagccagauaugcaguuaugaaaucaucaccccagaugucccuuucacuguugauaaagaugguuacauuaagaauacagagaaguugaacuaugguaaagaacaccaauauaaacucacugucacagccuaugauugcgggaagaagcgggcuacugaggaugugcuugugaagaucaguauuaagccuacguguacaccaggguggcagggcuggaauaaccgcauugaguaugaacccggcacaggagcacuggcgguuuuuccuaauauccaccuugaaacaugcgacgagccuguggccucaguucaggcaacuguggaguuagagacuucccacauugggaagggaugcgaucgugauacuuacagugaaaagucucugcauagauuauguggggcugcugcaggcaccgcagaacuccugcccagcccaucaggaucucuaaacuggaccaugggcuuaccuaccgauaauggccacgacuccgaccaggucuuugaauucaacggcacccaggccgucaggaucccggacggcguggucagugugagcccaaaggaacccuuuaccauuucugucuggaugagacaugggccauucggacguaaaaaagagaccaucuuauguucuuccgauaagacugauaugaaccgucaccauuauagucuuuacguccaugguugccggcugauauuccuuuuuagacaggacccuagcgaagaaaaaaaguacagaccggcugaauuccacuggaagcucaaucaggugugcgaugaagaguggcaucacuacgugcucaacgucgaauuccccuccgucacauuauauguugauggaacaagccacgaaccuuucuccgugacugaggauuauccccuucacccaucaaaaauugagacgcagcucgucguaggagcuuguuggcaagggggcgaucuucauaugacacaguucuucagggguaaucuggcagggcuaacccucagaagcggcaaguuggcugauaaaaaggugaucgauugccuguauacaugcaaagagggccuugaccugcaagugcucgaagacucuggccgcggaguacagauucaggcucacccaagucagcuggugcuaacccuggaaggagaagaucugggugaacuggacaaggccaugcagcacauuucuuaccucaauucacgccaguuucccacaccugguauaagacggcugaagaucaccucaacaauaaaaugcuucaaugaagccacuugcauuucugugccacccguugacggguauguuauggugcuccagccggaggaaccaaaaauuuccuugagcgggguccaucacuucgcuagggcagcgagcgaguucgaguccagcgaaggcguguucuuauuuccagaacugcgcauaaucucaacaaucacucgcgaagucgaaccagaaggggauggagccgaagaccccacuguacaggagucccucguuuccgaagagauuguucacgacuuagauaccugcgaaguaacggucgagggcgaagagcugaaccacgagcaggagucccuggagguugauauggcacgcuuacagcagaagggcauugaagucagcagcagcgaacuuggcaugaccuuuacagggguagacaccauggcuaguuacgaggagguacuccaucuucuuagguaucgcaacuggcaugcccgcagccuucuugaucguaaauuuaaacuaaucuguagugaacuuaacggccgguauaucagcaacgaauuuaaaguggaggugaacgugauacacacugccaaccccauggagcaugcaaaccacauggcagcccagccacaguuuguacaccccgaacacaggucguucguagaucucagcggacauaaucuugccaacccucauccauuugcuguggugccaucaacagccacgguugugaucgugguuugcgucuccuuucuggucuucaugauuauccugggggucuucaggauccgagccgcccaccgccggacuaugcgagaucaagacaccgguaaggaaaacgagauggacugggacgacucagcauugacuaucaccgugaaucccauggaaacauaugaagaucagcauucaucagaagaagaggaggaggaggaagaggaggaggaguccgaggacggggaagaggaagaugacauuacauccgccgagucugaaagcuccgaggaagaagagggggagcagggagacccccagaacgcgacacgccaacaacaguuagaaugggaugacucuacuuuaaguuauuag

SEQ ID NO: 114662 - RNA, 2349 nt, Artificial Sequence
  derived and/or modified sequence
aguauccugaggguagaagccguagaugccgacuguuccccucaauuuucccagauuuguucauaugagaucaucaccccagacgucccguucacagucgacaaagauggcuacauaaaaaauacugagaagcucaauuauggcaaggaacaccaauauaagcugacggucacugcuuaugauugcggcaaaaagagggccacugaagacgugcuagugaagauuaguaucaaacccaccugcacaccggguuggcagggauggaauaaccggaucgaguacgaaccugggacuggggccuuagccguguucccaaacauccaccucgagacuugcgaugagccaguggcaucugugcaggcgacuguagaauuagagacgucgcacauuggcaaggguugcgacagagacaccuacucagagaagucacuacacagacucugcggugcagcugccgggacagccgagcugcuuccuagccccagcgggucccugaauuggacaaugggccuccccacagacaauggccaugacucagaccagguauuugaauucaacgguacccaggcagucaggauucccgacggaguggugucaguuucaccuaaagagccguuuacuauaucugucuggaugcgccacgguccauucggacguaagaaggagacuauccucugcuccucugacaagaccgauaugaaccgccaucacuacucacucuauguucacggcugucgccucaucuuccuguuccgacaggaccccagcgaggaaaagaaauacagaccugcagaguuccauuggaagcugaaucaagucugcgaugaagaguggcaccacuacguccucaacgucgaauucccaagcguaacccuguacguggacgguacgucacacgagccguuuucggugaccgaggauuauccucugcaccccuccaagaucgaaacccagcugguagucggcgcaugcuggcaagggggggaccugcacaugacacaauucuucagaggaaaucuggcaggccuuacacugcggaguggcaaacuggccgacaagaaggugauugacugucucuauacuuguaaagagggccuggaucuccagguccuggaagauuccggaagaggcguucaaauucaggcccaucccucacagcucguuuugacuuuggaaggagaggaccugggagagcucgauaaggcaaugcaacacauauccuauuugaauuccaggcaguuucccaccccaggcauuagaagacugaagauuacguccaccauuaagugcuucaaugaggcuacuuguauuagcguucccccgguagacggcuauguaaugguucugcagccagaagagccaaaaaucucucuaucagggguccaccacuucgccagggcagcuagugaguuugagucuuccgaggguguguuucucuuuccugaauugagaaucauuagcacuauuacccgggaggucgagccugagggggauggcgcugaagacccaaccgugcaggagucccugguauccgaggagauaguacacgaucuggacacuugugaaguuaccguggagggggaagaacuuaaccacgagcaggaaagcuuggaaguggacauggcacgccugcaacaaaaagggauugaggugagcucuuccgaacuuggaaugacuuucaccggagucgacacaauggcaucuuacgaggaagugcuccaucugcugagguaccguaacuggcaugcccgaucucuccucgaucgaaaauuuaaacugauuugcucagagcugaacggcagauacaucuccaacgaguucaagguugaggucaacgugauucacacugcgaauccaauggagcaugcgaaccauauggccgcccaaccucaguuuguccauccagaacacagauccuucguugacuuaucuggacacaacuuggcaaauccccauccuuuugccgucgugccgucuacagccacagugguuauaguggugugugucucuuuccuuguuuuuaugauuauccucggcguguucagaauacgggccgcccacaggaggaccaugcgcgaucaggacaccggcaaagaaaaugaaauggauugggacgacucagcucuuacaauuacagugaaccccauggagaccuacgaagaccagcacucuagcgaggaggaggaggaggaggaagaggaagaagaaagcgaggacggcgaggaagaggacgauauuacgagcgccgaguccgaauccagcgaagaagaagaaggcgagcaaggagauccccaaaaugcuacuagacaacagcaacuggagugggacgauaguacguuaucuuacuag

SEQ ID NO: 114663 - RNA, 2889 nt, Artificial Sequence
  derived and/or modified sequence
augcucaggcgaccggcaccagcucuagcuccagccgcuagauugcugcuugcggggcugcugugcggaggcggugucugggcugccaggguaaacaagcauaagccauggcucgagccgacuuaucaugggaucgugaccgaaaacgauaauacagugcuccuggaucccccgcugaucgcacuggacaaggacgccccccugcguuucgcagaauccuucgaggucacgguuacaaaggagggagagaucugugguuuuaaaauccacggccagaaugucccauuugacgcaguaguagucgacaagucuaccggagagggcgugauccggucaaaggaaaaacuagacugcgaguuacaaaaagauuacucuuucacaauacaggcauacgacugugggaaaggcccagacggaacuaacgugaaaaagucucauaaagcaacagugcacauacaggugaacgacguuaaugaguaugccccgguauucaaggagaaaucuuacaaggccacuguuaucgagggaaagcaguaugacuccauccugagaguugaggccguugacgcugacugcagcccucaguucucucagaucugcagcuacgagaucauuacaccugaugugccguuuaccguggauaaagacggauacaucaagaacaccgagaagcucaauuaugggaaggagcaccaauacaaacucaccgucacagcauaugauuguggcaaaaaacgagccaccgaggauguguuggugaagauuucuaucaaaccuacuugcaccccaggauggcaaggauggaauaacaggauugaguacgagccaggcaccggcgcucuugccguguuucccaauauccacuuagaaaccugcgacgagcccguagcauccgugcaggcgaccguggaauuggagaccucccacauuggaaagggcugcgaccgggauaccuauagugaaaaaagccuucacagacuuuguggcgcugccgccggcacugccgagcucuugccuucccccagugguucccugaauuggacaaugggccugcccacggauaauggacacgauucggaucagguguucgaguuuaacggcacccaggcaguaagaauccccgauggaguagucaguguuuccccaaaagaaccuuucacaauuuccguuuggaugcgucacgggccguucgggcgcaaaaaagaaacgauucugugcucaucugacaagaccgauaugaaucggcaucacuauuccuuguacguccacgguugcaggcuuaucuucuuguuccggcaggauccuagugaagaaaagaaauauagaccugcugaguuccacuggaaauuaaaccaggucugugaugaggaauggcaccacuacguucuaaacguugaguuucccagcguuacauuguaugucgacggcaccucacacgagcccuuuuccgugacagaagacuacccccugcauccgucaaagaucgaaacucaguuggucguuggggcauguuggcagggcggggaccugcacaugacucaauuuuucagagggaacuuagcggggcugacccucagauccggaaagcuggcugauaagaaggucaucgacuguuuguauacuugcaaggagggucuagauuugcagguccuagaggacaguggacgugggguacagauucaagcucaccccucccaacucgugcugacauuggagggcgaagaucucggggaauuggacaaggcuaugcagcacauuucguauuugaacucccgccaauucccaaccccggguauucgucgcuugaagaucaccaguaccauuaagugcuucaaugaagccaccuguauaagcgugcccccagucgacggauacguuauggugcuucaaccugaggaaccuaagauuucuuugucuggcgugcaccacuucgcuagagcugcaucggaguuugagucaagcgaaggaguguuccuguuucccgaacugagaaucaucucgaccauuacucgggagguggagccugaaggagacggagccgaggacccaaccguccaggaaucccugguuucugaagagauaguacaugaccuagacacaugugaggugacugucgaaggugaagaacugaaucacgagcaagagagccucgaaguggacauggcgcgacuccagcaaaagggaaucgaaguaaguuccucugaacuggggaugacuuuuaccggaguggauacgauggcaaguuacgaagaggugcuccaccugcuacgguaucgaaauuggcacgcccgcagccuccucgacagaaaauucaaguugauauguucugagcugaacggaagauacaucagcaaugaguuuaaaguggaagugaacgugauucauaccgccaauccuauggagcacgcuaaucacauggcugcucaaccccaguuugugcaccccgaacaccgcucuuucguggaucugucaggacauaacuuggccaacccucaucccuucgccgugguucccagcacugccaccguggugaucguuguuugcguguccuuucugguauucaugauuauccugggcguguuccguauccgcgccgcacacaggaggacaaugcgcgaucaagauacggguaaagagaaugaaauggacugggacgauagcgcuuuaaccauuacagucaaucccauggagacauacgaagaucagcacagcagcgaggaagaagaggaggaggaggaggaagaagaauccgaagacggagaggaggaggaugacaucacaagugccgaaagugaaagcuccgaagaagaggaaggcgagcagggcgauccccagaacgccaccaggcagcagcaacucgaaugggacgauucuacacucucauauuag

SEQ ID NO: 114664 - RNA, 2889 nt, Artificial Sequence
  derived and/or modified sequence
augcuuaggagaccugcaccagcacuggcaccugccgcgcggcugcuacucgccggucuuuuaugcgggggcggcgugugggccgcucgugucaacaaacacaaaccuuggcuagaaccuaccuaucacggcaucgucaccgaaaacgacaacacuguacuacuggacccucccuuaaucgcgcuugacaaggaugccccgcugcgguuugcugaaagcuuugaagugacugugacaaaagaaggcgaaauaugcggcuuuaagauccacggccagaacguccccuucgacgccgugguaguugauaaauccacuggcgaagguguuaucagaaguaaagagaagcuggacugugaguuacagaaggauuacucuuuuacuauccaagcauacgacugcgguaaaggccccgauggaaccaacguuaagaaaucacauaaggcaacaguacacauucaggugaacgacguuaacgaauacgcucccguguuuaaagagaagaguuacaaagcaacagucauugaaggaaagcaguaugacaguauacucagaguggaagcuguggacgcugacugcuccccucaguucucccaaaucugcucauacgagaucaucaccccugacgucccauucaccguugacaaagauggguauauaaaaaauacagaaaaguuaaauuacggaaaggaacaccaauauaagcucacugucacagccuaugauugcgggaagaaaagagcaacagaagacguccucguuaaaauuucuauaaagccaacaugcacaccaggcuggcagggcuggaauaaucggaucgaauacgaacccggcacuggggcacuugcugucuucccaaauauucaccuggagacuugcgacgagcccguggcuuccgugcaggccacuguggaacuugaaaccagccacauugguaaaggcugugauagggacacuuacucagaaaagagccuucaucgacugugcggcgcugcugcggguacugccgagcucuugcccucccccucuggaucucucaauuggacuaugggucugccaaccgacaacgggcacgacagcgaucaggucuuugaauucaacggaacccaagccguccggauucccgauggggucgugucugugagccccaaagaacccuuuacuaucucuguguggaugcggcacggacccuuugggcgcaagaaagagaccauccuaugcagcagcgacaaaaccgauaugaauagacaccacuacucccuuuacgugcacgguugucguuugaucuuuuuauuuagacaggauccuagcgaagagaaaaaguaucgccccgccgaguuucacuggaaauugaaccaaguuugcgacgaagaauggcaucauuacgugcugaacguggaauuuccaucuguaacccucuacguggacggaaccagucacgagcccuuuaguguuacagaggacuacccccugcacccuaguaaaauugagacacaacucguugugggggccuguuggcagggcggagaccuucauaugacacaguucuuucgcggaaaccucgccgggcuuacacugagaucuggcaaacuggcagauaaaaagguuaucgacugucucuauacuuguaaggagggucuggauuugcagguacuugaagauuccggaaggggcguacagauucaggcucaucccucccagcucgucuugacccuggaaggagaagaucuaggagagcuggauaaagcgaugcagcacauuagcuaucugaauucccgacaauucccaaccccuggcauucgccggcucaagaucaccuccacuaucaaaugcuucaacgaagcaacuuguauuucaguuccuccaguggauggcuaugugauggugcuccaacccgaagaaccaaaaauaucccugucaggcguccaccacuucgcuagggcugcuuccgaguuugagucaucugaaggcguguuccuguucccggaauugcguaucaucucaaccauuacacgggaaguagagccggagggcgauggagcagaagauccuacuguucaggaaucucucgugucagaagaaaucguccaugaccucgacaccugcgaggugacaguggagggagaggaauugaaccacgaacaggaauccuuggagguagacauggccaggcuacagcagaaggguaucgaagugucgucaucagagcuagguaugaccuuuaccgguguggauaccauggccaguuaugaagaaguguugcaccuccuuagauacagaaacuggcacgcacgcucacuccucgaucgaaaguucaagcucauuuguucugaguuaaacggaagguacauaucaaaugaauuuaagguagaagucaacgucauccauaccgccaacccuauggaacaugcuaaucacauggcugcacaaccucaauucguucaucccgagcacagaucauucguagaucuaucaggccauaaucuggccaacccccauccauuugccguggucccaagcacagccacuguuguuaucguugugugugugucauuccuuguguucaugauuauacuuggaguauucagaaucagggccgcucaccgacggacaaugcgcgaucaggacacaggaaaagaaaaugaaauggacugggacgacuccgcccugacgauaacagugaaccccauggagacuuacgaggaccagcacagcagugaagaagaggaagaggaggaggaggaggaagagagugaggacggggaagaggaggaugacaucacaagugcagagucagagaguucggaggaggaagagggugagcaaggcgacccgcaaaacgcaacuagacagcagcagcuggagugggacgauucuacguugaguuacuag

SEQ ID NO: 114665 - RNA, 2349 nt, Artificial Sequence
  derived and/or modified sequence
ucuauccugagaguagaggcuguagacgcagauugcagcccccaguucagucaaauuuguagcuaugaaaucaucacgccugacguaccuuuuacuguggacaaggauggcuacauuaaaaacaccgaaaaacucaacuauggcaaggaacaucaguacaaacugacgguuacagccuacgacuguggaaagaagagagcuaccgaagacguacuagugaaaauaaguauaaaaccaacgugcacaccggguuggcagggcuggaauaaucgcauugaauacgagccggguacuggugcgcuagcggucuuuccaaauauucaucuagaaacuugugaugaaccaguugcaagcgugcaggccacggucgaacucgagacuagucauaucggaaagggaugugaucgcgauaccuacucugagaagucacugcauaggcuuugcggcgcugcugccggaaccgcugagcugcugccaucccccucuggcucccucaauuggacgaugggccuaccaaccgauaaugggcaugacuccgaccagguuuuugaauuuaacggcacccaggcgguaagaauuccugaugggguggugucugugucaccuaaagaaccuuucacuaucuccguguggaugcggcacggcccuuucggcagaaaaaaagaaaccauuuugugcucauccgauaaaacugauaugaauagacaucacuacagcuuauacgugcacggauguaggcucauuuuucuauuuaggcaagauccuuccgaagaaaaaaaguaccgcccugccgaauuucacuggaaacuuaaccaagugugugaugaagaguggcaccacuaugugcugaacguugaguuucccuccgugacucucuaugucgacgguaccucccacgaaccuuucucugugacagaggacuauccacugcauccauccaaaauugagacucaauuaguaguuggggcuugcuggcaaggcggugaccuucacaugacccaguuuuucagagguaauuuagccgggcucacauugcggucagggaagcuagcagacaaaaaggugauugacugucuuuacacuuguaaagaaggccuggaucugcaaguacucgaggacagcggacggggcgugcaaauccaagcucaucccucucagcuggugcucacauuagaaggggaggaucucggcgaauuagacaaagccaugcagcauauuucauacuuaaauucgagacaauuucccaccccaggaaucaggagacugaagauaacuucuaccaucaaauguuucaacgaagcgacaugcaucuccgugccaccuguugacgguuacgugaugguuuuacagcccgaggaaccuaaaaucagucuuucuggagugcaccauuucgcaagagccgcuucugaguucgaaucuucugaagguguguucuuguucccugagcugcgcaucauuaguaccauaacccgagaaguagagccugagggagacggagcagaggauccuaccguucaggaaucauuagucucagaggagaucguucacgauuuggacaccugugaggucacaguagagggagaagaacucaaucacgaacaggaaagucuugaaguggauauggcccggcugcagcagaaaggaauagaggucucaucaagcgaauuagguaugacauuuacuggcguugacaccauggcaaguuaugaagagguacugcaccuauuacgguacagaaauuggcaugcuaggagccuccucgaccgcaaauuuaagcucauuuguucugaacuuaaugggagauauaucagcaacgaguuuaaggucgagguuaacguuauccauaccgccaaccccauggagcacgcaaaucacauggcagcucaaccacaauuugugcacccagaacaucgcucguuuguagauuuguccggccauaaucucgccaauccccaucccuucgcaguagugcccuccaccgcaacagugguuaucgucguuuguguaagcuuccucguguuuaugauuauacugggcguuuuccguauccgcgcugcacaucgacggacaaugcgcgaccaggacacugggaaagaaaacgaaauggacugggaugauuccgcccugacaauaacgguaaaccccauggagacuuaugaggaccaacauagcucagaagaagaagaagaggaagaagaagaggaggaaagcgaagacggugaggaagaagacgacaucacaucagcagaaagugaaucgagcgaggaggaagagggggagcagggagacccacagaacgcuaccaggcagcagcaguuagagugggacgacagcacuuuguccuacuag

SEQ ID NO: 114666 - RNA, 2889 nt, Artificial Sequence
  derived and/or modified sequence
auguugcgaagaccugcccccgcucucgccccugccgcccguuuacuucuugccggccuguugugcggcggaggaguuugggccgcccgagucaacaaacacaaaccauggcuggagcccaccuaccacgguaucgucaccgagaaugacaauaccgugcugcucgaucccccuuugauugcccuggacaaggaugccccgcucagauuugccgagaguuuugaagucacagugaccaaggaaggugaaaucugcggguuuaaaauacacggacaaaaugugccuuuugacgcugugguaguggauaagagcaccggagagggugucauuagauccaaggagaaguuggacugcgaacugcagaaggacuacagcuucacuauacaagccuacgacugcgggaagggcccagacgguaccaauguaaagaagucccauaaagccacaguccacauucagguaaaugacguaaacgaauaugccccuguuuuuaaggagaaaucauacaaagcuacaguuaucgaaggaaagcaauacgauucaauccugcggguggaagccgucgacgccgauuguucaccacaguuuucucagauuuguucuuacgaaaucaucacccccgacguccccuuuaccgucgacaaagauggauacauuaaaaacaccgaaaaauugaacuaugguaaagaacaucaguacaaauuaacaguaacugcuuaugauugugguaagaagcgcgcuaccgaagacguccuggucaaaaucucuaucaagcccacuugcacgccuggauggcagggcuggaauaaucgcaucgaguaugagcccggcaccggcgccuuggccguguuuccuaacauucaccucgaaacaugugaugaaccuguggccucugugcaggcgaccguggaauuggagaccucccacauuggaaagggcugcgaccgggauaccuauagugaaaaaagccuucacagacuuuguggcgcugccgccggcacugccgagcucuugccuucccccagugguucccugaauuggacaaugggccugcccacggauaauggacacgauucggaucagguguucgaguuuaacggcacccaggcaguaagaauccccgauggaguagucaguguuuccccaaaagaaccuuucacaauuuccguuuggaugcgucacgggccguucgggcgcaaaaaggaaaccauccugugcagcagugauaagaccgacaugaauaggcaucauuacucacuuuacguccacggcugccgacucauuuuuuuauuucgacaggacccuucugaggaaaagaaauacagacccgccgaguuucacuggaagcugaaccaggucugcgacgaagaauggcaccacuacgucuugaauguugaauucccauccgucaccuuauacguugacgguacuucucaugagcccuuuuccguuaccgaggacuauccccugcacccuagcaagaucgaaacgcaguuagugguuggggcaugcuggcagggaggugacuuacacaugacacaauucuuccgggggaaucuggcgggccugacccugaggaguggcaaacuagcagacaagaaggucaucgauugccucuauacuuguaaagaaggccuagaucuucaagugcuugaagauucaggaaggggugugcagauucaggcccacccaucucaacuugucuugacucucgagggggaagauuugggugaauuggacaaagcaaugcaacacaucucguauuugaacagcagacaauuuccuacaccaggaauucggcgguugaagauuaccuccacaauuaagugcuuuaacgaagcuacaugcauuagugugccucccgucgauggcuaugugaugguguugcagccggaggagccaaaaaucucucuuaguggaguccaccacuuugccagagccgcgucugaguucgaaucgucugaaggcguguuuuuguucccagaacugcguaucaucagcacaauaacccgcgagguugaaccagagggggacggggccgaagauccuacaguccaagaaucccuagugucagaagaaaucguucaugaucuggauacaugcgaaguuaccguggaaggcgaagaacucaaucaugaacaagagagucuugagguagauauggcgagacuacaacaaaaggguauagaagucaguuccuccgaauugggcaugacauucacaggggucgacacaauggcuucauacgaggaagucuuacaucugcugcgguauagaaacuggcaugcuagaagccugcucgaccgaaaauucaagcuuaucuguagcgaacucaauggccgguacauaucaaacgaauucaagguugagguuaaugucauacauacugcuaaucccauggagcaugccaaccacauggccgcucagccucaguucguccacccggaacauagauccuucgucgaccugucugggcacaacuuagccaacccgcacccauuugcagucgucccuucuacagcaacuguugucauagugguaugugugagcuuuuugguauuuaugauuauacucggagucuuucggauuagagccgcccacaggcgcacgaugcgcgaucaggauacaggaaaggaaaaugagauggacugggacgauucagcccugacgaucacaguuaacccuauggagacuuaugaggaucagcauagcagcgaggaagaagaagaggaggaagaagaagaggaaagugaggacggagaggaggaggacgauaucaccucugcugagagugagucuagcgaggaagaagagggggagcaaggugacccacagaaugccacaagacaacaacaacuggaaugggaugauagcacauuaucauacuag

SEQ ID NO: 114667 - DNA, 3075 bp, Artificial Sequence
  derived and/or modified sequence
atggcctgcaccgagaccgccagaatcgcccagctggtggccagacagagaagcagcaagagaaagaccggcagacaggtgaactgccagatgagagtgaagaagaccatgcccttcttcctggagggcaagcccaaggccaccctgagacagcccggcttcgccagcaacttcagcgtgggcaagaagcccaaccccgcccccctgagagacaagggcaacagcgtgggcgtgaagcccgacgccgagatgagcccctacatgctgcacaccaccctgggcaacgaggccttcaaggacatccccgtgcagagacacgtgaccatgagcaccaacaacagattcagccccaaggccagcctgcagccccccctgcagatgcacctgagcagaaccagcaccaaggagatgagcgacaacctgaaccagaccgtggagaagcccaacgtgaagccccccgccagctacacctacaagatggacgaggtgcagaacagaatcaaggagatcctgaacaagcacaacaacggcatctggatcagcaagctgccccacttctacaaggagctgtacaaggaggacctgaaccagggcatcctgcagcagttcgagcactggccccacatctgcaccgtggagaagccctgcagcggcggccaggacctgctgctgtaccccgccaagagaaagcagctgctgagaagcgagctggacaccgagaaggtgcccctgagccccctgcccggccccaagcagaccccccccctgaagggctgccccaccgtgatggccggcgacttcaaggagaaggtggccgacctgctggtgaagtacaccagcggcctgtgggccagcgccctgcccaaggccttcgaggagatgtacaaggtgaagttccccgaggacgccctgaagaacctggccagcctgagcgacgtgtgcagcatcgactacatcagcggcaacccccagaaggccatcctgtacgccaagctgcccctgcccaccgacaagatccagaaggacgccggccaggcccacggcgacaacgacatcaaggccatggtggagcaggagtacctgcaggtggaggagagcatcgccgagagcgccaacaccttcatggaggacatcaccgtgccccccctgatgatccccaccgaggccagccccagcgtgctggtggtggagctgagcaacaccaacgaggtggtgatcagatacgtgggcaaggactacagcgccgcccaggagctgatggaggacgagatgaaggagtactacagcaagaaccccaagatcacccccgtgcaggccgtgaacgtgggccagctgctggccgtgaacgccgaggaggacgcctggctgagagcccaggtgatcagcaccgaggagaacaagatcaaggtgtgctacgtggactacggcttcagcgagaacgtggagaagagcaaggcctacaagctgaaccccaagttctgcagcctgagcttccaggccaccaagtgcaagctggccggcctggaggtgctgagcgacgaccccgacctggtgaaggtggtggagagcctgacctgcggcaagatcttcgccgtggagatcctggacaaggccgacatccccctggtggtgctgtacgacaccagcggcgaggacgacatcaacatcaacgccacctgcctgaaggccatctgcgacaagagcctggaggtgcacctgcaggtggacgccatgtacaccaacgtgaaggtgaccaacatctgcagcgacggcaccctgtactgccaggtgccctgcaagggcctgaacaagctgagcgacctgctgagaaagatcgaggactacttccactgcaagcacatgaccagcgagtgcttcgtgagcctgcccttctgcggcaagatctgcctgttccactgcaagggcaagtggctgagagtggagatcaccaacgtgcacagcagcagagccctggacgtgcagttcctggacagcggcaccgtgaccagcgtgaaggtgagcgagctgagagagatcccccccagattcctgcaggagatgatcgccatccccccccaggccatcaagtgctgcctggccgacctgccccagagcatcggcatgtggacccccgacgccgtgctgtggctgagagacagcgtgctgaactgcagcgactgcagcatcaaggtgaccaaggtggacgagaccagaggcatcgcccacgtgtacctgttcacccccaagaacttccccgacccccacagaagcatcaacagacagatcaccaacgccgacctgtggaagcaccagaaggacgtgttcctgagcgccatcagcagcggcgccgacagccccaacagcaagaacggcaacatgcccatgagcggcaacaccggcgagaacttcagaaagaacctgaccgacgtgatcaagaagagcatggtggaccacaccagcgccttcagcaccgaggagctgcccccccccgtgcacctgagcaagcccggcgagcacatggacgtgtacgtgcccgtggcctgccaccccggctacttcgtgatccagccctggcaggagatccacaagctggaggtgctgatggaggagatgatcctgtactacagcgtgagcgaggagagacacatcgccgtggagaaggaccaggtgtacgccgccaaggtggagaacaagtggcacagagtgctgctgaagggcatcctgaccaacggcctggtgagcgtgtacgagctggactacggcaagcacgagctggtgaacatcagaaaggtgcagcccctggtggacatgttcagaaagctgcccttccaggccgtgaccgcccagctggccggcgtgaagtgcaaccagtggagcgaggaggccagcatggtgttcagaaaccacgtggagaagaagcccctggtggccctggtgcagaccgtgatcgagaacgccaacccctgggacagaaaggtggtggtgtacctggtggacaccagcctgcccgacaccgacacctggatccacgacttcatgagcgagtacctgatcgagctgagcaaggtgaactag

SEQ ID NO: 114668 - DNA, 3075 bp, Artificial Sequence
  derived and/or modified sequence
atggcttgcacagaaacggctcggatagcacagctggtcgctcgacagcgatcaagcaaacgcaaaacaggaaggcaggtcaactgtcagatgcgggtgaaaaagactatgccattctttttagagggcaaaccaaaggcgacactgcgccagcctggatttgcttcaaacttttctgtgggcaagaagcccaatccagccccgctccgtgataaaggcaacagcgtgggggtcaaacctgatgccgagatgtccccttacatgctgcacaccacattgggcaatgaagcttttaaagatataccagtacaaagacacgtgacgatgtcaacgaataataggttttccccaaaggccagtttgcagcctcccttgcagatgcacctgagccgcacctccacaaaagaaatgtctgataacctgaatcaaaccgtcgaaaaaccaaacgtgaaacctccggcttcctatacatacaagatggatgaagtgcagaaccgcattaaggagatcctcaacaaacataataatggcatttggataagtaagcttccacacttctataaggagctgtacaaagaagacctgaaccagggaatactacagcagttcgaacactggccgcacatctgtaccgttgagaagccatgtagcggaggccaggacttgctgctttacccagcaaagcgtaagcaactcctacgaagcgaactcgacaccgagaaggtccccctgagcccactgccagggccaaagcaaactccccctctcaagggctgccctacggttatggctggggatttcaaggaaaaagtggccgatctccttgtgaaatatactagtggactgtgggcatccgcactgccaaaagcttttgaggagatgtacaaggtgaaatttccggaagacgccctgaagaacctcgcttccctaagcgacgtctgttccatcgactacataagcggcaatccacagaaggcaattctttacgccaagctgcccctgcccactgacaagattcagaaggatgccgggcaagcccatggggataatgacatcaaagccatggtcgagcaggagtacctgcaggtcgaagagagcatcgctgaaagtgccaatacatttatggaagatattacagtgccgccactcatgatcccgaccgaagcctctccgagcgtgctggtcgtagagttaagtaatactaacgaagttgtaatcaggtacgtgggcaaagattatagcgcagcacaggaactgatggaggatgagatgaaggagtattacagtaaaaacccaaagatcaccccagtacaggcagttaacgtgggccagttgcttgctgttaacgctgaagaggacgcttggctgcgggcgcaggtgattagcactgaggagaacaagatcaaggtgtgctatgtcgactatggcttcagcgagaatgtggaaaagagcaaagcctacaagttaaacccaaagttctgcagcttgagcttccaggccacaaagtgtaagctggccggcctcgaggtgttgagtgacgaccccgatctcgtaaaagtagtagagagcctcacttgcggcaaaatatttgctgtagaaatactggacaaagccgatataccattagtggttctgtacgatacttccggcgaagacgatatcaatatcaatgccacgtgtttaaaggcgatctgcgataaatctcttgaggtccacctgcaggtcgacgctatgtacacgaatgtaaaagtcactaacatctgctcggacggaacattgtactgccaagtgccatgtaagggactaaataagctttctgatctgctgaggaagattgaggattacttccactgcaagcatatgacatcagaatgtttcgtctctcttccgttctgcgggaaaatctgtctgtttcattgtaaaggcaagtggcttcgggtcgaaatcacaaatgtacactcctctcgtgcactagatgtccagttccttgatagtggcaccgtgacatcagtcaaggtatctgaattacgggagattcctccccgcttcctgcaagagatgatcgctatcccaccccaggctattaaatgctgtctggcagacctgcctcagtccatcggtatgtggactccagatgctgtgctttggctgagagactccgtgcttaattgcagcgattgttcaattaaggtgaccaaagtggacgaaaccaggggcatcgcccatgtgtacctgtttacccccaagaatttcccggaccctcaccgatccataaatcgccagattacaaatgctgacctgtggaagcatcaaaaagatgtgttcctgtccgctatcagttctggggcggactccccaaatagcaagaacggcaatatgccaatgtctggcaatacaggcgaaaacttccggaagaacctgacggacgtgattaagaaatccatggttgatcatacctccgccttctccaccgaagagctccctccacccgtgcacctttctaagcccggtgaacatatggacgtctatgtaccagttgcctgccatccgggctacttcgtgatccagccgtggcaggagatccataagctggaggttctgatggaggagatgatcctctattattccgtgtccgaagagcggcatatcgctgtggagaaagatcaggtgtacgccgccaaggtcgagaataaatggcacagagtgctgcttaaaggcatattgactaatggacttgtgagcgtctatgagctggactacggcaagcatgagctggtaaacatccgtaaggtgcaacccctggtcgacatgtttagaaaactgcccttccaggccgtcaccgcacagttggcaggagtgaaatgcaatcagtggtctgaagaggcttcaatggtgttccggaaccatgttgagaagaagcccctcgtggccttagtgcaaaccgtaatagagaatgccaatccttgggaccgcaaggttgtggtttatcttgtggatacctctctgccagatacagacacctggatccatgactttatgtctgagtatctgatcgaattgtccaaggttaattag

SEQ ID NO: 114669 - DNA, 3075 bp, Artificial Sequence
  derived and/or modified sequence
atggcctgcacagaaacagccagaattgcccagctggtggcccggcagaggagcagcaagaggaagacaggccggcaggtgaactgccagatgagggtgaagaagaccatgcccttcttcctggagggcaagcccaaggccaccctgcggcagcccggctttgccagcaacttctctgtgggcaagaagcccaacccagcccccctgcgggacaagggcaacagcgtgggcgtgaagccagatgctgagatgagcccctacatgctgcacaccaccctgggcaatgaggccttcaaggacatccctgtgcagagacatgtgaccatgagcaccaacaaccgcttcagccccaaggccagcctgcagccccccctgcagatgcacctgagcaggaccagcaccaaggagatgtctgacaacctgaaccagacagtggagaagcccaacgtgaagcccccagccagctacacctacaagatggatgaggtgcagaaccgcatcaaggagatcctgaacaagcacaacaacggcatctggatcagcaagctgccccacttctacaaggagctgtacaaggaggacctgaaccagggcatcctgcagcagtttgagcactggccccacatctgcaccgtggagaagccctgcagcggcggccaggacctgctgctgtacccagccaagaggaagcagctgctgcggtctgagctggacacagagaaggtgcccctgagccccctgcccggccccaagcagaccccacccctgaagggctgccccaccgtgatggccggggacttcaaggagaaggtggccgacctgctggtgaagtacaccagcggcctgtgggccagcgccctgcccaaggcctttgaggagatgtacaaggtgaagttcccagaagatgccctgaagaacctggccagcctgagtgatgtgtgcagcattgactacatcagcggcaacccccagaaggccatcctgtatgccaagctgcccctgcccacagacaagatccagaaggatgctggccaggcccatggagacaatgacatcaaggccatggtggagcaggagtacctgcaggtggaggagagcattgctgagagcgccaacaccttcatggaggacatcaccgtgccccccctgatgatccccacagaggccagccccagcgtgctggtggtggagctgagcaacaccaatgaggtggtgatccgctacgtgggcaaggactacagcgctgcccaggagctgatggaggatgagatgaaggagtactacagcaagaaccccaagatcacccctgtgcaggccgtgaatgtgggccagctgctggccgtgaatgctgaggaggatgcctggctgcgggcccaggtgatcagcacagaggagaacaagatcaaggtgtgctacgtggactatggcttctctgaaaatgtggagaagagcaaggcctacaagctgaaccccaagttctgcagcctgtccttccaggccaccaagtgcaagctggccggcctggaggtgctgagtgatgatcctgacctggtgaaggtggtggagagcctgacctgtgggaagatctttgctgtggagatcctggacaaggctgacatccccctggtggtgctgtatgacaccagcggagaagatgacatcaacatcaatgccacctgcctgaaggccatctgtgacaagagcctggaggtgcacctgcaggtggatgccatgtacaccaacgtgaaggtgaccaacatctgcagtgatggcaccctgtactgccaggtgccctgcaagggcctgaacaagctgagtgacctgctgaggaagattgaggactacttccactgcaagcacatgaccagcgagtgctttgtgtccctgcccttctgtgggaagatctgcctcttccactgcaagggcaagtggctgcgggtggagatcaccaacgtgcacagcagccgggccctggatgtgcagttcctggacagcggcaccgtgacctctgtgaaggtgtctgagctgcgggagatccccccacgcttcctgcaggagatgattgccatccccccccaggccatcaagtgctgcctggccgacctgccccagagcatcggcatgtggaccccagatgctgtgctgtggctgcgggacagcgtgctgaactgcagcgactgcagcatcaaggtgaccaaggtggatgagacccggggcatcgcccacgtgtacctgttcacccccaagaacttcccagacccccacaggagcatcaaccggcagatcaccaatgctgacctgtggaagcaccagaaggatgtgttcctgagcgccatcagcagtggagctgacagccccaacagcaagaatggaaacatgcccatgagcggcaacacaggagagaacttcaggaagaacctgacagatgtgatcaagaagtccatggtggaccacaccagcgccttcagcacagaggagctgcccccacctgtgcacctgagcaagccaggagagcacatggatgtgtatgtgcctgtggcctgccaccctggctactttgtgatccagccctggcaggagatccacaagctggaggtgctgatggaggagatgatcctgtactacagcgtgtctgaggagcggcacatcgctgtggagaaggaccaggtgtatgctgccaaggtggagaacaagtggcaccgggtgctgctgaagggcatcctgaccaacggcctggtgtctgtgtatgagctggactatggcaagcatgagctggtgaacatcaggaaggtgcagcccctggtggacatgttcaggaagctgcccttccaggccgtgacagcccagctggccggcgtgaagtgcaaccagtggagcgaggaggcctccatggtgttcagaaatcatgtggagaagaagcccctggtggccctggtgcagacagtgattgaaaatgccaacccctgggacaggaaggtggtggtgtacctggtggacaccagcctgcctgacacagacacctggattcatgacttcatgtctgagtacctgattgagctgagcaaggtgaactag

SEQ ID NO: 114670 - DNA, 3075 bp, Artificial Sequence
  derived and/or modified sequence
atggcctgcaccgagaccgcccggatcgcccagctggtggcccggcagcggagcagcaaacgcaagactggccgccaggtgaattgccagatgcgagtaaagaaaaccatgcctttcttcctcgagggcaagcctaaggccaccctaagacagccgggattcgcatccaacttttctgtgggcaagaaaccaaatcccgccccactgcgcgataagggaaactccgttggcgttaaaccagacgccgaaatgtcaccttatatgttgcacaccactctcggcaatgaagcctttaaggacattcctgtgcagaggcacgtgacaatgtctacaaacaatcgctttagtcctaaggctagtcttcagccacctttgcagatgcacctctcccggaccagcacaaaagagatgtccgacaatcttaaccagactgtggaaaagcccaatgttaagccccccgctagctatacttacaagatggacgaggtgcagaacaggattaaggagattctgaacaagcataataatggcatatggatctctaaattgccacatttctacaaagaactgtacaaagaggatcttaaccagggaatactgcagcagtttgagcattggcctcatatttgcactgtggagaagccctgctctggtgggcaggatttgctcctctacccggcgaagaggaagcaattactgcggagcgagttggacacagaaaaagtccccctgtctcccctgcccggccctaagcaaactccccctttaaagggttgcccgaccgtgatggccggagatttcaaagaaaaagtagcagacctgctagtaaagtatacctcgggcttgtgggctagtgcactgccaaaggccttcgaagagatgtataaggtcaaattcccagaagatgccctgaaaaatctcgccagcctgagtgatgtttgctctatagactatattagcggtaatcctcagaaggctatcctgtatgcgaagctgccactacctacagataaaattcagaaagacgctggccaggcccacggggacaatgacataaaggccatggtcgaacaggaatatcttcaggtggaagagtctattgcagaaagcgctaacacattcatggaggacattacggtgccccccttgatgataccgacggaggcttctcctagcgttttggtggtcgaactgtccaatactaacgaggtggttattagatacgtagggaaagactactctgctgctcaggaactgatggaagacgagatgaaggagtactactcaaagaaccccaaaattacgccggtacaagccgtaaacgtggggcagttgcttgctgtgaatgcagaagaggacgcctggttacgagctcaggtcattagcaccgaggaaaataagataaaggtgtgttacgtggattatggatttagcgagaacgtagagaaatctaaggcttacaaactgaatcctaaattctgctccctcagcttccaggccacaaaatgcaagttagcaggcttagaggtgctgagcgatgatccagacctggtgaaggtggtggaatctctaacctgcggcaaaattttcgccgttgaaatcctggacaaagcggacatcccactcgtggtattatatgatacctccggggaagacgatatcaacatcaatgccacatgtctgaaagcgatatgcgataaatctctggaagttcatctgcaggtcgacgccatgtacaccaatgtaaaagttacaaacatctgctccgacggtaccctgtattgtcaggtaccttgtaagggcctgaataagctaagcgatttactgcggaaaatagaagattactttcactgcaagcacatgacttccgaatgctttgtgtctctccccttctgcggcaagatctgtctatttcattgcaagggcaaatggcttagggtcgagataacaaatgtgcattcttctcgtgccctggatgtgcagttcttggattcagggaccgtcacaagcgttaaagtatctgaattacgtgaaattcctccgcgttttctacaggagatgatagccattccgcctcaggcgataaagtgttgcttggccgacctaccccagtctattgggatgtggacacctgatgcggtcctgtggttacgcgacagcgtgctgaactgctcggactgctcgatcaaggtgacaaaggtcgacgaaactcggggaattgcccacgtttatctgttcacaccaaagaatttccctgacccccacaggagcatcaatagacagattactaacgccgatctttggaagcaccagaaagatgttttcctgtctgcaatctctagcggcgccgattctcccaactctaaaaacggcaatatgcccatgtcaggtaatactggagaaaactttaggaaaaatctcacagatgtgattaagaagtctatggtagatcatacctccgcgttctcaacagaggagctccctccaccagtccacctatcaaagcccggtgaacacatggacgtttatgtgcctgtcgcttgccatcctggttacttcgtcatccagccttggcaggaaatccacaagctggaggtcctcatggaagaaatgatcttgtattatagcgtgagcgaggagcgccatattgccgtggagaaggaccaagtatacgcagcgaaggttgaaaataagtggcacagagtcctgcttaaggggatcttgaccaatggcctcgtcagcgtttatgaactcgactacggaaagcatgaactcgtgaatatcagaaaggtgcagcctctggttgacatgttcaggaagcttccattccaggcagtcaccgcccagctggccggagttaaatgcaatcagtggtcggaggaggccagtatggtttttcgcaaccatgtggaaaaaaaaccactggtggcgttggtccaaaccgtgattgaaaacgctaacccttgggacaggaaggtcgtggtgtatctagttgacacctcactcccagatactgacacatggatccacgattttatgtcggagtatttgattgagctttccaaagtgaactag

SEQ ID NO: 114671 - DNA, 3075 bp, Artificial Sequence
  derived and/or modified sequence
atggcgtgcactgaaactgcacgtatcgcacaattggtagcgcgtcagcgcagctcaaagagaaaaaccggcagacaggtgaattgccagatgcgggtgaagaagaccatgcccttctttctcgaaggcaaacccaaggccacgctgcggcagcctggcttcgcgtccaacttctctgtgggaaaaaaacccaaccccgcacccctgagagacaaaggaaattccgtcggcgtcaaacccgatgcggagatgagtccctatatgctgcatacgactctcgggaatgaggcctttaaagacatcccagtgcaaaggcatgtcacgatgtcaaccaacaatcgcttttcacctaaggccagtttacagcccccacttcagatgcacctgagcaggacaagtactaaagagatgtccgataacctgaatcagactgtggaaaagcccaacgttaaacctcccgctagctacacatataagatggatgaagtccagaaccgtatcaaggaaatactgaacaaacataataatggcatttggatttcgaagctgccccacttttataaagaactgtacaaagaggatctgaatcagggaatccttcagcagtttgagcattggccacacatatgtacagtggaaaaaccttgtagtgggggtcaggacctactgctctaccctgcgaagagaaaacaactgctccggtccgaactggacacggaaaaagtgcctctgtctccattgccagggccaaagcagactcccccactgaaaggatgtcctacagttatggccggagattttaaggagaaagttgcggacctgcttgttaagtacactagcggactgtgggcaagcgccttgcccaaggctttcgaggagatgtacaaggtgaagttcccagaggatgcactgaagaatctggctagcttgtctgacgtatgctctatcgattacattagcggcaatcctcagaaagctattttgtacgcaaaacttcctctgccaaccgacaagatccaaaaggacgcaggtcaggcccatggcgataacgatattaaggctatggtggaacaggaatacctgcaagtcgaggaatctattgcggagtccgcaaacacatttatggaggacatcacagtcccgcctctaatgatcccgactgaggcctccccaagcgtgctggtagtggaactgagtaataccaacgaggttgtgatcagatatgtgggcaaagactacagcgctgcacaggaactgatggaagacgagatgaaagagtattactcaaagaatcctaaaatcacccccgtccaagccgtgaacgtcggacagcttctcgccgttaacgccgaggaagatgcatggctaagagcacaggtcatatctacagaggagaacaaaatcaaggtctgctatgtggattacggcttctctgaaaacgtcgagaagtccaaagcttataaactgaaccccaagttttgctccctctcattccaagccacaaaatgcaagcttgctgggttagaggtgctcagcgacgaccctgatcttgttaaagtagtggaaagtctcacctgcggaaaaattttcgcagtggaaattttggacaaagctgacatccctctcgtagtgttatacgacactagcggggaagacgacattaacattaatgctacatgtctaaaggcgatatgcgataagagcctagaagttcacctgcaggtcgacgctatgtacaccaatgtgaaagtgaccaatatttgcagcgatggcactctttactgtcaagtgccctgtaagggactcaataagttgtctgatctgctgcggaagatcgaggactatttccactgcaagcacatgactagtgaatgctttgtgtccctgccattctgcgggaagatatgtctatttcactgcaagggcaagtggctccgggtggaaatcacgaatgttcactcatcccgagcccttgatgtgcaattcctggatagtggcacagtaacttcagtgaaagtctcggaactgagagaaatcccacccagattcctgcaggagatgatcgccattcccccacaggcgattaagtgctgcttggcagacctgccacagagcatagggatgtggaccccagatgcagtactgtggttgcgggactcagtcctcaactgcagcgactgctctattaaggtaaccaaggtcgatgaaacaagggggattgctcacgtgtatttattcacgcccaagaacttcccagatcctcaccgctccatcaaccgacagatcactaacgcagacctgtggaagcatcagaaggacgtctttctgagtgcgattagcagcggggctgacagccccaatagcaagaacgggaatatgcctatgtcaggtaacactggtgaaaacttcagaaaaaacttgaccgacgtgatcaaaaaaagcatggtggatcacaccagcgccttttccaccgaagaattgccacctcccgttcacctaagtaaacccggagaacatatggacgtgtacgtgcccgtggcttgtcatcctgggtactttgttatccaaccttggcaagagattcataagctcgaagtgctaatggaagaaatgatactgtactattcggttagcgaggaaaggcacatcgctgtcgagaaggatcaggtatatgcagcgaaagtggaaaacaagtggcaccgagttttgcttaaaggcatactgactaacggcctcgtctccgtgtacgagctggactatggtaagcatgaactggtgaacatccgtaaagtgcaacccctagtggatatgttccgaaagttgcccttccaggctgtgacagcacagttggccggtgtcaaatgcaatcagtggagcgaggaggcttcaatggtttttaggaaccacgtggaaaaaaaaccgctagtcgctctcgtgcagacagtgatcgaaaacgccaacccgtgggacagaaaagtagttgtgtatttggtagatacatccctgcccgatacagatacgtggattcacgacttcatgagtgagtacctgatcgagctttccaaggtcaactag

SEQ ID NO: 114672 - DNA, 1887 bp, Artificial Sequence
  derived and/or modified sequence
attgctgctgagaattatgggctggatgtgaagaataaaaaaggtagctcggtattttgtgcagtagcaagctcttgggacagcggtgattgtagcaatccgggcctgaacttgttccccacatccccttgaagctgacagagatgatttctccctttatttggagaaaccccagctacttagcaccagtcttgcttcgcttgaattgaactttgtctggtggtatgctatgttgactatggttttagtgaaaatgttgaaaaaagcaaagcatacaaattaaacccgaagttttgttcactctcatttcaagctacaaaatgtaagcttgcaggcttggaagtcctaagcgatgaccctgatctagtgaaggtggttgaatctttaacttgtggaaagatctttgcagtggaaatacttgacaaagctgacattccacttgttgttctgtacgatacctcaggagaagatgatatcaatatcaatgccacctgcttgaaggctatatgtgacaagtcactagaggttcacctgcaggttgacgccatgtacacaaatgtcaaagtaactaatatttgctctgatgggacactctactgccaggtgccttgtaagggtctgaacaagctcagtgaccttctacgtaagatagaggactacttccattgcaagatcacaaatgttcacagcagccgggctcttgatgttcagttcctggactctggcactgtgacatctgtaaaagtgtcagagctcagggaaattccacctcggtttctacaagaaatgattgcaataccacctcaggccattaagtgctgtttagcagatcttccacaatctattggcatgtggacaccagatgcagtgctgtggttaagagattctgttttgaattgctcggactgtagcattaaggttacaaaagtggatgaaaccagagggatcgcacatgtttatttatttacccctaagaacttccctgaccctcatcgcagtattaatcgccagattacaaatgcagacttgtggaagcatcagaaggatgtgtttttgagtgccatatccagtggagctgactctcccaacagcaaaaatggcaacatgcccatgtcgggcaacactggagagaatttcagaaagaacctcacagatgtcatcaaaaagtccatggtggaccatacgagcgctttctccacagaggaactgccacctcctgtccacttatcaaagccaggggaacacatggatgtgtatgtgcctgtggcctgtcacccaggctacttcgtcatccagccttggcaggagatacataagttggaagttctgatggaagagatgattctatattacagcgtgtctgaagagcgccacatagcagtggagaaagaccaagtgtatgctgcaaaagtggaaaataagtggcacagggtgcttttaaaaggaatcctgaccaatggactggtatctgtgtatgagctggattatggcaaacacgaattagtcaacataagaaaagtacagcccctagtggacatgttccgaaagctgcccttccaagcagtcacagctcaacttgcaggagtgaagtgcaaccagtggtctgaggaggcttctatggtgtttcgaaatcatgtggagaagaaacctctggtggcactggtgcagacagtcattgaaaatgctaacccttgggaccggaaagtagtggtctacttagtggacacatcgttgccagacaccgatacctggattcatgattttatgtcagagtatctgatagagctttcaaaagttaattaatgactgcctctgaaaccttgacaactaattcagattttttagcaataacaaaatgtagtaggcttaaaaaaaatcttaactctg

SEQ ID NO: 114673 - protein, 913 aa, Artificial Sequence
  derived and/or modified sequence
MEVGSEEEKWEKLDAEFDHFVVDMKPFVLKLPHRTERQRCALWIRKLCEPSGTGAGIMGRKNRNLYAKLLLHMLKRGALEGPFTHRPEPGTLKILPSYMSIYFDEPNPARAKGSSPEGLPAWVLGELETSEHKLNESWKLSSGEDNTLVQSPTDVYSREQYTGKLRVRSHSLSPTHREDGQNITPKICEVYSKKSPVSLDDSDIEARLNSWNLGLDMKTKMMEAKFHEEKLKLQQKHDADVQKILERKNNEIEELKTLYRSKQHETEETIRKLEKKVQTLIRDCQVIRETKEDQIAELKKICEQSTESLNNDWEKKLHNAVAEMEQEKFDLQKQHTENIQELLEDTNVRLNKMESEYMAQTQSTNHMIKELEARVQQLTGEAENSNLQRQKLIQEKAELERCYQITCSELQEVKARRNTLHKEKDHLVNDYEQNMKLLQTKYDADINLLKQEHALSASKASSMIEELEQNVCQLKQQLQESELQRKQQLRDQENKFQMEKSHLKHIYEKKAHDLQSELDKGKEDTQKKIHKFEEALKEKEEQLTRVTEVQRLQAQQADAALEEFKRQVELNSEKVYAEMKEQMEKVEADLTRSKSLREKQSKEFLWQLEDIRQRYEQQIVELKLEHEQEKTHLLQQHNAEKDSLVRDHEREIENLEKQLRAANMEHENQIQEFKKRDAQVIADMEAQVHKLREELINVNSQRKQQLVELGLLREEEKQRATREHEIVVNKLKAESEKMKIELKKTHAAETEMTLEKANSKLKQIEKEYTQKLAKSSQIIAELQTTISSLKEENSQQQLAAERRLQDVRQKFEDEKKQLIRDNDQAIKVLQDELENRSNQVRCAEKKLQHKELESQEQITYIRQEYETKLKGLMPASLRQELEDTISSLKSQVNFLQKRASILQEELTTYQGRR

SEQ ID NO: 114674 - DNA, 2742 bp, Artificial Sequence
  derived and/or modified sequence
atggaggtgggcagcgaggaggagaagtgggagaagctggacgccgagttcgaccacttcgtggtggacatgaagcccttcgtgctgaagctgccccacagaaccgagagacagagatgcgccctgtggatcagaaagctgtgcgagcccagcggcaccggcgccggcatcatgggcagaaagaacagaaacctgtacgccaagctgctgctgcacatgctgaagagaggcgccctggagggccccttcacccacagacccgagcccggcaccctgaagatcctgcccagctacatgagcatctacttcgacgagcccaaccccgccagagccaagggcagcagccccgagggcctgcccgcctgggtgctgggcgagctggagaccagcgagcacaagctgaacgagagctggaagctgagcagcggcgaggacaacaccctggtgcagagccccaccgacgtgtacagcagagagcagtacaccggcaagctgagagtgagaagccacagcctgagccccacccacagagaggacggccagaacatcacccccaagatctgcgaggtgtacagcaagaagagccccgtgagcctggacgacagcgacatcgaggccagactgaacagctggaacctgggcctggacatgaagaccaagatgatggaggccaagttccacgaggagaagctgaagctgcagcagaagcacgacgccgacgtgcagaagatcctggagagaaagaacaacgagatcgaggagctgaagaccctgtacagaagcaagcagcacgagaccgaggagaccatcagaaagctggagaagaaggtgcagaccctgatcagagactgccaggtgatcagagagaccaaggaggaccagatcgccgagctgaagaagatctgcgagcagagcaccgagagcctgaacaacgactgggagaagaagctgcacaacgccgtggccgagatggagcaggagaagttcgacctgcagaagcagcacaccgagaacatccaggagctgctggaggacaccaacgtgagactgaacaagatggagagcgagtacatggcccagacccagagcaccaaccacatgatcaaggagctggaggccagagtgcagcagctgaccggcgaggccgagaacagcaacctgcagagacagaagctgatccaggagaaggccgagctggagagatgctaccagatcacctgcagcgagctgcaggaggtgaaggccagaagaaacaccctgcacaaggagaaggaccacctggtgaacgactacgagcagaacatgaagctgctgcagaccaagtacgacgccgacatcaacctgctgaagcaggagcacgccctgagcgccagcaaggccagcagcatgatcgaggagctggagcagaacgtgtgccagctgaagcagcagctgcaggagagcgagctgcagagaaagcagcagctgagagaccaggagaacaagttccagatggagaagagccacctgaagcacatctacgagaagaaggcccacgacctgcagagcgagctggacaagggcaaggaggacacccagaagaagatccacaagttcgaggaggccctgaaggagaaggaggagcagctgaccagagtgaccgaggtgcagagactgcaggcccagcaggccgacgccgccctggaggagttcaagagacaggtggagctgaacagcgagaaggtgtacgccgagatgaaggagcagatggagaaggtggaggccgacctgaccagaagcaagagcctgagagagaagcagagcaaggagttcctgtggcagctggaggacatcagacagagatacgagcagcagatcgtggagctgaagctggagcacgagcaggagaagacccacctgctgcagcagcacaacgccgagaaggacagcctggtgagagaccacgagagagagatcgagaacctggagaagcagctgagagccgccaacatggagcacgagaaccagatccaggagttcaagaagagagacgcccaggtgatcgccgacatggaggcccaggtgcacaagctgagagaggagctgatcaacgtgaacagccagagaaagcagcagctggtggagctgggcctgctgagagaggaggagaagcagagagccaccagagagcacgagatcgtggtgaacaagctgaaggccgagagcgagaagatgaagatcgagctgaagaagacccacgccgccgagaccgagatgaccctggagaaggccaacagcaagctgaagcagatcgagaaggagtacacccagaagctggccaagagcagccagatcatcgccgagctgcagaccaccatcagcagcctgaaggaggagaacagccagcagcagctggccgccgagagaagactgcaggacgtgagacagaagttcgaggacgagaagaagcagctgatcagagacaacgaccaggccatcaaggtgctgcaggacgagctggagaacagaagcaaccaggtgagatgcgccgagaagaagctgcagcacaaggagctggagagccaggagcagatcacctacatcagacaggagtacgagaccaagctgaagggcctgatgcccgccagcctgagacaggagctggaggacaccatcagcagcctgaagagccaggtgaacttcctgcagaagagagccagcatcctgcaggaggagctgaccacctaccagggcagaagatag

SEQ ID NO: 114675 - DNA, 2742 bp, Artificial Sequence
  derived and/or modified sequence
atggaggtgggtagtgaggaagagaaatgggagaaactcgatgcagaattcgatcacttcgtcgtggatatgaaacccttcgtgctgaaactgcctcataggacggagcgacaaagatgtgccctgtggattaggaaactctgtgagccaagtggtactggggccggtataatggggcgaaaaaatagaaacctgtacgctaagctcttgctgcacatgctcaagaggggagcccttgaggggccttttacacacagaccggaaccagggacattaaaaatcttgcctagctacatgagcatctattttgacgaacctaatccggctcgagctaagggatcgtcccccgaaggcttgccggcttgggtcctgggggagctggagacatcagagcacaaactaaacgagtcgtggaagctgtccagcggagaggacaacaccctggttcaatcccccacggacgtatattcacgtgagcagtacactggcaagctgcgggtcaggagccacagcttatccccaactcatcgcgaagatgggcagaacattacccccaagatttgtgaagtctactcgaagaagtcacccgtgagccttgatgattctgatatcgaggctcggctgaattcttggaatctgggcttagacatgaagacgaaaatgatggaggccaagtttcacgaggaaaagttgaagctgcaacagaagcatgatgcggatgtgcaaaagattctcgaaaggaagaacaatgagatagaggaactcaagactctctatcggtctaagcagcacgaaacggaggaaaccatccgaaagttggaaaaaaaggttcagacgctaatacgtgattgtcaggttatccgtgaaactaaagaggaccagattgcagagctgaagaaaatctgcgaacagtctacagagtcgctgaacaatgactgggagaagaaactgcacaatgctgtggcagagatggagcaggaaaaattcgatttacagaagcagcacactgagaatatccaagagttattggaggacacaaatgttcgccttaataaaatggagtcggagtacatggcgcagacacaaagtactaatcacatgattaaagagttagaggcgagagtgcagcaacttacgggggaagctgaaaactctaatctgcaacggcagaagcttattcaagaaaaggcagagctggagcggtgctaccagattacctgtagcgaactccaggaagtgaaagccagacggaatacgctgcacaaggagaaggaccatttagtcaacgactacgaacaaaatatgaagttgctgcagaccaagtatgacgccgacataaatcttctgaaacaggagcatgcactaagtgcttctaaagcttcctcaatgatcgaggagctggaacagaatgtgtgccaactgaagcagcaactccaggaatcagaactgcagcgcaaacagcaactgagggatcaggagaacaaattccaaatggaaaaaagtcaccttaagcacatctacgagaaaaaagcccatgatcttcagtctgagttggacaaaggtaaggaggatacccagaaaaagatccataaatttgaggaggcccttaaagagaaggaagaacagcttactagggtgaccgaagtgcagcggctccaagctcagcaggccgacgccgcacttgaagagttcaagcgccaggtcgagctgaattccgaaaaggtctatgctgagatgaaggaacagatggagaaggtagaggccgacctgacaaggagcaaatctttaagggagaaacagagcaaggaattcttatggcagctggaagacattcggcaacggtacgagcagcagatagtggagctgaagttagagcacgagcaggaaaagacacatttgcttcagcagcacaatgctgagaaagacagccttgttagggaccatgagcgcgagatcgagaaccttgaaaaacagttgagggccgctaatatggagcacgaaaatcagatccaggagtttaagaaacgagacgctcaggtaattgccgatatggaggcccaggtacacaagctgcgcgaggagctgataaatgtcaactcgcagcgtaagcaacaactagtggagctgggcctgcttcgagaagaggagaagcagcgcgcgacgcgggagcatgagatcgtggttaacaaactcaaagccgagagcgaaaagatgaagatcgagctgaagaaaacacacgcagctgaaaccgaaatgacattggagaaggccaactccaagctgaagcagatcgaaaaggaatacacccaaaaactcgccaagagcagccagattatcgccgagctgcagacaaccatctcctcacttaaggaggagaattcgcagcaacagctggccgcggagagacgactacaggatgttaggcagaaatttgaggatgaaaaaaaacagctcatcagagacaacgaccaggccatcaaggtcctgcaggacgagctggaaaatagaagtaaccaggttcgttgtgccgaaaaaaaactgcaacacaaggaactcgagtcccaagaacagattacatacatacggcaggaatatgagactaagctgaagggcctgatgccagcctcactgagacaggagcttgaagacaccatctcaagcctaaaaagtcaggtcaactttctgcaaaaacgcgctagcatcctccaggaggaactgactacgtaccagggacgccgctag

SEQ ID NO: 114676 - DNA, 2742 bp, Artificial Sequence
  derived and/or modified sequence
atggaggtgggcagcgaggaggagaagtgggagaagctggatgctgagtttgaccactttgtggtggacatgaagccctttgtgctgaagctgccccacaggacagagcggcagagatgtgccctgtggatcaggaagctgtgtgagcccagcggcactggagctggcatcatgggcaggaagaacagaaacctgtatgccaagctgctgctgcacatgctgaagagaggagccctggagggccccttcacccacaggcctgagcccggcaccctgaagatcctgcccagctacatgagcatctactttgatgagcccaacccagcccgggccaagggcagcagccctgagggcctgcctgcctgggtgctgggggagctggagaccagcgagcacaagctgaatgaatcctggaagctgagcagcggggaggacaacaccctggtgcagagccccacagatgtgtacagccgggagcagtacaccgggaagctgcgggtgcgcagccacagcctgagccccacccaccgggaggatggccagaacatcacccccaagatctgtgaggtgtacagcaagaagagccctgtgtccctggatgacagcgacatcgaggcccggctgaacagctggaacctgggcctggacatgaagaccaagatgatggaggccaagttccacgaggagaagctgaagctgcagcagaagcatgatgctgatgtgcagaagatcctggagaggaagaacaatgaaattgaggagctgaagaccctgtaccgcagcaagcagcacgagacagaggagaccatcaggaagctggagaagaaggtgcagaccctcatccgggactgccaggtgatccgggagaccaaggaggaccagattgctgagctgaagaagatctgtgagcagagcacagagagcctgaacaatgactgggagaagaagctgcacaatgctgtggccgagatggagcaggagaagtttgacctgcagaagcagcacacagagaacatccaggagctgctggaggacaccaacgtgcggctgaacaagatggagagcgagtacatggcccagacccagagcaccaaccacatgatcaaggagctggaggcccgggtgcagcagctgactggagaggccgagaacagcaacctgcagaggcagaagctgatccaggagaaggccgagctggagcgctgctaccagatcacctgcagcgagctgcaggaggtgaaggcccggaggaacaccctgcacaaggagaaggaccacctggtgaatgactatgagcagaacatgaagctgctgcagaccaagtatgatgctgacatcaacctgctgaagcaggagcacgccctgagcgccagcaaggccagctccatgattgaggagctggagcagaatgtgtgccagctgaagcagcagctgcaggagagcgagctgcagaggaagcagcagctgcgggaccaggagaacaagttccagatggagaagagccacctgaagcacatctatgagaagaaggcccatgacctgcagagcgagctggacaagggcaaggaggacacccagaagaagatccacaagtttgaggaggccctgaaggagaaggaggagcagctgaccagggtgacagaggtgcagaggctgcaggcccagcaggctgatgctgccctggaggagttcaagaggcaggtggagctgaacagcgagaaggtgtatgcagagatgaaggagcagatggagaaggtggaggccgacctgaccaggagcaagagcctgcgggagaagcagagcaaggagttcctgtggcagctggaggacatccggcagagatatgagcagcagatcgtggagctgaagctggagcacgagcaggagaagacccacctgctgcagcagcacaatgctgagaaggacagcctggtgcgggaccacgagcgggagattgagaacctggagaagcagctgcgggccgccaacatggagcacgagaaccagatccaggagttcaagaagagagatgcccaggtgattgctgacatggaggcccaggtgcacaagctgcgggaggagctgatcaacgtgaacagccagaggaagcagcagctggtggagctgggcctgctgcgggaggaggagaagcagagggccacccgggagcacgagatcgtggtgaacaagctgaaggccgagagcgagaagatgaagattgagctgaagaagacccatgctgctgagacagagatgaccctggagaaggccaacagcaagctgaagcagatcgagaaggagtacacccagaagctggccaagagcagccagatcatcgccgagctgcagaccaccatcagcagcctgaaggaggagaacagccagcagcagctggccgctgagcggcggctgcaggatgtgcggcagaagtttgaagatgagaagaagcagctgatccgggacaatgaccaggccatcaaggtgctgcaggatgagctggagaacagaagcaaccaggtgcgctgtgccgagaagaagctgcagcacaaggagctggagagccaggagcagatcacctacatccggcaggagtatgagaccaagctgaagggcctgatgcctgccagcctgcggcaggagctggaggacaccatcagcagcctgaagagccaggtgaacttcctgcagaagagggccagcatcctgcaggaggagctgaccacctaccagggcagaagatag

SEQ ID NO: 114677 - DNA, 2742 bp, Artificial Sequence
  derived and/or modified sequence
atggaggtgggcagcgaggaggagaagtgggagaagctggacgccgagttcgaccacttcgtggtggacatgaagccatttgtgctgaagctgccccaccgcaccgagcgccagcgttgcgctctgtggatccgtaaactctgtgaaccgagcgggacaggggcgggcatcatggggagaaagaaccgtaatttgtacgctaagctcctgctccatatgctgaagagaggggccctggaaggtccatttacccatcgacccgaaccgggaacgttgaagattctgcctagctacatgtccatctattttgatgagcccaatcctgcgcgggccaagggctctagccctgagggattgcctgcctgggtgctcggtgagctggaaacttcggaacataaactgaacgagtcttggaaactctcaagtggcgaggacaacactttggtacaatcccccactgatgtgtactctcgggagcaatatacaggaaagctgcgcgttagatctcactccctgtcccccactcaccgcgaagacggccagaacattacccccaagatttgcgaggtgtactcaaagaagagcccagtgtccctggacgacagtgatatagaggcccgtctcaattcctggaatctgggccttgatatgaagacaaaaatgatggaggccaaattccacgaagagaaattgaaattgcagcaaaaacatgatgctgatgtccaaaagattctggagcgcaaaaacaacgaaattgaagaattgaaaactctgtaccggtctaagcaacacgaaactgaggagacaatccgcaagctcgaaaagaaggtccaaactcttattagagattgtcaggtgataagagagaccaaggaggaccagatcgcggagctgaaaaaaatctgcgagcagagcacagaatctttaaataacgattgggaaaagaagctgcataatgcagtcgcagagatggagcaggaaaaattcgatttacagaagcagcacaccgagaatatccaggaactgctggaagacacaaacgtgcgtctcaataagatggaatcggagtacatggcacagacgcaaagtaccaaccatatgattaaagagctagaggccagggtacaacagcttactggcgaggcagagaactcaaaccttcagagacagaaattgatacaggaaaaggcagagctcgagcgatgctaccagataacctgttcagaactgcaggaggttaaagcacggcgaaacactttgcacaaagaaaaggaccatctggttaacgattatgaacaaaatatgaagctcctccagaccaagtacgatgccgacatcaatttgctgaaacaggaacacgctctgagcgcgtcgaaggccagctcaatgattgaagagctcgagcagaacgtgtgtcagctcaagcagcagctacaggaaagcgaactacaaagaaagcaacagctcagggatcaggagaacaagttccaaatggagaagagccacctgaagcatatttacgaaaagaaagcccatgacttacagtctgagttagacaagggcaaggaagatactcagaagaagatccacaagttcgaagaggcactcaaggagaaagaggaacagctgacccgagtcaccgaggtccaacgcttgcaggcgcagcaggcggatgcagcactcgaagaatttaaacggcaggtagagttaaattccgaaaaagtgtatgcggaaatgaaggagcagatggagaaagtagaggcagacctgacccggtcaaaatccctgagggagaagcaaagcaaagaatttctatggcaactggaggacatccgacagaggtatgagcagcagatcgtagagctgaaactcgaacacgaacaggaaaaaacccacctcctccagcagcataatgccgagaaagattccctagtccgggatcacgagagggagattgagaatctggaaaagcaattgcgggctgccaatatggaacatgagaaccaaattcaagaatttaagaagagggacgctcaggttatcgccgatatggaagcgcaggttcataaattgcgagaagaactgataaacgtaaacagccagcggaagcaacagctggtggaacttggcctgcttagagaagaagagaaacagagagcaacccgggaacacgagatcgtggtgaacaaattgaaggccgaaagtgagaaaatgaaaattgagttaaaaaagacacacgctgccgagaccgaaatgacactcgaaaaggctaattccaagttgaaacagatcgagaaagaatacacacaaaaattggccaagagctcccaaattatagctgagctgcagacaactatatcttctctaaaagaggaaaattcgcagcagcagttggccgccgagcgaagacttcaagatgttagacagaagtttgaagatgagaaaaaacagctaatcagggacaatgatcaggccatcaaggtgctgcaagatgagctcgagaaccggagcaatcaggttaggtgtgctgaaaaaaagctgcagcacaaggaacttgaaagccaagaacagatcacatatattcgccaggagtacgagaccaaactcaaaggcctcatgccggccagcctccgccaagagctggaggatacaatctccagtctgaaatcccaagttaactttctgcagaagcgcgcaagcatcctgcaggaggaactcactacttaccaaggacggaggtag

SEQ ID NO: 114678 - DNA, 2742 bp, Artificial Sequence
  derived and/or modified sequence
atggaagtagggagtgaagaggaaaaatgggagaaattggatgcagagttcgaccacttcgtagtcgatatgaagccatttgtcttgaaactcccgcatcgaaccgagagacaacggtgcgccctgtggattcgcaagctgtgtgaacctagcggcaccggggcaggcatcatgggcagaaagaacaggaatctgtacgcaaaactgctcctgcacatgctaaagaggggggcactggaaggcccttttactcacagaccagagcctgggaccctgaaaatcctcccatcgtatatgtctatatactttgacgagccaaaccccgctcgcgctaaaggctccagcccagaggggctgcccgcatgggtgttgggcgagttggaaacttcggagcacaaactgaacgaaagttggaagctgtccagtggtgaggataacaccttagtgcagagccctacggatgtttattcccgcgaacagtatactgggaaattgagagtccgctcccatagtctgagtccaacccatcgagaggatgggcagaacatcaccccaaagatctgtgaagtctattccaagaagtcccccgttagcttggacgactcggatatcgaagccagactaaactcatggaacctcgggcttgatatgaagacgaagatgatggaggccaagtttcacgaggaaaagctgaaattacaacagaagcacgacgcagacgtgcagaagatattggaacggaagaataacgaaatcgaagagctgaaaaccctgtatcgttctaaacaacatgagacggaggaaaccatacgaaagctcgaaaaaaaggtccagactttaattagagattgccaggtgatcagagaaacaaaggaggaccagatcgccgaactgaagaaaatttgcgagcagtccacagaatcactgaacaacgactgggagaagaagctgcacaacgctgtggccgaaatggaacaggaaaagttcgatctgcaaaagcaacacactgaaaacattcaggagctactcgaggacaccaacgtgaggctaaacaaaatggaatcagaatatatggcccaaacacagagtacaaatcatatgattaaggagctggaggctagggtgcagcaactgaccggtgaagctgaaaactctaacctccagcggcagaagctgattcaagagaaagctgagctggagcggtgctatcagattacatgttccgagcttcaggaggtgaaagcccgtcgtaatacactccacaaagagaaagatcatctcgtaaatgactatgagcagaacatgaagctgctgcagactaagtatgatgcagacattaatctcctgaaacaggaacatgcgctgagcgcttcaaaagcgagctcaatgatcgaagaacttgaacagaacgtgtgccaactgaaacagcagctgcaggagtccgaactccagcgtaagcagcagctgagagaccaagaaaataagtttcagatggaaaaatcacacctcaaacacatatatgagaaaaaagctcacgatcttcagtccgagcttgacaagggaaaggaggatacgcagaaaaagatccacaagtttgaggaagcgcttaaagaaaaagaagagcagctaacaagggtcaccgaggtgcagagactgcaagctcagcaagctgatgctgcacttgaggagtttaagaggcaagtggagctgaattcggagaaggtttacgccgagatgaaggagcagatggagaaggttgaagccgaccttaccaggtcaaagtctctcagggagaagcagtcaaaggagtttctatggcagctcgaggatatcaggcaaaggtacgagcagcaaattgttgaactgaaactggagcatgagcaagagaagacccatttgttacagcagcacaatgctgagaaggacagcctggtgagggatcatgagcgggaaattgaaaatttggagaagcagctgcgtgctgccaacatggaacacgaaaatcagatacaagagttcaagaaaagagacgcacaggtgattgcagacatggaggcacaggttcacaagttgagggaggagctgatcaatgtcaattctcaacgaaagcagcagctcgttgagctgggccttcttagagaagaggaaaagcagagagccacgcgggaacatgaaatcgtcgtcaacaaacttaaagcggagagtgagaagatgaaaattgagctgaaaaaaacgcacgccgcagagaccgagatgacacttgaaaaagccaattccaaactgaagcagatcgagaaagagtacactcagaaactcgccaaaagcagccagattattgccgagctccaaactaccatcagttccctgaaggaagaaaactcccagcagcagctggcagcggaacggaggttgcaggacgtgcggcagaagttcgaggacgagaagaagcagctaatccgcgacaatgaccaggcgattaaagtactccaggacgagctcgaaaaccgaagcaaccaggtccggtgtgctgagaagaagcttcagcataaagagctggagtcccaggaacagatcacatacatcaggcaagagtacgaaacaaagctgaagggtttgatgccagcatccttgcggcaggaattagaagacactatctcctctctgaagtcacaagttaattttttacagaaaagagcctcaattcttcaagaggagcttaccacttaccagggcaggcggtag

SEQ ID NO: 114679 - DNA, 2847 bp, Artificial Sequence
  derived and/or modified sequence
ggtttgcgactgggagaggaaatctgtgtcctggacaagattggattatggaagtgggaagtgaagaagaaaaatgggagaagctggatgcagaatttgatcactttgtggttgatatgaagccctttgttctaaaattacctcataggacagaacggcagaggtgtgctctttggattagaaagctgtgcgaaccttcaggaacaggtgcaggaataatggggaggaagaatcggaacctgtatgcaaaattgttattgcatatgcttaaacgaggtgcgcttgaaggcccttttacacaccgacctgaacccgggacactaaaaattctaccttcatacatgtccatctattttgatgaaccaaatccagcacgagcaaaaggttcaagcccagagggattaccagcctgggtactgggtgagctggagacaagtgaacacaaattaaatgaatcatggaaactctcttctggagaagataacactttagtacagtcgccaactgatgtctacagcagggaacagtacactgggaagctccgagtgagatcacactccttgagtccaactcacagagaagatggacaaaatattaccccaaagatttgtgaagtttattcgaaaaaatctcctgtttctttggatgatagtgacattgaagctcgccttaatagttggaatcttgggctggacatgaaaacaaaaatgatggaagctaaatttcatgaagaaaagcttaaactgcaacagaaacatgatgctgatgttcagaagattttagaaagaaagaataatgaaatagaagaactgaaaactttatacaggagtaaacaacatgaaactgaagagactattagaaagcttgaaaagaaagttcagacactgatacgtgactgtcaagttatcagagagactaaagaagaccagattgcagagctgaaaaagatatgtgaacaaagtacggaatctctaaataatgactgggaaaaaaagcttcacaatgctgtagcagaaatggaacaggaaaagtttgatcttcaaaagcaacacactgaaaacattcaagaattgcttgaggatacaaatgtgcgtctgaataaaatggagagtgaatacatggcgcaaacacagtccacaaaccacatgatcaaagaactggaggcccgtgtccagcagctgactggagaagcagagaacagtaatttacagaggcagaaattaattcaagaaaaagcagaacttgaaagatgttaccagataacgtgtagtgaattacaagaagtaaaggcaaggcgtaacacactgcataaagagaaggaccatcttgtaaatgattatgagcaaaacatgaaactgttacaaaccaaatatgatgctgatataaaccttctaaaacaagaacatgctctttcagcttctaaggcatctagtatgattgaagaattagagcagaatgtctgtcaattaaaacagcagttacaggaatcagaacttcaaagaaagcaacaactaagggatcaagaaaataagtttcagatggagaaaagtcatttaaaacacatctatgaaaaaaaggctcatgacttgcagagtgaacttgataaaggaaaagaagatactcaaaagaaaattcataaatttgaggaagctttgaaggaaaaagaggagcagctaactcgtgtgactgaagttcagaggttgcaggcccagcaggcagatgccgctctggaagagtttaagcggcaggtggaactgaactcagagaaagtctatgctgaaatgaaagagcagatggaaaaagtggaggcagatctaactagatccaaatctcttcgtgagaaacaatcaaaggagtttttatggcaactggaggacatcagacagcggtatgaacaacagatagtagagctgaagctggagcatgaacaggagaagacgcacctattacagcagcataacgcagagaaggatagcctagtccgagaccatgaacgggaaattgaaaacctggaaaaacagcttcgcgctgccaatatggagcacgaaaatcaaattcaggagttcaagaaacgagatgcacaggttattgccgacatggaggcccaggttcacaagttgagagaagaattgatcaatgtgaactcacagcggaaacagcagctggtagagcttggtcttcttcgtgaagaggaaaagcaaagggctacaagggaacatgagattgtcgtcaataaactgaaggctgaatcagaaaagatgaaaatagagctgaaaaagactcatgctgctgagacagagatgacactggaaaaggccaacagcaagctgaagcagattgagaaggaatacactcagaagcttgccaaatcttcacagatcatagcagaacttcagacaaccatttcctctctgaaagaagagaacagccagcagcagcttgctgcagaaaggcggctccaggatgttagacaaaagtttgaagatgagaagaagcagctgattagagataatgaccaagcaatcaaggttttacaagatgaattagaaaaccgttctaatcaggtgcgatgtgcagagaaaaaattacaacacaaagaattggagtcacaggaacagataacttacatacgacaagaatatgaaacaaaattgaaaggattgatgccagcatccctaagacaagaacttgaagacaccatttcctccctaaaatcacaggttaattttctgcaaaagagagcttccatccttcaggaagaactgactacatatcaaggcagaaggtaactgcacgagagaatgcaacggatgcaatttccaggctgtgctgtggacttcttccagc

SEQ ID NO: 114680 - protein, 206 aa, Artificial Sequence [sequence omitted]

SEQ ID NO: 114681 - protein, 117 aa, Artificial Sequence
  derived and/or modified sequence
TCRYLLVRRAECFDKAQSVCRRCYRGTLASIHSFSVNFGIQSAVRGINQGQVWIGGRIKGWGRCKRFRWVDGSSWNFAYWAAGQPCPGGGRCVTLCTQGGHWRLSHCVKRRPFICSY

SEQ ID NO: 114682 - protein, 117 aa, Artificial Sequence
  derived and/or modified sequence
TGRYLLVRRPECFNKAQLVCRSCYRGTLASIHSFSVNFRIQSFVRGINQGQVWIGGRIVGWGRCKRFRWIDGSSWNFAYWAAGQPRRGGGRCVTLCTRGGHWRRSGCGKRRPFICAY

SEQ ID NO: 114683 - protein, 119 aa, Artificial Sequence
  derived and/or modified sequence
TRGYVMVGSARTFNEAQWVCQRCYRGNLASIHSFAFNYQVQCTSAGLNVAQVWIGGQLRGKGRCRRFVWVDRTVWNFAYWARGQPWGGRQRGRCVTLCARGGHWRRSHCGKRRPFVCTY

SEQ ID NO: 114684 - protein, 222 aa, Artificial Sequence
  derived and/or modified sequence
MKLPLLLALLFGAVSALHLRSETSTFETPLGAKTLPEDEETPEQEMEETPCRELEEEEEWGSGSEDASKKDGAVESISVPDMVDKNLTCPEEEDTVKVVGIPGCQTCRYLLVRSLQTFSQAWFTCRRCYRGNLVSIHNFNINYRIQCSVSALNQGQVWIGGRITGSGRCRRFQWVDGSRWNFAYWAAHQPWSRGGHCVALCTRGGHWRRAHCLRRLPFICSY

SEQ ID NO: 114685 - DNA, 669 bp, Artificial Sequence
  derived and/or modified sequence
atgaaactgccactcctcctcgccctactgtttggagccgtgagtgcactgcatttacggtctgaaacctccaccttcgaaaccccactgggggccaagacactccccgaggacgaggagacaccagagcaggaaatggaggagactccatgccgggagcttgaggaggaggaggagtggggatcaggctcagaggacgcctccaagaaggacggggccgtggaatctatttcagttcctgacatggtcgacaagaaccttacgtgcccagaggaggaggacaccgtgaaggtagttgggatcccgggatgccagacttgcagatatctccttgtccgctccctacagaccttttcccaggcttggtttacctgtcgaaggtgctatcgcggtaacctcgtaagtatccacaattttaatatcaattatcggatccagtgcagtgtctccgcactgaatcagggacaggtttggatcggggggcggatcactgggtctggacgatgcagacgatttcaatgggtagatggaagccgatggaacttcgcctactgggcggcgcaccagccttggagccgtggagggcactgtgtagcgctgtgtacccgcggcggccactggcgcagagcacattgcctccgccggttgcccttcatctgctcatattag

SEQ ID NO: 114686 - DNA, 669 bp, Artificial Sequence
  derived and/or modified sequence
atgaagttgcccctcttactggcactcctctttggggcagtttccgctctgcatctgagaagtgagacatccactttcgaaaccccactgggagccaaaaccttgccagaggatgaagagacgccagaacaggagatggaggagaccccatgtagagaactcgaagaggaggaagaatggggttccggcagcgaggatgcgtcgaaaaaagacggggccgtggaaagtatttctgtccccgacatggtcgacaagaacttgacgtgccccgaggaggaagataccgtgaaggtggtgggcattccaggttgccaaacctgcagatatttactggtgcgcagccttcagacttttagtcaagcatggtttacctgtagacgttgctaccggggcaacctcgtttccatccataacttcaatattaactataggattcaatgttccgtgtccgcacttaatcaggggcaggtttggatcggtggaagaatcaccggatccggacgttgccgccgatttcagtgggtggacgggtcccggtggaacttcgcctattgggccgcccatcagccctggtcacggggagggcactgcgttgcgctctgcactcgcggtggacactggcggagagctcactgccttaggcggctgcctttcatctgcagctactag

SEQ ID NO: 114687 - DNA, 669 bp, Artificial Sequence
  derived and/or modified sequence
atgaagctgcccctgctgctggccctgctgtttggagctgtgtctgccctgcacctgcggtctgagaccagcacctttgagacccccctgggcgccaagaccctgcctgaagatgaggagaccccagagcaggagatggaggagaccccctgccgggagctggaggaggaggaggagtggggcagcggctctgaagatgccagcaagaaggatggagctgtggagagcatctctgtgcctgacatggtggacaagaacctgacctgcccagaggaggaggacacagtgaaggtggtgggcatccctggctgccagacctgccgctacctgctggtgcgcagcctgcagaccttcagccaggcctggttcacctgccgccgctgctaccggggcaacctggtgtccatccacaacttcaacatcaactaccgcatccagtgcagcgtgtctgccctgaaccagggccaggtgtggattggaggccgcatcaccggcagcggccgctgccgccgcttccagtgggtggatggcagccgctggaactttgcctactgggccgcccaccagccctggagccggggcggccactgtgtggccctgtgcacccggggcggccactggaggcgggcccactgcctgcggcggctgcccttcatctgcagctactag

SEQ ID NO: 114688 - DNA, 669 bp, Artificial Sequence
  derived and/or modified sequence
atgaagctgcccctgctgctggccctgctgttcggcgccgtgagcgccctgcacctgcgaagcgaaacctccacgttcgaaacaccactaggtgcaaagacactacccgaggacgaggagactcccgagcaggagatggaagaaaccccctgccgggaactggaagaggaggaggaatggggttcaggatccgaagacgccagtaaaaaggatggggccgtggaaagtatctctgtgccagacatggtcgacaaaaacctcacctgtccagaggaggaggacacagtcaaagtggtgggcatcccaggctgtcaaacctgtagatacctcctggtgaggtcgttgcaaaccttctcgcaggcatggttcacatgtaggagatgctaccgcggcaaccttgtcagcatccacaacttcaatattaactacaggatacagtgtagtgtcagcgccctcaaccaaggacaggtgtggattggaggtcgaattactggctccgggcgctgccgcagatttcagtgggtcgatggctcacgatggaatttcgcttactgggccgctcatcagccatggtccagaggcgggcactgcgttgctctttgtactcggggcggccactggcgacgagctcactgtttacgccgcctgcccttcatttgttcttactag

SEQ ID NO: 114689 - DNA, 669 bp, Artificial Sequence
  derived and/or modified sequence
atgaagctgcccctgctgctggccctgctgttcggcgccgtgagcgctcttcacctgcgatcagagacttctacattcgagaccccgctgggggctaagacactacctgaggacgaggagacaccggagcaggagatggaagagaccccctgtagggagctggaggaagaggaggagtggggttccgggagtgaggatgcttcgaaaaaggacggagcggtcgaaagtatttcggtcccagacatggtagataagaacctaacttgcccggaggaagaagatacagttaaggtggttggaattcctggttgtcagacctgcaggtatctgctggttaggagccttcagacattcagccaagcttggtttacatgccgccggtgttaccggggaaacttggtttcaattcacaactttaacatcaactatcggatccaatgttccgtttcagctctgaaccagggccaggtctggatcggcggccgcattaccggttcagggagatgtcggaggttccagtgggtggatggtagcaggtggaattttgcctactgggctgcacaccagccctggtcgaggggaggccattgcgtggccctgtgcacacgcggcgggcactggcgaagggcccattgcttaagaaggctgccttttatctgctcatactag

SEQ ID NO: 114690 - DNA, 669 bp, Artificial Sequence
  derived and/or modified sequence
atgaagctgccccttctgctcgccctgctctttggagcagtgtcagccctgcacttaagatccgagaccagcacttttgagacacccttgggagctaagaccttgcctgaggatgaagagacgccagagcaggagatggaggagaccccatgcagagagctagaggaggaggaagaatggggttcaggatcagaagatgcgagtaaaaaggacggagcagtcgagtctatatcggttcctgacatggtggataagaacttaacatgccctgaagaagaagacaccgtgaaggtagtgggcattccaggatgtcagacgtgtcgctacctactcgtcagaagcttacagacgttctcacaggcctggttcacctgccggaggtgctaccgagggaacctcgtctcaatacacaatttcaatattaactacaggattcaatgctctgtcagcgctttgaatcaaggacaagtatggattgggggtaggattactggaagcgggcgttgcaggcgtttccaatgggtggacggatctcggtggaactttgcctattgggctgcccaccagccctggagtagaggagggcattgcgtggcactttgcactcgcggaggacattggcgacgtgcgcactgtctcaggaggctgcctttcatctgctcgtattag

SEQ ID NO: 114691 - DNA, 669 bp, Artificial Sequence
  derived and/or modified sequence
atgaagctgccactgctgctcgccctgctctttggtgcagtttcagctctccacttgcgcagtgaaacgtccacattcgagacaccactcggggcaaaaaccctccccgaggacgaggagactccggagcaggagatggaggagaccccttgcagagagctagaagaggaagaagagtggggatcaggatccgaagacgccagtaagaaagatggtgctgttgaatccattagtgtccctgatatggtggacaagaacctgacctgccccgaggaggaggatacagttaaggtcgtgggcatccctgggtgccagacatgcaggtacctactggtgcggtctctgcaaaccttttctcaggcctggtttacatgtcgaagatgttacaggggtaaccttgtgagcatccacaattttaatatcaattaccgcattcagtgtagcgtttctgcactgaaccaaggccaggtttggatcgggggtcgcatcaccggaagcggtcggtgcagacgcttccagtgggtggacgggtctcgctggaatttcgcctactgggctgcccatcagccctggagcagagggggtcattgtgtggcgctatgtactagggggggacactggcggagagcacattgcctaaggcggctgcccttcatttgtagttattag

SEQ ID NO: 114692 - DNA, 1424 bp, Artificial Sequence
  derived and/or modified sequence
aggaagcaaagaaggacctgggctttgggaagatctaaagacccaggaaggtctctgggtgggataaagccaagatgaaactccccttacttctggctcttctatttggggcagtttctgctcttcatctaaggtctgagacttccacctttgagacccctttgggtgctaagacgctgcctgaggatgaggagacaccagagcaggagatggaggagaccccttgcagggagctggaggaagaggaggagtggggctctggaagtgaagatgcctccaagaaagatggggctgttgagtctatctcagtgccagatatggtggacaaaaaccttacgtgtcctgaggaagaggacacagtaaaagtggtgggcatccctgggtgccagacctgccgctacctcctggtgagaagtcttcagacgtttagtcaagcttggtttacttgccggaggtgctacaggggcaacctggtttccatccacaacttcaatattaattatcgaatccagtgttctgtcagcgcgctcaaccagggtcaagtctggattggaggcaggatcacaggctcgggtcgctgcagacgctttcagtgggttgacggcagccgctggaactttgcatactgggctgctcaccagccctggtcccgcggtggtcactgcgtggccctgtgtacccgaggaggccactggcgtcgagcccactgcctcagaagacttcctttcatctgttcctactgagctggtcccagccagcagttcagagctgccctctcctgggcagctgcctcccctcctctgcttgccatccctccctccacctccctgcaataaaatgggttttactgaaatggatttattttctcctctgatcgcggatccactctgcttagccctcattgaaacttcttccttatcatctctccccacaccacaactttcatagaagtgtcagaagctactactccttgaggaggaggatggagggtggagttgggtctatggagccttttggagatggaggaatgggctcagctagttctcttcatagaacacctgattactgggcacctgcatagtgctgccaggacctttcaaggttgtaggtagactcccaatggcccagtttgcatctctgtaaccaaaggccttttctctctctctctccaaccccagaactgtggttggttttatatgtaaggaagttaacatgtccctgggaacagtccacaacattcaggaatgaatgtataagtaccgcaatccccggcccctcaagtggaataaatctaacatgtattgggcaccatttcccagtggcctgctgtggtagttggccttattccatgcatttttatgggctgccttcccttcctcaactgcattctctgctccttcctactctctgcaactcccaaataa

SEQ ID NO: 114693 - DNA, 1367 bp, Artificial Sequence
  derived and/or modified sequence
gctttgggaagatctaaagacccaggaaggtctctgggtgggtgagtgctttctctgctgtggtggagctggtgacagtttattctcccaggaggtccctggctgtggctgacagtttctggagggctggcaggcgtctacctgtggctttcaggataaagccaagatgaaactccccttacttctggctcttctatttggggcagtttctgctcttcatctaaggtctgagacttccacctttgagacccctttgggtgctaagacgctgcctgaggatgaggagacaccagagcaggagatggaggagaccccttgcagggagctggaggaagaggaggagtggggctctggaagtgaagatgcctccaagaaagatggggctgttgagtctatctcagtgccagatatggtggacaaaaaccttacgtgtcctgaggaagaggacacagtaaaagtggtgggcatccctgggtgccagacctgccgctacctcctggtgagaagtcttcagacgtttagtcaagcttggtttacttgccggaggtgctacaggggcaacctggtttccatccacaacttcaatattaattatcgaatccagtgttctgtcagcgcgctcaaccagggtcaagtctggattggaggcaggatcacaggctcgggtcgctgcagacgctttcagtgggttgacggcagccgctggaactttgcatactgggctgctcaccagccctggtcccgcggtggtcactgcgtggccctgtgtacccgaggaggccactggcgtcgagcccactgcctcagaagacttcctttcatctgttcctactgagctggtcccagccagcagttcagagctgccctctcctgggcagctgcctcccctcctctgcttgccatccctccctccacctccctgcaataaaatgggttttactgaaatggatttattttctcctctgatcgcggatccactctgcttagccctcattgaaacttcttccttatcatctctccccacaccacaactttcatagaagtgtcagaagctactactccttgaggaggaggatggagggtggagttgggtctatggagccttttggagatggaggaatgggctcagctagttctcttcatagaacacctgattactgggcacctgcatagtgctgccaggacctttcaaggttgtaggtagactcccaatggcccagtttgcatctctgtaaccaaaggccttttctctctctctctccaaccccagaactgtggttggttttatatgtaaggaagttaacatgtccctgggaacagtccacaacattcaggaatgaatgtataagtaccgcaatccccggccc

SEQ ID NO: 114694 - DNA, 669 bp, Artificial Sequence
  derived and/or modified sequence
atgaagctgcccctgctgctggccctgctgttcggcgccgtgagcgccctgcacctgagaagcgagaccagcaccttcgagacccccctgggcgccaagaccctgcccgaggacgaggagacccccgagcaggagatggaggagaccccctgcagagagctggaggaggaggaggagtggggcagcggcagcgaggacgccagcaagaaggacggcgccgtggagagcatcagcgtgcccgacatggtggacaagaacctgacctgccccgaggaggaggacaccgtgaaggtggtgggcatccccggctgccagacctgcagatacctgctggtgagaagcctgcagaccttcagccaggcctggttcacctgcagaagatgctacagaggcaacctggtgagcatccacaacttcaacatcaactacagaatccagtgcagcgtgagcgccctgaaccagggccaggtgtggatcggcggcagaatcaccggcagcggcagatgcagaagattccagtgggtggacggcagcagatggaacttcgcctactgggccgcccaccagccctggagcagaggcggccactgcgtggccctgtgcaccagaggcggccactggagaagagcccactgcctgagaagactgcccttcatctgcagctactag

SEQ ID NO: 114695 - protein, 460 aa, Artificial Sequence
  derived and/or modified sequence
MRVYIFLCLMCWVRSDNKRPCLEFSQLSVKDSFRDLFIPRIETILMMYTRNNLNCAEPLFEQNNSLNVNFNTQKKTVWLIHGYRPVGSIPLWLQNFVRILLNEEDMNVIVVDWSRGATTFIYNRAVKNTRKVAVSLSVHIKNLLKHGASLDNFHFIGVSLGAHISGFVGKIFHGQLGRITGLDPAGPRFSRKPPYSRLDYTDAKFVDVIHSDSNGLGIQEPLGHIDFYPNGGNKQPGCPKSIFSGIQFIKCNHQRAVHLFMASLETNCNFISFPCRSYKDYKTSLCVDCDCFKEKSCPRLGYQAKLFKGVLKERMEGRPLRTTVFLDTSGTYPFCTYYFVLSIIVPDKTMMDGSFSFKLLNQLGMIEEPRLYEKNKPFYKLQEVKILAQFYNDFVNISSIGLTYFQSSNLQCSTCTYKIQRLMLKSLTYPERPPLCRYNIVLKDREEVFLNPNTCTPKNT

SEQ ID NO: 114696 - DNA, 1383 bp, Artificial Sequence
  derived and/or modified sequence
atgcgcgtgtacatcttcctgtgcctgatgtgttgggtgcgctctgataataaaagaccgtgcttagagttcagccagttgtcagtgaaagattcctttagggacctcttcatcccgagaatcgaaaccatactgatgatgtatactcggaacaatcttaattgcgccgaaccccttttcgagcaaaataattctcttaacgtgaactttaacactcagaaaaaaacggtctggctgatccatggatacaggcccgttgggtcaattcccctctggttacagaatttcgtaaggatcctacttaacgaggaggacatgaatgtcatcgtggtggactggagtagaggggcaaccacattcatttacaacagggccgtgaagaacacgaggaaggtagccgtctccttgtccgtccacattaaaaatcttctgaaacacggtgcctcgttggataacttccacttcattggggtctccttgggcgcacacatttcggggttcgttggcaagatcttccatggccagctgggccgaatcacgggtctggaccctgctgggcctcgcttctctcgcaaacccccgtattcgagactagactatacggatgccaaatttgttgacgtcatccactccgattctaatgggctgggcatccaggagcccctgggtcacatcgacttctacccaaacggtggaaacaaacagcccggatgccctaagtcgattttttcaggcatccagtttattaagtgtaaccaccagagggctgtgcacttattcatggcctccttggaaacgaactgtaacttcatcagcttcccgtgccgctcatacaaggattataagacctccctctgtgtcgactgcgactgcttcaaagagaaatcttgcccacggctgggttaccaagcgaaactgtttaagggcgtcctgaaggagagaatggaaggtagaccattgcgcacaacagtttttttggatacctcaggcacctaccctttttgcacctactatttcgtcctttctataatcgtacctgacaagacaatgatggatggctcgttcagcttcaaactgctgaaccagttaggcatgatcgaggaacctaggttatacgaaaaaaataagcccttttataagctgcaggaggtgaagatactcgctcaattctataatgattttgtaaacattagctctattggtctcacatacttccagtccagcaaccttcagtgcagcacatgtacctacaaaatccaaagactaatgctgaagagcctcacctacccagagaggcctcccctttgtcgatacaatatcgtgctgaaggatagagaagaggtttttctgaatcctaatacttgcactccgaagaatacttag

SEQ ID NO: 114697 - DNA, 1383 bp, Artificial Sequence
  derived and/or modified sequence
atgagggtgtacatcttcctgtgcctgatgtgctgggtgcggagtgacaacaagaggccctgcctggagttcagccagctgtctgtgaaggacagcttccgggacctcttcatccccagaattgagaccatcctgatgatgtacaccaggaacaacctgaactgtgccgagcccctgtttgagcagaacaacagcctgaatgtgaacttcaacacccagaagaagacagtgtggctgattcatggctacagacctgtgggcagcatccccctgtggctgcagaactttgtgcgcatcctgctgaatgaggaggacatgaatgtgattgtggtggactggagcagaggagccaccaccttcatctacaacagagctgtgaagaacaccaggaaggtggccgtgtccctgtctgtgcacatcaagaacctgctgaagcacggggccagcctggacaacttccacttcatcggcgtgtccctgggcgcccacatcagcggctttgtgggcaagatcttccacggccagctgggccgcatcaccggcctggaccctgctggcccccgcttcagcaggaagccaccctacagccggctggactacacagatgccaagtttgtggatgtgatccacagcgacagcaatggcctgggcatccaggagcccctgggccacatcgacttctaccccaacggcggcaacaagcagcccggctgccccaagagcatcttcagcggcatccagttcatcaagtgcaaccaccagagagctgtgcacctgttcatggccagcctggagaccaactgcaacttcatctccttcccctgccgcagctacaaggactacaagaccagcctgtgtgtggactgtgactgcttcaaggagaagagctgcccccggctgggctaccaggccaagctgttcaagggcgtgctgaaggagaggatggagggccggcccctgcggaccaccgtcttcctggacaccagcggcacctaccccttctgcacctactactttgtgctgagcatcatcgtgcctgacaagaccatgatggatggcagcttctccttcaagctgctgaaccagctgggcatgattgaggagccccggctgtatgagaagaacaagcccttctacaagctgcaggaggtgaagatcctggcccagttctacaatgactttgtgaacatcagcagcatcggcctgacctacttccagagcagcaacctgcagtgcagcacctgcacctacaagatccagaggctgatgctgaagagcctgacctacccagagaggcctcccctgtgccgctacaacatcgtgctgaaggaccgggaggaggtgttcctgaaccccaacacctgcacccccaagaacacctag

SEQ ID NO: 114698 - DNA, 1563 bp, Artificial Sequence
  derived and/or modified sequence
atgagagtatacatttttctttgtttgatgtgctgggtgagatctgataataaaagaccatgccttgaattctctcagctaagtgtaaaggattccttcagagatttatttattccgagaatagagaccattctgatgatgtatacaaggaacaacctaaactgtgctgagccactgtttgaacaaaataactcacttaatgttaatttcaacacacaaaagaaaacagtctggcttattcacggatacagaccagtaggctccatcccattatggcttcagaacttcgtaaggattttgctgaatgaagaagatatgaatgtaattgtagtagactggagccggggtgctacaacttttatttataatagagcagttaaaaacaccagaaaagttgctgtgagtttgagtgtgcacattaaaaatcttttgaagcatggtgcatctcttgacaattttcatttcataggtgtgagcttaggggctcatatcagtggatttgttggaaagatatttcatggtcaacttggaagaataacaggtcttgaccctgctgggccaaggttctccagaaaaccaccatatagcagattagattacacggatgcaaagtttgtggatgtcatccattctgactccaatggtttaggcattcaagagcccttgggacatatagatttttatccaaatggaggaaataaacaacctggctgtcctaaatcaattttctcaggaattcaattcattaaatgcaaccaccagagagcagttcacttgttcatggcatctttagaaacaaactgcaattttatttcatttccttgtcgttcatacaaagattacaagactagcttatgtgtggactgtgactgttttaaggaaaaatcatgtcctcggctgggttatcaagccaagctatttaaaggtgttttaaaagaaaggatggaaggaagacctcttaggaccactgtgtttttggatacaagtggtacatatccattctgtacctattattttgttctcagtataattgttccagataaaactatgatggatggctcgttttcatttaaattattaaatcagcttggaatgattgaagagccaaggctttatgaaaagaacaaaccattttataaacttcaagaagtcaagattcttgctcaattttataatgactttgtaaatatttcaagcattggtttgacatatttccagagctcaaatctgcagtgttccacatgcacatacaagatccagagactcatgttaaaatcacttacatacccagaaagaccaccactttgcaggtataatattgtacttaaagacagagaggaagtgtttcttaatccaaacacatgtacaccaaagaacacataagatgccttcttccatcaaatgcacttgcttgtgaattaatggacttgtaaatgaaacaatgcaatcagtcttttataatgcactgttcaatttgagattcaagtatttctatttcttggaaaaaattttaagaatcaaaaataaagaaaataaaaaatgcatacagttaaacattccaaa

SEQ ID NO: 114699 - DNA, 1383 bp, Artificial Sequence
  derived and/or modified sequence
atgcgggtgtacatcttcctgtgcctgatgtgctgggtgcggagcgacaacaagaggccatgccttgagttcagtcagctgtccgtgaaagactcattccgcgacctgttcatcccccggattgaaaccatcctcatgatgtatacacgcaataacctgaactgtgctgaacccctgttcgagcagaataatagccttaatgttaatttcaacacccagaaaaaaaccgtgtggcttatccacggctatagacctgtgggatccataccattatggctccaaaatttcgtcaggatcctgctgaatgaagaggatatgaatgtgattgtggttgattggtcccgaggggcaaccacatttatctataatagagcagtgaagaacactcgcaaggtggctgtgtcgctgtccgtgcacattaagaatcttcttaaacatggagcctccctggataactttcacttcattggcgtctccctgggagcacatatcagcggcttcgttggtaagatctttcatggacaactgggtaggattaccgggttagatcctgctgggcctcgattctctaggaaaccaccttactctcgcctggactatactgacgcaaagtttgtcgatgttatccattcagattcaaatggcctgggcatccaggagccgctcggacacatcgacttttaccccaacgggggcaataaacagcctggctgtccaaagtctattttttctggaattcagtttatcaagtgcaatcaccagcgggctgtgcaccttttcatggcgtcacttgaaactaactgcaatttcatcagcttcccatgtaggagttataaagactataagacatccttatgtgttgactgtgattgctttaaggagaaatcctgtcctcgcttaggctaccaggctaagttgttcaaaggcgttttgaaagagagaatggaaggaaggccactgaggaccaccgtgttcttagataccagtggcacctatccattctgtacctactacttcgtcctcagtataattgtccccgacaagactatgatggatggaagcttttccttcaaactgctaaaccagctcgggatgatcgaggaacctcgcttatatgagaagaataaacctttttataagctacaagaagtgaagatacttgcccaattctacaatgactttgtgaatattagcagtataggactgacgtactttcagtcatcaaacctgcagtgttcaacctgtacatataagatacaacgcctgatgttgaaatccctcacctaccctgagagaccccccttgtgtaggtacaatattgtgttaaaggaccgagaagaggtgtttttaaaccccaatacatgcaccccaaaaaacacgtag

SEQ ID NO: 114700 - DNA, 1383 bp, Artificial Sequence
  derived and/or modified sequence
atgcgggtctacatcttcctgtgtctcatgtgttgggtgcgttcagacaacaaacgcccttgtctggagttttcacagctttctgtcaaggactcatttcgagacctgttcattccccgtatagagacaatactgatgatgtacacacgaaataatcttaattgtgcagagcctttgtttgaacaaaataacagtctcaatgtgaattttaatacacagaaaaaaacagtttggctcatccacggatacaggcccgtaggctcaatacctctatggctgcagaactttgtccgcatcctgctgaacgaggaagatatgaacgtgattgtagtggattggtcccggggagccacaacttttatttataatcgcgctgtgaaaaacaccagaaaggtcgcagtctctctgagcgtccacataaaaaatctcctgaagcatggcgcttccttagataacttccacttcatcggtgttagcctcggagcgcatatctctggtttcgttgggaaaatctttcatggccagttgggccgaattacaggcctagacccggcaggccctaggttctcgcggaaaccgccttactccaggctggactatacagatgctaagttcgtggatgtaatacacagtgactccaacggattaggcatccaggaaccactgggtcatattgacttctaccccaatgggggaaacaaacaacctggctgtccaaagagcatctttagcggaattcagtttattaagtgtaaccaccagagggccgtgcacctgttcatggctagcctagaaactaactgtaatttcattagttttccctgtaggagctacaaagactacaagacatcgctgtgcgtggattgtgattgcttcaaggagaagagctgtcccaggctcggctaccaagccaaactgtttaaaggagtcctcaaggagaggatggagggtcggccactaagaacgacagtgtttttggatacgagtgggacctatccattttgtacctactatttcgttctctctatcattgtgccagacaagacgatgatggatggttctttttctttcaaactcctgaaccagctcgggatgattgaggaacctaggctgtatgagaagaacaaaccattttacaagttgcaggaagtcaagatccttgcccagttctacaacgattttgtgaacatctcctcgattggcctgacttacttccagtccagcaacctccagtgctcaacttgtacttacaagatacagcgccttatgctgaagagtttaacatacccggaaaggccacctctgtgtcggtataatattgtcctgaaagatcgcgaagaggtgttcctcaatcccaatacatgtacacctaagaacacctag

SEQ ID NO: 114701 - DNA, 1383 bp, Artificial Sequence
  derived and/or modified sequence
atgagagtgtacatcttcctgtgcctgatgtgctgggtgagaagcgacaacaagagaccctgcctggagttcagccagctgagcgtgaaggacagcttcagagacctgttcatccccagaatcgagaccatcctgatgatgtacaccagaaacaacctgaactgcgccgagcccctgttcgagcagaacaacagcctgaacgtgaacttcaacacccagaagaagaccgtgtggctgatccacggctacagacccgtgggcagcatccccctgtggctgcagaacttcgtgagaatcctgctgaacgaggaggacatgaacgtgatcgtggtggactggagcagaggcgccaccaccttcatctacaacagagccgtgaagaacaccagaaaggtggccgtgagcctgagcgtgcacatcaagaacctgctgaagcacggcgccagcctggacaacttccacttcatcggcgtgagcctgggcgcccacatcagcggcttcgtgggcaagatcttccacggccagctgggcagaatcaccggcctggaccccgccggccccagattcagcagaaagcccccctacagcagactggactacaccgacgccaagttcgtggacgtgatccacagcgacagcaacggcctgggcatccaggagcccctgggccacatcgacttctaccccaacggcggcaacaagcagcccggctgccccaagagcatcttcagcggcatccagttcatcaagtgcaaccaccagagagccgtgcacctgttcatggccagcctggagaccaactgcaacttcatcagcttcccctgcagaagctacaaggactacaagaccagcctgtgcgtggactgcgactgcttcaaggagaagagctgccccagactgggctaccaggccaagctgttcaagggcgtgctgaaggagagaatggagggcagacccctgagaaccaccgtgttcctggacaccagcggcacctaccccttctgcacctactacttcgtgctgagcatcatcgtgcccgacaagaccatgatggacggcagcttcagcttcaagctgctgaaccagctgggcatgatcgaggagcccagactgtacgagaagaacaagcccttctacaagctgcaggaggtgaagatcctggcccagttctacaacgacttcgtgaacatcagcagcatcggcctgacctacttccagagcagcaacctgcagtgcagcacctgcacctacaagatccagagactgatgctgaagagcctgacctaccccgagagaccccccctgtgcagatacaacatcgtgctgaaggacagagaggaggtgttcctgaaccccaacacctgcacccccaagaacacctag

SEQ ID NO: 114702 - protein, 156 aa, Artificial Sequence
  derived and/or modified sequence
MNVIVVDWSRGATTFIYNRAVKNTRKVAVSLSVHIKNLLKHGASLDNFHFIGVSLGAHISGFVGKIFHGQLGRITGLDPAGPRFSRKPPYSRLDYTDAKFVDVIHSDSNGIQFIKCNHQRAVHLFMASLETNCNFISFPCRSYKDYKTSLCVDCDC

SEQ ID NO: 114703 - protein, 141 aa, Artificial Sequence
  derived and/or modified sequence
  misc_feature (1)..(1): Xaa can be any naturally occurring amino acid
XYNRAVKNTRKVAVSLSVHIKNLLKHGASLDNFHFIGVSLGAHISGFVGKIFHGQLGRITGLDPAGPRFSRKPPYSRLDYTDAKFVDVIHSDSNGIQFIKCNHQRAVHLFMASLETNCNFISFPCRSYKDYKTSLCVDCDC

SEQ ID NO: 114704 - DNA, 471 bp, Artificial Sequence
  derived and/or modified sequence
atgaacgtgatcgttgtggattggagtcggggagccaccacattcatctataaccgtgcggttaagaacactagaaaagtcgccgtcagtctttccgttcacatcaagaatcttttgaaacacggcgcctccctggacaacttccacttcatcggggtcagtctgggagcccatataagcgggttcgttggtaaaatctttcatgggcaacttggtagaataactggtctggacccggcaggcccacgattctcccgaaaaccaccctattcccgactcgattacacagatgccaagtttgtggacgtcatccacagcgacagtaacggaattcagtttataaagtgcaatcaccagagagccgtacacctcttcatggcctcactcgaaacaaactgcaatttcattagctttccgtgtcgttcgtataaagactacaaaacttctctgtgcgtagactgcgactgttag

SEQ ID NO: 114705 - DNA, 426 bp, Artificial Sequence
  derived and/or modified sequence
tagtacaaccgcgcggttaagaacacgcggaaggtagctgtgtccctctccgtgcatattaaaaacctgctgaagcacggcgcttcactcgataactttcatttcatcggcgtctccttgggggcccacattagtggcttcgtcgggaagattttccatggccagctcgggagaatcacaggactggatcccgcaggacctcgcttttcccgcaagcccccatactccagattggattacactgatgcaaagttcgtggatgttatccatagcgatagcaacgggatacagttcatcaaatgtaaccaccagcgagccgtacacctttttatggccagcctggaaaccaactgcaattttatttcattcccttgcagatcatacaaggactataagacatctctgtgcgtggactgtgattgttag

SEQ ID NO: 114706 - DNA, 471 bp, Artificial Sequence
  derived and/or modified sequence
atgaatgtcatcgtggtggactggagcagaggagccaccaccttcatctacaacagagctgtgaagaacaccaggaaggtggccgtgtccctgtctgtgcacatcaagaacctgctgaagcatggagccagcctggacaacttccacttcatcggcgtgtccctgggcgcccacatcagcggctttgtgggcaagatcttccacggccagctgggccgcatcaccggcctggaccctgctggcccccgcttcagcaggaagccaccctacagccggctggactacacagatgccaagtttgtggatgtgatccacagcgacagcaatggcatccagttcatcaagtgcaaccaccagagagctgtgcacctgttcatggccagcctggagaccaactgcaacttcatctccttcccctgccgcagctacaaggactacaagaccagcctgtgtgtggactgtgactgctag

SEQ ID NO: 114707 - DNA, 426 bp, Artificial Sequence
  derived and/or modified sequence
tgatacaacagagctgtgaagaacaccaggaaggtggccgtgtccctgtctgtgcacatcaagaacctgctgaagcacggggccagcctggacaacttccacttcatcggcgtgtccctgggcgcccacatcagcggctttgtgggcaagatcttccacggccagctgggccgcatcaccggcctggaccctgctggcccccgcttcagcaggaagccaccctacagccggctggactacacagatgccaagtttgtggatgtgatccacagcgacagcaatggcatccagttcatcaagtgcaaccaccagagagctgtgcacctgttcatggccagcctggagaccaactgcaacttcatctccttcccctgccgcagctacaaggactacaagaccagcctgtgtgtggactgtgactgctag

SEQ ID NO: 114708 - DNA, 421 bp, Artificial Sequence
  derived and/or modified sequence
ttataatagagcagttaaaaacaccagaaaagttgctgtgagtttgagtgtgcacattaaaaatcttttgaagcatggtgcatctcttgacaattttcatttcataggtgtgagcttaggggctcatatcagtggatttgttggaaagatatttcatggtcaacttggaagaataacaggtcttgaccctgctgggccaaggttctccagaaaaccaccatatagcagattagattacacggatgcaaagtttgtggatgtcatccattctgactccaatggaattcaattcattaaatgcaaccaccagagagcagttcacttgttcatggcatctttagaaacaaactgcaattttatttcatttccttgtcgttcatacaaagattacaagactagcttatgtgtggactgtgactgt

SEQ ID NO: 114709 - DNA, 471 bp, Artificial Sequence
  derived and/or modified sequence
atgaacgtgatcgtggtggactggagccggggcgccaccaccttcatttataacagagctgtcaaaaacacaagaaaagtcgcggtgagcctgagcgtgcatattaagaatttattaaaacatggagcctcactagacaactttcattttataggtgtctctctgggagcgcatatatccggctttgtgggaaagatattccacgggcaactcggtagaattacaggcctggacccggccgggcctagattttctaggaagccaccttatagtcggcttgattatacagatgctaagttcgtggatgttatccacagcgacagtaacggaatccagtttattaagtgtaatcaccagcgagccgtgcatctgttcatggcgtcacttgagacgaactgcaatttcatctcctttccttgtagatcttataaggattataagactagtctatgcgtcgactgcgactgctag

SEQ ID NO: 114710 - DNA, 426 bp, Artificial Sequence
  derived and/or modified sequence
tgatacaaccgggccgtgaagaacacccggaaggtggccgtgagccttagcgttcacattaaaaacctgttgaagcacggcgccagcctcgacaatttccacttcattggcgtctctttgggcgcacacatatctggcttcgtaggcaagatctttcacggacagctaggacggatcacggggttggaccccgcaggaccaagattctctcgcaaaccaccatactcaagactggactacaccgacgccaagtttgtggacgtgattcatagtgattcaaacggaatccagtttatcaagtgtaaccatcagcgcgcagtccatctgttcatggccagtctcgaaacaaactgtaacttcatttcctttccctgtaggtcgtacaaggactacaaaacgtccctctgtgtggactgcgattgctag

SEQ ID NO: 114711 - DNA, 471 bp, Artificial Sequence
  derived and/or modified sequence
atgaacgtgattgtagtcgattggagccggggagcaaccacctttatctacaacagggccgttaaaaacactcgaaaggtggctgtgagcctgagtgttcacatcaagaatcttctgaagcacggggcaagcctggataattttcactttattggggtctctctcggagctcacatttccgggttcgtgggcaagatattccatggtcagcttggcaggatcactgggctggaccccgcagggccacggttctctcgaaaacccccttatagtcggctcgactacaccgatgccaagttcgtggacgtgattcatagtgactctaacggcatacaattcattaaatgtaatcaccaacgcgctgtccacttgtttatggcgtccttggagactaactgtaactttatttcctttccatgtcggagctacaaggactacaagacgagtttatgtgtggactgcgactgctag

SEQ ID NO: 114712 - DNA, 426 bp, Artificial Sequence
  derived and/or modified sequence
taatataaccgtgctgttaaaaatacccgcaaggtagccgtgagtctttcagttcatatcaaaaatctcctcaaacacggagcatcactggacaattttcacttcataggcgtcagtctgggtgcgcacatttcagggttcgtcgggaagatatttcatgggcagttagggcgtatcaccgggctggacccagctggccctcgattttcccgaaagcccccttattcacgcctggactacactgacgcaaagttcgtggacgttatacattcagattctaatgggattcagttcatcaaatgtaaccatcaacgagctgttcatcttttcatggcgtcactggaaacgaactgtaacttcatcagctttccttgtagaagctacaaagactataagaccagtctgtgcgtggactgtgactgctag

SEQ ID NO: 114713 - DNA, 471 bp, Artificial Sequence
  derived and/or modified sequence
atgaacgtgatcgtggtggactggagcagaggcgccaccaccttcatctacaacagagccgtgaagaacaccagaaaggtggccgtgagcctgagcgtgcacatcaagaacctgctgaagcacggcgccagcctggacaacttccacttcatcggcgtgagcctgggcgcccacatcagcggcttcgtgggcaagatcttccacggccagctgggcagaatcaccggcctggaccccgccggccccagattcagcagaaagcccccctacagcagactggactacaccgacgccaagttcgtggacgtgatccacagcgacagcaacggcatccagttcatcaagtgcaaccaccagagagccgtgcacctgttcatggccagcctggagaccaactgcaacttcatcagcttcccctgcagaagctacaaggactacaagaccagcctgtgcgtggactgcgactgctag

SEQ ID NO: 114714 - DNA, 426 bp, Artificial Sequence
  derived and/or modified sequence
tgatacaacagagccgtgaagaacaccagaaaggtggccgtgagcctgagcgtgcacatcaagaacctgctgaagcacggcgccagcctggacaacttccacttcatcggcgtgagcctgggcgcccacatcagcggcttcgtgggcaagatcttccacggccagctgggcagaatcaccggcctggaccccgccggccccagattcagcagaaagcccccctacagcagactggactacaccgacgccaagttcgtggacgtgatccacagcgacagcaacggcatccagttcatcaagtgcaaccaccagagagccgtgcacctgttcatggccagcctggagaccaactgcaacttcatcagcttcccctgcagaagctacaaggactacaagaccagcctgtgcgtggactgcgactgctag

SEQ ID NO: 114715 - protein, 285 aa, Artificial Sequence
  derived and/or modified sequence
MGTPGEGLGRCSHALIRGVPESLASGEGAGAGLPALDLAKAQREHGVLGGKLRQRLGLQLLELPPEESLPLGPLLGDTAVIQGDTALITRPWSPARRPEVDGVRKALQDLGLRIVEIGDENATLDGTDVLFTGREFFVGLSKWTNHRGAEIVADTFRDFAVSTVPVSGPSHLRGLCGMGGPRTVVAGSSDAAQKAVRAMAVLTDHPYASLTLPDDAAADCLFLRPGLPGVPPFLLHRGGGDLPNSQEALQKLSDVTLVPVSCSELEKAGAGLSSLCLVLSTRPHS

SEQ ID NO: 114716 - protein, 188 aa, Artificial Sequence
  derived and/or modified sequence
  misc_feature (1)..(1): Xaa can be any naturally occurring amino acid
XRRPEVDGVRKALQDLGLRIVEIGDENATLDGTDVLFTGREFFVGLSKWTNHRGAEIVADTFRDFAVSTVPVSGPSHLRGLCGMGGPRTVVAGSSDAAQKAVRMTQLLTVSFFVLGCLVCPLSSCTVEVGICPTARRHCRSSLMSPWYLCPAQNWRRLAPGSAPSAWCSAHAPTAEGLALGYCWPGVG

SEQ ID NO: 114717 - protein, 236 aa, Artificial Sequence
  derived and/or modified sequence
MGTPGEGLGRCSHALIRGVPESLASGEGAGAGLPALDLAKAQREHGVLGGKLRQRLGLQLLELPPEESLPLGPLLGDTAVIQGDTALITRPWSPARRPEVDGVRKALQDLGLRIVEIGDENATLDGTDVLFTGREFFVGLSKWTNHRGAEIVADTFRDFAVSTVPVSGPSHLRGLCGMGGPRTVVAGSSDAAQKAVRAMAVLTDHPYASLTLPDDAAADCLFLRPGLPGVPPFLLH

SEQ ID NO: 114718 - protein, 226 aa, Artificial Sequence
  derived and/or modified sequence
MGTPGEGLGRCSHALIRGVPESLASGEGAGAGLPALDLAKAQREHGVLGGKLRQRLGLQLLELPPEESLPLGPLLGDTAVIQGDTALITRPWSPARRPEVDGVRKALQDLGLRIVEIGDENATLDGTDVLFTGREFFVGLSKWTNHRGAEIVADTFRDFAVSTVPVSGPSHLRGLCGMGGPRTVVAGSSDAAQKAVRAMAVLTDHPYASLTLPDDAAADCLFLRPG

SEQ ID NO: 114719 - protein, 225 aa, Artificial Sequence
  derived and/or modified sequence
MGTPGEGLGRCSHALIRGVPESLASGEGAGAGLPALDLAKAQREHGVLGGKLRQRLGLQLLELPPEESLPLGPLLGDTAVIQGDTALITRPWSPARRPEVDGVRKALQDLGLRIVEIGDENATLDGTDVLFTGREFFVGLSKWTNHRGAEIVADTFRDFAVSTVPVSGPSHLRGLCGMGGPRTVVAGSSDAAQKAVRAMAVLTDHPYASLTLPDDAAADCLFLRP

SEQ ID NO: 114720 - DNA, 858 bp, Artificial Sequence
  derived and/or modified sequence
atggggactcccggagagggacttggcaggtgctctcacgccctcatacggggtgtcccagagtctctggcttcgggagaaggggctggggctggtctgcctgctttagatctcgctaaagcccagagggagcacggcgtgctggggggtaagctgagacagcgcctcggcctacagctcctggagttgccgcccgaagagtctctgcctttggggccactgctcggcgataccgcagtcattcagggcgatactgctctgataactcggccgtggagccccgcacggcggcctgaggtggacggcgtgcgaaaagccttacaagacttggggctccggatcgtggagatcggtgatgaaaacgccacactggatggtactgacgtcctctttaccgggagagagtttttcgtgggcctctcaaaatggacaaatcacaggggggccgagatcgtggcagatacctttagagacttcgccgtgagtacagtacctgtgtccggccccagtcaccttcgtggcctatgcggtatgggcgggcctcgcaccgtggtggccggctcatccgatgccgcgcagaaggccgtccgggcaatggccgtgctgacggaccacccttacgcttccctcacactccctgacgatgccgctgccgattgcctgtttctccgccctggcctaccaggagtgcctcccttcctccttcaccgcggtggcggtgacctcccaaattctcaggaggccctgcagaagctatccgatgtgactctagtccctgtgagttgctccgagctagaaaaggctggggctggcctgagcagcctgtgtttagtgctgagcacccgtcctcacagttag

SEQ ID NO: 114721 - DNA, 858 bp, Artificial Sequence
  derived and/or modified sequence
atgggcacccctggagagggcttaggacgttgcagtcatgccctgatacgcggggtacccgagtccctggcatctggagaaggtgccggggctgggctgccggccttagacctcgccaaagcacagagggaacacggcgtgctgggaggaaaattgcgtcaacgtctcgggctgcaactgctggaactacctccggaagagagcctccctctggggcccttgctgggggacacagcggtcattcagggggatacagccttaatcacgcgcccttggagtcccgctagaagacctgaggtggatggggttaggaaggctctgcaagacctgggtctgaggattgtggagatcggggatgagaacgccaccctggacggaacggacgtgctctttactgggagggagttctttgttgggcttagtaaatggactaaccaccggggcgctgaaatcgtcgcagacaccttcagggacttcgcagtgagtaccgttccagtgtctggcccctcgcacctgcggggcctgtgtgggatgggagggccacgcaccgtggtcgccggatcttccgacgcagcccagaaggccgtacgcgcgatggcagtcttaactgaccacccctacgccagcctgaccctgccagacgatgcagctgccgactgcctttttctgaggcccggattaccgggagtccctccctttctcttgcataggggaggtggggatctacccaactcacaggaggctctccaaaagctgtctgacgtaacgctcgtcccagtatcttgttctgagctggaaaaagcaggtgctggactgtcgagtctatgcttagtcctctctacgaggcctcatagctag

SEQ ID NO: 114722 - DNA, 858 bp, Artificial Sequence
  derived and/or modified sequence
atggggacacccggtgaggggctaggccgctgctcccacgcactgatccggggagtacccgagtcccttgccagtggggagggcgcgggagctggcctcccggccctcgacttagcgaaagcccagcgtgaacatggggtcttgggtggaaaactgaggcagcggctgggcttgcagcttcttgaattaccacccgaggaatccttgccgctcggtcctcttctgggcgacacggcagtgattcagggggataccgccctgattacccgcccatggtcgcctgctcggagacccgaggtggatggcgtcagaaaggcacttcaagacctcggcctgagaatcgtggagatcggagatgagaatgccacccttgatggaacggacgtcctgttcactggtagggagttcttcgtgggtctgagcaaatggactaaccataggggagctgaaattgttgctgatacatttagggatttcgcggtgagcacagtgcctgtttctggacctagccacctgagaggcctttgtggcatgggtggaccccggaccgtggtagcaggtagctccgacgctgcccaaaaagctgtacgggcgatggccgttctgacggatcacccttatgctagcctcacactgcccgacgacgcggcagctgattgtctctttttacgcccaggtctgcccggcgtcccacctttcttactacaccggggcggaggggacctcccaaacagccaagaagcattgcagaaattgagtgacgtgacactagtgccagtgagctgcagcgagttggaaaaagcgggggcaggactttcatccctttgtctggtgctgagcacacgacctcatagctag

SEQ ID NO: 114723 - DNA, 858 bp, Artificial Sequence
  derived and/or modified sequence
atgggaacacccggcgaaggattggggcgatgttctcacgccctgattcgcggcgttcccgaaagtcttgcttctggtgagggagccggagccggactccctgccctggacctggctaaagcccagagagagcacggcgtgctgggtggaaaactgcgacaaaggttaggtctccagctgctggagcttcctccagaggaaagtctaccactggggccactccttggagacaccgctgttatccaaggagatacagcactgatcacaaggccgtggtcccctgcccgcagaccagaagtcgacggggtacggaaggccctgcaggacctggggctgcgcatcgtcgagataggcgacgagaacgccacgctagacggaactgatgtgttattcacaggccgtgagttcttcgtggggctgagtaagtggaccaatcaccggggcgcagaaatcgtggccgacacatttagggactttgccgtcagtactgtgcctgtgagcgggccgagccacttacgaggcctttgcggcatgggtggccctcggaccgtggttgctggcagctctgacgccgcccagaaggccgttagggccatggctgtgcttacagaccacccttacgcctcactaaccttgcctgacgatgccgctgccgattgcctgttcttgaggcccggtctgcctggagtccccccctttttgctgcacaggggaggcggagatttgccgaacagccaggaggccctccagaagttatctgacgtgaccctggtgcccgtctcctgcagtgaactcgaaaaggcaggggcgggactgagcagtctctgtctggtgctgagtacacggcctcacagttag

SEQ ID NO: 114724 - DNA, 858 bp, Artificial Sequence
  derived and/or modified sequence
atggggacccctggagagggtctagggaggtgtagccacgctctgatcagaggcgtgcccgagtctctcgcctctggcgaaggtgcaggagcgggcctgccggcactggacctggctaaagcccagcgggaacacggcgtgctcggcgggaagctgagacaaagattaggtctgcaactgctagaactaccacctgaggagagtttgcccctgggtccattactcggagatactgccgtgatccagggcgacaccgccctgatcaccaggccatggtcacccgctaggagaccagaagttgacggggtgcgtaaggccctacaggatcttggtctgcggatcgtggaaatcggagacgagaatgctactcttgatgggaccgacgtgttgtttactggaagggagttttttgtgggattgtcgaaatggactaatcacaggggggcagagattgttgctgatacattccgtgacttcgcagtttccactgtaccagtgtctggcccctctcatttgcgcgggttgtgtggtatggggggcccccgaacagtggttgcggggagtagtgatgcagcacagaaagcggtccgagccatggccgtgctgacagaccacccctacgccagcttgactctacccgatgacgctgccgctgattgtctttttttgagacccggactgcccggggtgcctccgttcctccttcatcggggaggaggagatctccctaattctcaggaggccctacaaaaactgtccgatgtcacgctcgttcctgtatcctgctcagagctggaaaaggccggtgcaggcctaagtagtttgtgcttagtccttagtaccagaccgcattcctag

SEQ ID NO: 114725 - DNA, 858 bp, Artificial Sequence
  derived and/or modified sequence
atgggcacacccggggaaggtttgggaaggtgcagtcacgctctaattcggggcgttcctgaatcactcgcctctggcgagggcgcaggggccggcctccccgccttagatctcgcaaaagctcagagggaacacggcgttctgggtggcaagctccgtcaaaggttggggttgcaactgctcgagctgcctccagaggagagcttgcccctagggccattgctgggcgacaccgctgttattcaaggggacacggctctgatcactaggccctggagtccagctcgacggcctgaggtggacggtgtccgaaaggccctacaagatttgggcctgcgtatcgtggaaatcggcgacgaaaatgccactctggacggcaccgacgtccttttcacaggcagggaattctttgtgggactgagcaagtggaccaaccaccgcggggctgagatcgtggcagacacatttcgcgatttcgcagtgtccacggtccccgtgtctggcccctcacatctgcgtgggctttgtggcatggggggaccaagaacggtggtggctggcagtagcgacgcagctcagaaggccgtgagagccatggccgtcttgaccgatcacccctacgcctccctaacacttcccgacgacgcagccgctgattgtctcttcttgaggccagggctgccaggggtgccaccattcctcttacaccggggcggaggggacctgcctaactcccaggaggctctgcagaaactaagtgacgtcactcttgtgccagtgtcatgtagcgaattagagaaggcaggagctggcctctccagcttgtgcctggtgctctccacacgcccacacagctag

SEQ ID NO: 114726 - DNA, 858 bp, Artificial Sequence
  derived and/or modified sequence
atgggaaccccaggggaggggctggggcggtgcagccacgctctgattagaggagttccagaatcactcgccagtggcgaaggcgccggcgcggggctcccggctttagacttggctaaagcccaaagggagcacggcgtgttaggcggaaagctccgacagaggctagggctgcagctgctggagttaccccctgaagagtccctgccattagggcccctcctgggcgacaccgcagttattcagggcgataccgcactgattacccgaccatggtcccccgcccgccggcctgaggtcgatggcgtgaggaaagccttacaggatttagggttgcggattgtcgaaatcggagacgagaatgctacgctcgacggaacggacgtgctcttcaccggacgtgagttttttgtgggccttagcaaatggactaatcatcggggcgccgagatcgtggccgatacttttagggactttgcagtgtcaactgtccccgtgtcaggtccttcccacctgagagggctatgcggcatgggaggccctagaacggtagtcgctggctcatcagatgccgcacagaaggcggtgcgggctatggccgtgcttacggaccatccttacgcatcgttaacgctcccagatgatgcagcagcggattgtctatttcttaggccaggtctccccggagtgccaccatttctgttacatcgcggcggcggggatttgcctaattcccaggaggcactccagaagctctccgatgtgaccctggtgccagtgtcctgcagcgagctagagaaagccggggccggcctgagttctctctgtctggtgctctccacgagaccccatagctag

SEQ ID NO: 114727 - DNA, 567 bp, Artificial Sequence
  derived and/or modified sequence
tgaaggagacccgaggtggatggggtgcgaaaagctttacaggaccttggcctgcgaattgtggaaataggggatgagaacgctacgctggacgggactgacgtgttatttaccggccgggaatttttcgtcgggctcagcaagtggaccaatcatcgtggtgctgaaatcgtggccgacactttccgagactttgcggtcagcactgtccctgtgtccgggcctagtcatctccggggcctgtgtggcatgggcggccccagaacagttgttgctggcagcagcgatgcagctcagaaggcggttcgaatgacgcagctgcttacggtgtcttttttcgtgttaggctgcttagtatgtcccctttcctcttgcaccgtggaggtcggaatctgccctacagcacgcaggcattgcagatcatctctaatgagcccctggtatctgtgtccagctcagaattggcgtcgtctggcgcccgggtctgccccatccgcatggtgtagcgcacacgctcctacagcagaggggctggctttaggatactgctggcccggcgtggggtag

SEQ ID NO: 114728 - DNA, 567 bp, Artificial Sequence
  derived and/or modified sequence
tgacgaaggcccgaggtggacggagttcgcaaggcacttcaggacctcggactgcggattgtggagatcggcgacgagaacgcaacactagatggcacagatgtccttttcaccggtcgggagtttttcgtgggcctctccaaatggactaatcaccggggggctgagatagtggcagacacgttcagggatttcgccgtaagcacggtcccagtctcaggtccttctcacctgaggggcctgtgcgggatgggaggtcctcggacagtggtggccggcagctccgacgcagcccaaaaagccgtgcgtatgacccagctacttacggtatcgttcttcgtcctgggctgcctcgtctgccccctgtcatcgtgtaccgtagaggtgggaatttgcccaaccgcgcggagacactgccgatctagcctgatgtccccctggtacctctgccccgcccagaactggcgaagactggccccaggctcagcccctagtgcttggtgcagcgcccatgctcctacagccgagggtctggcgctgggctactgttggcctggcgtggggtag

SEQ ID NO: 114729 - DNA, 858 bp, Artificial Sequence
  derived and/or modified sequence
atgggtactcctggagagggcctgggccgctgcagccacgcgctgataagaggcgtgccggagtcgctcgccagcggcgaaggggctggagccgggctgcccgccctggacctcgccaaggcacagagagaacatggcgtattggggggaaaactacgacagcgcctgggactccagcttttagagttgccgcccgaggagtcgctgcccttaggccctttgctaggagacacggctgtgatccagggtgataccgcattgatcactcggccttggtctcccgctcgacgacctgaagtagacggtgtcaggaaagccctgcaggacctggggctgaggatcgtcgaaattggagacgaaaatgcgactctcgatggtactgacgtgttattcaccgggagggaatttttcgtgggcctgtcaaaatggaccaatcatcggggggcagagatcgttgcggatacatttcgtgatttcgcagtatctactgtgcccgtgagcggcccaagtcatcttcgaggcctgtgcggaatggggggtccccgcacagtggtagctgggagttctgacgccgcccagaaggccgttagagctatggccgtcttaaccgatcatccgtacgctagcctaacattaccagacgacgccgccgcagactgcctttttctgcgcccgggactacctggcgtgccaccattcctgcttcaccgcgggggcggtgacctgcccaacagccaggaggccctccagaaattgtccgatgtcactctcgtgcctgtctcttgttccgaactcgagaaggccggggctggcctctcatccctgtgccttgtgttgtcaacacggcctcacagttag

SEQ ID NO: 114730 - DNA, 858 bp, Artificial Sequence
  derived and/or modified sequence
atggggaccccgggagagggtcttggccgttgtagccacgcactgatcagaggagtaccagaatctcttgctagtggcgagggagcaggagcaggattgcccgccttagatttggctaaagcacaacgggaacacggggtcttaggcgggaaactgcgccagaggctcggcttacagttactagagctgccccctgaggaatccctccccctgggtcccctcttgggggataccgcggtgatccagggcgacacagccctgatcactagaccctggtcccccgcccgccggcccgaagtggatggtgtgcgcaaggctctgcaggatttgggactgaggatagttgagatcggtgatgagaacgccacactggatggcactgacgtgctgtttacaggccgggagttcttcgtgggcctctctaagtggactaatcaccgaggcgctgagattgtcgctgacactttccgagatttcgctgtgagtacagtgcctgtgagcggcccaagccacctgcgaggcctctgcgggatgggcggaccgcgcaccgtggtggccggctcctccgacgcagcacaaaaagcggttcgggccatggctgtgttgacggaccacccgtatgcctctttgaccctccctgacgacgccgcagccgattgtctgtttctgaggcctggattgcccggggtgcctccctttcttcttcaccgtggcgggggcgaccttcccaatagtcaggaggcactgcagaaactttccgacgtcacattagtaccagtgagctgctccgagctcgagaaagccggagctggactgtcttcgctgtgcctggtgctgtccactcggccacatagctag

SEQ ID NO: 114731 - DNA, 858 bp, Artificial Sequence
  derived and/or modified sequence
atggggaccccaggagaaggattgggccggtgctcacacgccctgatccgaggcgttccagaatccttggcctctggtgagggggccggagctggtttgcctgcgttagacctggcgaaagcccagcgtgagcacggtgtcttgggaggcaagctccgtcagagactggggttacagctgctcgagcttccgcccgaagaatcactcccattgggcccactactgggggatactgcggtcatccagggcgacacggctttaatcacgaggccgtggtctcccgcgcggaggcccgaagttgatggggtgcgcaaagccttgcaggacctggggctccggatagttgaaatcggtgatgagaacgcgaccctggacggaaccgatgtgctatttactggcagggagttctttgtgggactgtcaaagtggactaatcaccgaggagccgagatcgtggccgatacatttagggacttcgctgtctccacagttcccgtctcagggccttctcatcttcgaggactctgtggaatgggcggacctaggaccgtggtggccggctccagcgacgccgcccagaaggccgtgagagctatggcagttctcactgaccacccctacgcaagtttgactctgccagacgatgcagcagccgactgcctcttcttacgccccgggctgcccggagtccccccgttcctattgcatagaggcggtggtgacttgccaaactctcaggaagccctgcagaagctatctgatgttactcttgtgcctgtatcgtgttctgagctcgagaaggccggcgcaggtttgtcatccctatgtctggtcttgagtacccggccacacagttag

SEQ ID NO: 114732 - DNA, 711 bp, Artificial Sequence
  derived and/or modified sequence
atgggaacccctggtgaaggactgggtcggtgtagccatgcactaatcaggggtgttccagagagtctggcaagcggtgagggggcaggcgccggcctgcccgctctggacttagctaaagctcagagagagcacggcgtgttaggcggcaagctccggcaacggctcgggctacagttactcgagcttcctccggaagaatctctacctctcgggcccctgctgggagataccgccgtgatccagggagacaccgccctgataactcggccctggtctccagcaaggagaccagaggtggatggagtcaggaaggctctacaagacctcggtcttcggatcgtggaaatcggagatgagaacgctactcttgacggcactgacgtgctgttcactgggagggaattctttgtcgggctttctaaatggaccaatcaccgcggcgctgagatcgttgctgacacatttcgcgactttgcagtgtccactgtgccagtttccggaccgtcccacctgcggggcttgtgcggcatgggtgggccacgcactgttgttgcaggcagttccgacgctgcccagaaggctgttcgagcgatggccgtcctgactgatcatccctacgcgtctcttacactccccgacgatgccgctgccgactgcctgttcctacggcctgggcttcccggagtacccccttttcttctgcattag

SEQ ID NO: 114733 - DNA, 681 bp, Artificial Sequence
  derived and/or modified sequence
atggggactccgggtgaaggcctgggaaggtgtagccatgcactaataaggggcgtccccgagagcttggccagcggagaaggcgcaggggccggactccccgctttggatttagccaaggcccagagggaacatggcgttctgggagggaaattgcggcagagactgggccttcagctactggagctgcctccagaggagtctctgcctctgggtccgctactgggcgataccgcggtaatccagggagatacagccctgataactaggccatggtcacccgctaggaggcctgaggttgatggcgtccgaaaagccctccaggatcttgggcttagaatcgttgaaattggcgacgagaatgccaccctggatggcacagacgttttatttaccggtcgagagttcttcgtgggcctttccaaatggactaatcacagaggcgcagaaatcgtggcagatacttttcgcgattttgctgttagcacagtccccgtgagcggacctagccatctgcgaggactttgtggcatggggggtccgagaactgtcgtggcaggctccagcgacgccgcccagaaagcagtgagggctatggccgttctcactgatcatccctacgccagtctgaccctccccgacgacgccgccgcagactgtcttttcctgagaccggggtag

SEQ ID NO: 114734 - DNA, 711 bp, Artificial Sequence
  derived and/or modified sequence
atgggaacccccggcgagggtctgggtcggtgctcacacgctctgattcggggcgtccctgaatcgctggccagcggtgagggcgctggggccgggctgcctgctctcgacctcgctaaggcccagcgggagcacggcgtcctgggaggtaagctccgccaacgcctggggctgcagcttcttgagctgccacctgaggaatcactgcccctgggcccactgctcggcgacacagcggtcatacagggggacaccgcattaattaccagaccatggtcacccgctagacggccagaggtagatggcgtgaggaaggcactgcaggatctgggccttcggattgttgaaatcggcgacgagaacgcaaccctggatgggaccgatgtgttgtttaccggcagagaattctttgtagggctgtcaaaatggacaaatcacagaggggctgagatcgtggccgataccttccgggatttcgcagttagcactgttccagtgtcagggccctctcatctcagaggtctgtgcggcatgggaggtcctagaaccgtcgtggcgggctcatcagacgccgctcaaaaggctgtcagagctatggccgttctaacagatcatccttatgcaagcttgactctacccgacgacgctgccgctgactgcctgttcctgcgaccaggcctgccaggagtgcccccgtttttgctccattag

SEQ ID NO: 114735 - DNA, 858 bp, Artificial Sequence
  derived and/or modified sequence
atgggtactcccggcgagggcttaggacgctgctcccacgccctgatacgtggggtgcctgagtcgctagcctccggcgagggggccggggcaggcctgcctgcactggacctcgctaaggcccaacgcgaacacggggttctcggtggcaagctgaggcagcgcttgggcctccaactgctggaacttccacctgaagagagccttcccctgggaccactgctgggggacaccgccgtgatccagggggacacagcccttattactagaccatggtcaccagcaaggcgccctgaggttgatggggtgcggaaggccctgcaggacctcggcctgcggattgtggaaattggcgacgagaatgcaaccctagacggcacggatgtgcttttcactggacgagagttctttgtggggttgtccaaatggaccaaccatcgtggagctgaaatcgtcgccgatacattccgggatttcgccgtgagcacagtgcctgtctccggcccatcccacctgcgtggcttgtgtggaatgggcgggcctcggacagtggtggccgggtcctcagacgctgctcagaaggctgtgcgggcaatggccgttctgaccgatcacccgtatgctagcctgacactgccggacgatgctgcagctgactgtttatttctgcgacctggattaccaggagtcccaccattcctccttcatcgtggtggaggagacctccccaactcccaggaggctctgcagaagctatccgacgtgactctcgtacccgtgagctgctcagagctggaaaaggccggtgccggtctgtcctccctgtgcctcgtcttaagtactcggcctcactcttag

SEQ ID NO: 114736 - DNA, 858 bp, Artificial Sequence
  derived and/or modified sequence
atggggaccccaggggaagggctaggccgttgcagccacgccttgatccggggagtacccgagtccttggcgagcggagagggagccggtgccggtttgccagccctggatctagcaaaagcccagcgggagcatggggtgttgggcgggaagctgaggcagaggctcggtctgcaactgctggagctgcctcccgaagagagtctccctctgggccctttactgggtgatactgccgtgatacagggtgataccgctctaattacgagaccctggtcgccggccagacggccagaggtggacggcgtgcggaaggccttacaggatctggggctgcgtatagtggaaatcggcgatgagaacgccacactggacggaacggatgttctgtttactggccgggagttcttcgtgggcctgtctaagtggacaaatcaccgaggggctgaaatcgtggctgataccttccgcgacttcgctgtcagcacggtgccggtctcaggcccatctcatcttcgtggtctgtgtggaatgggggggcctcggacggtagtggcaggttcttctgatgccgcccagaaagcagtacgggcgatggcagtgttaacggaccacccatacgcctcactgactctccccgacgatgccgccgctgattgcctgtttcttagacccggtcttccaggggtccctccatttttgctgcatcgagggggaggggacctccccaacagccaggaggccctgcaaaagttgtctgatgtgactttggtaccagtatcctgctccgagttagagaaggcgggcgctgggttgagctcactgtgcctcgtgttgtcaactcggccgcacagctag

SEQ ID NO: 114737 - DNA, 858 bp, Artificial Sequence
  derived and/or modified sequence
atgggcactcccggggaaggtcttggacgatgtagtcatgctctaattcgcggggtgccagagagcttagcctcgggcgagggtgctggagcaggcttgcctgctctggaccttgccaaggcccagcgggagcatggcgtcctgggcgggaaactccggcagcgtctgggcctgcaacttctggaactcccgccagaagagtcactgcctttagggcctctgctcggggacacagccgtgatccagggtgacaccgctttgattacacgaccatggtcccccgcaaggcggccagaggtggacggcgtgcggaaagccctgcaagaccttggtcttcgaattgtcgagatcggggatgaaaatgctacgctggacggaacagacgtgctatttaccgggcgcgagttcttcgtgggactttccaaatggaccaatcacagaggcgctgaaatcgtggccgacacttttcgcgacttcgccgtgtccacagtcccagtgtccggccccagccacctcagagggctatgcggcatgggggggccaaggaccgtggttgcaggctcctcagacgctgcccaaaaggctgtgcgagcaatggccgtcctgaccgaccatccttacgccagtctcaccttgcccgatgatgcggccgcagactgcctgtttctgcgccccggcctcccaggggtgcccccattcttgcttcacagaggaggcggtgacttgcctaatagtcaggaagcgctccagaaactgtcagacgtgaccttagtaccagtgtcatgcagtgagttggagaaggccggggccgggctgtcctccctctgtctggtcctcagcaccaggccgcattcatag

SEQ ID NO: 114738 - DNA, 681 bp, Artificial Sequence
  derived and/or modified sequence
atgggcacgcccggggaagggcttggccgttgcagccacgcgctgattaggggcgtccctgagagcctagccagtggtgagggggctggagccggcctccccgccctggacttggctaaggctcagcgcgagcatggcgtgctcgggggcaaattgcgccagcggctggggctccaattacttgaactcccccccgaggaatctctgcctctgggtcctctgcttggcgacaccgcggttattcagggagacacagctctgataacgagaccatggtcgcccgctagacgacctgaggtagacggggtgagaaaagcacttcaggacctcgggctgagaattgtggaaatcggagacgagaacgctactttggacggtacagacgtcctcttcaccggtcgggagttttttgtgggcctcagcaaatggaccaaccatcgcggtgcggagatcgtggctgacacgtttcgggactttgccgtttccacggtgcccgtatcgggaccctcccatctccgcggactgtgtggcatgggcggtcctcgaacagttgtagcgggatcaagcgatgctgcccagaaagcggtcagagccatggccgttctgaccgaccacccctacgccagtcttaccttgcctgacgacgccgccgccgactgtctcttccttcggccgggatag

SEQ ID NO: 114739 - DNA, 858 bp, Artificial Sequence
  derived and/or modified sequence
atgggtaccccaggagagggcttgggacgatgctctcatgctctgataagaggcgtcccagaaagtctggcatccggcgagggcgcaggcgccggcctccccgcactggatcttgccaaagctcagcgggagcatggcgttctggggggtaagctccgccagcgcttgggtttgcaacttctggaactgccgcccgaggaatcgttacctctgggtcccctactaggcgatacagcagtgatacaaggcgatactgctctgattactcgtccctggagtccggcccgccggccagaggttgatggggttcgtaaggccttgcaggacctcgggctgagaatagtcgaaataggggatgaaaacgcaactctggacggtacagacgtcctgttcaccgggcgggagtttttcgtcggcttgtccaaatggaccaatcacaggggggctgagatcgttgccgacactttcagagattttgctgtgtctacagtgcctgtatcagggcctagccacctgagaggcttatgtggtatgggaggcccacggaccgtcgttgctggcagctcagacgccgcacagaaagccgtacgggccatggccgtgcttacagaccatccctatgcctcgctgactctccctgatgacgccgccgccgattgcctctttttgaggcccggtttgccaggggttccacccttcctactccaccgcggcggcggggatctgcccaattcacaggaagctctccagaagttgagtgatgtgacattagtgcctgtttcgtgtagtgagctcgagaaagccggagccgggctctcatccctgtgcctggtgttgtcaaccaggcctcattcatag

SEQ ID NO: 114740 - DNA, 681 bp, Artificial Sequence
  derived and/or modified sequence
atgggcacaccaggggaaggactcggccgctgttcgcacgccctgatcagaggggtgccggagtctctggcctccggcgagggggccggagccgggcttccagctctggacttggcaaaagcgcagagggagcacggggtgctcggggggaagttgcggcagaggctcggattgcagctgttagagcttccccccgaggaaagcctgccgcttgggcctctcttaggcgatactgccgtgattcagggggacacggccttaattactaggccttggtcaccggcccggaggccagaggtggatggcgtccgcaaggctctccaagatctgggactgcggatcgtcgagattggcgacgaaaacgccacgttggatggaacagatgtcctgttcactggaagggaattcttcgttggtctgtcaaaatggactaatcaccgtggtgctgaaatagttgccgatacctttcgcgacttcgccgtgtcgacggtcccagtttcaggcccctcccacctaaggggactgtgtggaatgggagggccccgaacagtcgttgctggttcaagcgacgctgcccaaaaagcggtgcgtgctatggctgtcctgacagaccacccttacgcctcgctcacgctgcctgatgacgctgccgccgactgtcttttcctgcgaccaggctag

SEQ ID NO: 114741 - DNA, 681 bp, Artificial Sequence
  derived and/or modified sequence
atggggaccccgggcgagggactgggtaggtgtagtcacgcattgattaggggggtacctgagagcctcgctagtggcgaaggagccggcgcagggctacccgctcttgatctggccaaggcgcaacgggagcatggagtcctgggagggaagctgcgacagcgactcggcctgcagcttctcgagctgccacccgaagaatcactgcctttgggtccacttctaggagatactgccgtgatccaaggagatacagccctgatcactagaccttggtcccccgctaggaggcctgaagtggacggagttagaaaggcccttcaggatctcggactcagaatcgtagagatcggtgatgagaatgccaccctcgatggcacagacgtgctgtttactgggcgcgagttcttcgtcggtctgtctaaatggacgaaccaccgaggggccgaaattgtggcggataccttcagggattttgctgtaagtaccgtgcccgtaagtggaccttcccacctcagaggattatgtggtatgggcggccccagaacagtggtggccggatcatccgacgccgctcagaaagcagttagagccatggccgtgctcacggatcacccatacgcatcgcttacccttcccgatgatgctgccgcagactgcctctttctgcggccaggttag

SEQ ID NO: 114742 - DNA, 858 bp, Artificial Sequence
  derived and/or modified sequence
atgggcacgcctggagaaggcctggggagatgttcacatgctctgatcagaggggtgcccgaatctctcgcttctggggaaggagccggagctgggctccctgctctcgacctcgcaaaggcgcagagggaacatggtgtgctggggggcaaactgagacaaaggctgggcctgcagctgctcgagctcccgcctgaagaatccctccctcttggaccattgttaggggacaccgccgttattcagggggatactgctctaataacacgtccatggagcccagcccggagacccgaggtggatggcgtccggaaagcccttcaggacttgggcctgcggatcgttgaaattggtgatgagaacgctaccctcgatggaacagacgtgctgttcactggtcgcgaattctttgtaggtctttccaaatggaccaaccatagaggggcggagattgttgctgacacctttagagatttcgctgtctcaaccgtgcctgtgtccggtccctcccatctccgggggctatgtggtatgggcggccctcgcactgtagtagctggtagttctgacgcagcccagaaagccgtcagggctatggccgtgctgaccgatcacccctacgcgtcactgacactccccgatgacgcagctgccgattgtcttttcttgcggccgggactcccaggtgttccaccttttctgctacacaggggcggaggggatctgccaaacagccaggaggctctgcagaagctctcagatgtcaccctagtaccggtttcctgtagtgagctggaaaaggccggcgcagggctgagcagtttgtgtttagttctgagcaccaggccccacagctag

SEQ ID NO: 114743 - DNA, 681 bp, Artificial Sequence
  derived and/or modified sequence
atggggactcccggtgaggggcttggaagatgctctcacgctctcatcaggggcgtgcctgaaagcctggcatcaggggagggagcgggggccggtcttcctgcacttgacttagccaaagcccagagggaacacggcgtgctggggggcaagctgcgtcagcgcttagggctccagctgcttgagctccctccggaagaatccctgccactcgggcctctgttgggcgatactgcagttatccaaggtgacacagcccttattacaagaccctggtcccccgccaggagacctgaagtggacggggtgaggaaggcccttcaagaccttggattaagaatagtagagatcggcgacgagaatgccacactggacggaactgacgtgttatttaccgggagggaatttttcgtcggactgagtaagtggaccaaccatcgtggagcggagattgtggctgatactttccgggatttcgcagtgagcacagtgccagtaagcggtcccagccacctgcggggattatgcggcatgggaggccccagaacggtggtggctggtagctccgacgccgcccagaaggctgtgcgcgctatggccgtgctgaccgatcacccttatgcttccctcacattacccgatgacgccgccgcggactgtttgtttttgcggcccgggtag

SEQ ID NO: 114744 - DNA, 567 bp, Artificial Sequence
  derived and/or modified sequence
tgacggaggcccgaggtggatggggttaggaaagctcttcaggaccttgggctccgcattgtggagatcggtgacgagaacgccacactggatggaacagacgtgttgttcactggccgcgaatttttcgtgggcctgtcaaagtggaccaatcaccggggtgccgaaattgtggctgacacattccgggattttgccgtgtcgactgttcctgtatcaggtcctagccatctacgcggactctgtgggatgggcggaccaagaaccgtggtggcgggcagcagtgatgcagcgcagaaggctgtaaggatgacacagttacttaccgtgagctttttcgtgttgggatgcctcgtatgccccctgagctcctgtaccgtggaagtgggcatctgccccactgccagacgacactgtcgatctagcctgatgtccccatggtatctctgtcctgcccaaaactggaggcgtctggcccccggctccgccccttctgcatggtgctccgcacatgcccccactgcagaggggcttgccttggggtattgctggccaggtgttggatag

SEQ ID NO: 114745 - DNA, 567 bp, Artificial Sequence
  derived and/or modified sequence
tgacgcaggcctgaggtggatggagtccgaaaagctcttcaggacctagggctccgtatcgtcgagataggcgacgaaaatgccacactggacggcactgacgtgctcttcacggggcgcgagtttttcgtcggactctctaaatggactaatcacagaggggccgaaattgtcgccgacacatttcgcgactttgctgttagcactgtacccgtctctggaccaagccacttacgagggctgtgcggaatgggcggtcccagaaccgtcgtagctggttctagtgatgccgctcagaaggccgtgagaatgacccagctgctcacagtctcattcttcgtactggggtgcctggtctgtccgctgagcagttgcaccgtggaagttggtatttgtcctaccgcccgccggcactgccggagtagcctgatgtcgccttggtatctgtgccccgctcaaaattggagacgactcgcaccaggatccgctccatccgcctggtgttctgcccacgcaccaaccgctgagggcctcgcattggggtactgctggccaggcgtcggctag

SEQ ID NO: 114746 - DNA, 681 bp, Artificial Sequence
  derived and/or modified sequence
atgggcacacccggagaagggctgggacggtgctcgcacgcgctgattcgaggagttccagagagccttgcttctggtgaaggggcaggggcgggattgccggcattggaccttgctaaagctcagcgggaacatggtgtgctgggaggcaagctgcggcagcgactcggcctgcagcttctcgaactccctcccgaagagtccttgccactcggcccccttctgggtgacaccgctgtgattcagggggacacagcactcattactagaccctggtcaccagcccggagaccagaagtcgatggagtgcgcaaggccctccaggatctggggctccgcatagttgagataggggatgagaacgcaacgcttgacggcaccgacgtgctcttcaccggcagggagttttttgtcgggctctctaagtggaccaatcatagaggggccgagattgtggccgatacctttcgcgattttgctgtgagcactgttccagtgtccgggccatcgcacctgagggggctgtgtggcatgggtggccccaggaccgtagttgccggcagttccgacgccgctcagaaagcagtgagggctatggccgtgctgacggaccacccctatgcctctcttacacttcccgatgatgccgctgcagattgtttgtttttgaggcccgggtag

SEQ ID NO: 114747 - DNA, 858 bp, Artificial Sequence
  derived and/or modified sequence
atgggcacccctggtgaaggcctgggccgctgctcacacgccctgattaggggggttcccgagagtctggcttctggggaaggcgccggtgcaggtttgcccgcccttgatcttgcaaaagcacagcgcgagcacggcgtcctgggcgggaaactgagacagaggctgggcttgcaactgttagaactcccccccgaggagtccctccctctcgggccacttctcggagacacagctgttatacaaggggacaccgctcttatcacccgtccgtggtccccggctagacgcccagaagttgacggggtccggaaagcacttcaggatttaggcctgcggattgtggagataggggacgaaaacgctacactcgacgggacggatgtgcttttcacaggccgggaattctttgtagggctgtctaaatggaccaatcatcggggagctgagattgtggctgatacatttcgagacttcgctgtgagtaccgtccctgtgtcaggaccgagtcatttgagagggctgtgcggcatgggagggcctagaaccgtagtggcgggctcctccgacgcagcccagaaggcagtcagagccatggctgttctcaccgaccacccatatgcctcactcactctcccagatgacgctgccgctgattgcctattcctcagaccaggcctgcccggggtacctcctttccttctccatcggggaggaggggatttgcccaacagccaggaagccctgcaaaagctgtccgatgtgactttagttcccgtctcttgcagcgaacttgagaaggcaggagccggcctctccagcctttgtctggttctttcaacccggccccattcttag

SEQ ID NO: 114748 - DNA, 711 bp, Artificial Sequence
  derived and/or modified sequence
atgggcaccccaggcgaagggctcggtaggtgctcacacgccctcattcgaggcgtcccagaatctttggccagtggggagggcgctggtgccgggctccccgcactcgacctagcaaaggcccagcgcgagcatggggttttgggggggaagctcagacaacggctgggacttcagctcctggaactacctccagaagagtccctgcccctgggtcccctcttgggcgataccgctgtgattcagggcgatactgccttaataactcgcccttggtcccctgctcggagaccagaggtcgacggcgtcagaaaagcactccaggatctgggcttgagaatagttgagatcggtgacgagaacgccacactggatgggaccgacgtcttatttactgggagggagttttttgtgggactcagcaaatggacaaatcatcggggcgcagagatcgtggctgatactttcagggattttgcggtcagtactgtgccggtgagtggaccaagtcacctgcgcggattatgtggtatgggcggcccacggacagtcgtggctggctcaagtgatgctgcacagaaggccgtgcgggccatggccgtcctgaccgaccatccttacgcatcactgaccctccccgacgacgccgcagccgactgcctattcctgcggcctggcctccccggtgttccccccttcctgctccactag

SEQ ID NO: 114749 - DNA, 711 bp, Artificial Sequence
  derived and/or modified sequence
atgggcaccccgggggaggggctcggtcgatgtagtcacgcattaattcgtggggttccagagagtctcgcctcgggtgagggtgcaggggctgggctgcctgcattagatttagcaaaggcacagcgggagcacggggtcctgggtggcaagctgcggcagcggttaggtttacagctgctggaactgccacctgaagagtcgctgcccctcgggcccctcttgggggacacagctgtgattcagggcgataccgctctgattactcgcccatggtcacctgcgcggcgcccggaagtcgacggcgtccgaaaggcccttcaggatctgggcctaagaattgtggagattggggacgaaaatgccacactggacggcaccgacgtgctcttcaccggtagggagttcttcgttgggctcagcaaatggacaaaccaccggggcgccgaaatcgttgctgacacttttcgagacttcgcagtttccactgtccccgtctcagggcctagtcaccttaggggcctgtgcggaatgggcgggccccgaactgttgtggcagggtcctccgatgccgctcagaaggcagtgcgggcgatggccgtactcaccgatcacccatatgcctcccttacgctgccagacgatgctgctgctgactgtctgtttctccgcccagggctaccgggagtgccccctttcctgctgcattag

SEQ ID NO: 114750 - DNA, 858 bp, Artificial Sequence
  derived and/or modified sequence
atgggtacccccggggagggcctggggaggtgtagccacgccttaatacggggggtccctgaatcactcgcctctggggagggagccggcgccggcctgccggctttagatctggcgaaagcccagagggaacacggggtgctcggaggcaaactgcggcagagactgggcctccagctgctggaattgcccccagaagagagtcttccgctgggacccctccttggagacacagctgtaattcaaggagacaccgcattgatcacacgcccctggtcaccagctcggcgccccgaggtggacggagtgagaaaggccttgcaggacctaggactcagaatcgtcgaaattggggacgaaaacgctactctggacggaacagacgttttgttcacaggccgtgaattctttgttggactgtcgaaatggacaaatcaccgaggcgcagagattgtagcagacacctttcgggattttgctgtgagtaccgtgccagtgtcaggacccagccacctcaggggcttgtgcgggatgggcggaccacgcaccgtcgtagccggttcttccgatgcagcacagaaggcagtgagggccatggccgttctgactgaccatccatatgcaagcctgactctcccggatgatgctgctgctgactgcctttttttgaggcctggcctgcccggagtcccccctttcctgctccaccgcgggggcggagatcttcccaactcacaagaagcattgcagaagctgtcagacgttactcttgtaccagtgtcatgctcagagcttgagaaagcaggggccgggctaagcagcctttgcctcgtgctgtcaactaggccacattcctag

SEQ ID NO: 114751 - DNA, 678 bp, Artificial Sequence
  derived and/or modified sequence
atgggtaccccaggggagggcttgggacggtgttctcacgcccttatcagaggggttcccgagtcgctggcctccggagaaggagccggtgccggcctccccgccttagacttagccaaagcacagagagagcatggggttcttggcggaaagttgcgacagcgactgggcctccaactgctggaactcccccctgaggagtctttacctctcgggcccttgcttggcgacaccgccgtaatccagggcgataccgcgctgataactaggccttggtcgcctgccagacgacctgaggtggatggggtcaggaaagccttgcaggatctcggtctacgtatcgttgagataggagatgagaacgccacacttgacggaaccgatgtgctctttacagggagggaattttttgtgggactgagcaaatggactaatcaccggggcgctgaaatcgtcgctgacaccttccgagacttcgccgtttcaaccgtgccagtatcaggaccaagccatttacgaggactgtgcggaatgggagggcctcgcaccgttgtggcaggttcttcagacgcggcgcaaaaggctgttagggccatggctgtgctaacagaccacccgtacgcaagtctcaccttgccagacgatgctgcagccgattgtcttttcctgcgaccatag

SEQ ID NO: 114752 - DNA, 858 bp, Artificial Sequence
  derived and/or modified sequence
atgggaactcccggggaagggttagggaggtgtagccacgcattgataaggggggttcccgagagcctggcgtccggggaaggggcaggggccgggcttccagctctggatctggccaaggcacagagggagcatggagttctgggcgggaaactccgccagagactgggacttcagctgctggagctgcctcctgaggagtctctcccacttggaccgctcctgggggacacagccgtaatccagggagataccgctctgattacacggccctggagccccgctcggaggcccgaagttgatggtgtgcggaaagccttgcaggacctgggtcttcgcattgttgagatcggcgacgagaatgccactttggatggcacagacgtgctcttcaccgggcgcgaattcttcgttgggctttcaaagtggacaaatcacaggggagccgagatcgtggccgacaccttcagagactttgctgtgagtaccgtgccggtcagcggcccgagccatctgcggggcctttgtggaatgggtggcccgaggaccgtggtggccggctccagtgatgccgctcaaaaagcggtacgagctatggcagtcttgacagatcacccatacgcatccctcacactgcccgatgatgcagccgctgactgtttgtttcttcgtcccggattgcctggcgtacctcccttcctactccatagaggtgggggcgacctcccaaatagccaagaggctctgcagaagctgtccgacgtgacgcttgttccagtgtcttgttcggagctggaaaaagctggagccggcctgtcctccctttgccttgtcttgtcaacccggccacactcttag

SEQ ID NO: 114753 - DNA, 567 bp, Artificial Sequence
  derived and/or modified sequence
tgaaggcgacctgaagtggacggtgtccgcaaggctcttcaggacctgggccttcgcatagtagagatcggcgacgaaaatgccacgctggacggcacagacgtgctcttcacaggccgagagttctttgttggtctgtcaaaatggaccaatcaccgcggagccgaaatcgtcgcagataccttccgcgactttgcggtaagcaccgtcccagtatcgggcccctcccacttgcggggcttatgcggcatgggggggccccgcacagtcgtcgccggtagcagtgatgccgcccagaaagccgtgaggatgacacaactgcttactgtgagtttttttgtgttgggatgtttggtctgccctctgtcctcatgtaccgtggaggtcggcatttgccctaccgcgcgtcgacactgccgtagctccctgatgtctccctggtacctgtgcccagcacagaattggcggaggctggccccaggcagtgctcctagtgcttggtgctctgcccacgccccaacggcagaggggttggcattgggctactgctggcccggcgtgggctag

SEQ ID NO: 114754 - DNA, 567 bp, Artificial Sequence
  derived and/or modified sequence
taaagaaggcccgaggtggacggggtgagaaaggcccttcaggatttgggactccgcatcgtcgagattggggacgagaacgccacactggacgggactgacgtgctttttacggggagagaatttttcgtggggctgtccaagtggacgaaccacagaggggccgagatcgttgctgacaccttcagggatttcgcagtgtctactgtgcccgtgtcaggccccagtcacctccggggcctgtgtggaatggggggtcccagaacagtggtagccgggagttccgacgctgcccagaaggctgtgagaatgacgcagctcctcaccgtcagcttcttcgttctgggctgtctggtgtgcccactcagtagctgcaccgttgaggtaggcatttgtccaacggccagaagacattgccgaagcagtcttatgtcaccatggtacctatgcccagcgcagaactggcggcggctggcaccaggcagtgccccgagcgcatggtgttccgcacatgcccccacagcagagggcctggccttgggctattgctggcccggcgtgggatag

SEQ ID NO: 114755 - DNA, 858 bp, Artificial Sequence
  derived and/or modified sequence
atggggactcccggggagggcttgggacgctgctctcacgccttgataaggggcgttccagagagtttggcttcaggtgaaggcgcaggagccggactccctgcactggacttggcaaaggctcagagggaacacggtgtgctgggaggaaaactgcgacagcgacttggtctccagcttctcgaattaccaccagaagagtccctgcccctgggccctcttcttggagataccgctgtgatccagggggatactgccctcattaccaggccatggtcccccgccaggcgcccagaagtggatggggtcaggaaagccctgcaggatttggggttgcgcattgtcgagattggtgatgagaacgccacattagatggaacggacgttctcttcaccggtagggagttctttgtcgggctgtccaaatggacaaatcacagaggtgcagaaattgtggccgatactttcagagactttgctgtttcaacagttcctgtgtccggaccctctcacctgcggggcctctgcggtatgggaggtccacgcacagtggttgcaggaagctccgatgccgcccagaaagcagtgagagccatggctgtcctgacagaccatccttacgccagcctcacactccctgacgatgccgccgccgattgcctcttcctgcgcccaggactgcctggcgtccctccttttctactgcaccgtggcgggggagacctgcctaatagtcaagaggcccttcagaagctttccgacgtgacactcgtcccagtgtcttgcagcgagttggaaaaggctggcgctggcttgtcctccttatgtttggttcttagtactaggcctcacagctag

SEQ ID NO: 114756 - DNA, 711 bp, Artificial Sequence
  derived and/or modified sequence
atgggcactccaggtgaagggctcggtaggtgctctcacgcactgatcagaggcgtgcctgagagcctcgcatcaggagaaggtgccggggctggtctacccgctctggacttagccaaagcccagagagagcatggcgtcctgggaggtaaattgcggcaaaggctgggtctgcagttgctggaattgcctccggaggaaagtcttcctttgggtcctcttctgggagacaccgctgtgattcaaggcgacacagcattgatcaccagaccctggtcgcccgcccgtagaccggaggttgacggggtcaggaaggccctccaggacctgggcctgcggattgtggaaattggtgacgaaaatgctacccttgatgggactgacgtgctttttacagggcgcgagttcttcgttggtctgtctaagtggacgaaccacaggggagcagagatcgtagctgatacattcagggatttcgcagtgagtaccgtgccggttagcggaccttctcacctcaggggcctgtgtggaatggggggacccaggaccgtggtcgccgggagcagtgacgcagcccagaaagccgttcgggcgatggctgtgctaaccgatcacccatatgccagcctgacgctccccgacgacgccgcggcggactgtctgttcctgaggcctggtctgcccggggtcccgcccttcttgctgcactag

SEQ ID NO: 114757 - DNA, 567 bp, Artificial Sequence
  derived and/or modified sequence
tgaaggcgccccgaagtggacggcgtacggaaagccctccaagaccttggcttgcggattgtcgaaatcggggatgaaaacgcaaccttggatgggactgatgtgctgttcactggtcgtgagttttttgtggggctgagcaaatggacaaaccatcgtggtgccgagatcgttgccgacacgtttcgcgacttcgccgtatcaactgtccccgtgagtggcccctcccacttgagagggctgtgcggtatgggggggcctagaactgtggtggccggctcctccgacgcagcacagaaggctgtacggatgacccagttgctgacggtgtcattctttgtgctggggtgcctggtatgtccactaagctcctgcactgtggaggtgggcatatgccccacagctcgacgacactgccgctcctctcttatgtccccctggtacctttgccctgctcagaattggagaaggctggcaccaggttcagccccctcagcatggtgctctgcccacgcacctaccgcagaaggcctggcactgggatattgttggcctggagtcggctag

SEQ ID NO: 114758 - DNA, 858 bp, Artificial Sequence
  derived and/or modified sequence
atggggacccctggtgaggggttggggagatgttcccacgctctgattagaggcgtcccagagtccctggcgtcaggcgagggagccggggctggcctaccagcacttgatttagcaaaagctcagagggagcatggcgtgctcggcggcaagcttcgacagcgtctgggactacagctcctggagttaccaccggaggagagcctgcctctgggccctctgttgggggacaccgccgtgatccagggtgatactgccctgatcacacgcccttggtcacccgctcggcgaccagaagtggacggggtacggaaagcactgcaagatctcggcttaagaattgttgagatcggtgacgagaatgctactctcgatgggacggacgtgttattcaccgggcgggagttttttgtgggcctcagcaagtggacaaatcacagaggcgcagagattgttgctgatacctttcgtgatttcgcagtgtccacagttcccgtgagcggcccctcccaccttcgtgggctgtgtgggatggggggtccccgaacagtggtggccggaagttccgatgccgcccaaaaagctgtccgcgccatggccgtgctgactgaccacccttacgcctctttgaccctccctgatgatgcggccgcggactgtctgtttctcagaccaggcctgcccggagtaccgccgttcctgctccacaggggaggtggagatttgcctaattcccaggaagctctgcagaaactgtccgacgtcaccctcgtacctgtgtcctgttccgagctggagaaggccggcgcaggcctgtcatctttgtgcctcgttttatccactcgaccccacagctag

SEQ ID NO: 114759 - DNA, 858 bp, Artificial Sequence
  derived and/or modified sequence
atgggcaccccaggagagggactcgggagatgctcacatgcgctaatccgaggggtcccggaatccctggctagcggggaaggcgccggagccgggttgcccgccctggatctcgccaaggcgcagcgagaacatggagtcctcggcgggaagctccggcagcggctggggctccaactgctggaattaccccccgaggagtccctccctctcggtccccttcttggtgatacagccgttatccagggcgacaccgccctgatcacccgtccctggagccccgccaggcggcccgaggtggacggagtacgcaaggcgcttcaggatctgggtcttcgcatagtcgagattggggacgagaatgccactctagatgggaccgacgtattatttactgggagagaatttttcgtcggacttagtaagtggacaaatcatagaggagcggagattgtggccgacacgtttagagacttcgccgtcagtactgtgcccgtctctggtcctagtcacctgcggggtctctgcggaatggggggaccgaggacagtggtcgccggcagctccgatgcagcgcagaaagctgtgcgtgctatggcagtgctgaccgaccacccatacgccagcttgaccctgcccgatgatgcggctgccgactgtctcttcctgcggccagggctgccaggggttcccccctttcttctgcaccggggcggaggagaccttcctaactctcaggaggccttgcagaagctgtcagatgtgaccctcgtgcccgtgtcctgctcagagcttgagaaggccggcgctgggctgtcttctctgtgcttagtcctctcgacgcggcctcattcttag

SEQ ID NO: 114760 - DNA, 711 bp, Artificial Sequence
  derived and/or modified sequence
atgggcacccctggtgagggattaggtcggtgcagccatgctctgatccgaggagtccccgagagcctggcatccggtgaaggtgctggtgctgggttacccgccctagatttggctaaggcgcagagagaacacggcgtgctgggagggaagcttaggcagagactgggcctccagctgctggaactgccccctgaagagtcattaccattaggcccattgctcggggacaccgctgtgattcagggggatacagcattgatcacacgtccatggtctcctgccagacgccccgaggtggatggagtaagaaaggctcttcaagatttggggttgcgcatcgtggagattggcgacgagaacgccacgcttgacggaaccgacgtgctgtttaccggccgcgagttcttcgtcgggctaagtaaatggacgaatcataggggcgcggagatcgtcgccgatacattcagggactttgcagtgtctaccgtcccagtttccggaccgtcacatttacggggattgtgtgggatggggggtcccaggactgtggttgctgggagcagtgatgccgcgcagaaggcggtcagggcgatggcggtcctgactgaccacccgtacgcatccctcactctgcctgacgacgccgcagctgactgtctgttcctaagacctggtctacccggcgtgccgccctttctcttacactag

SEQ ID NO: 114761 - DNA, 711 bp, Artificial Sequence
  derived and/or modified sequence
atggggacacccggcgaggggctgggacggtgcagtcatgccttgatcagaggggtgccagaatccctggcttccggagaaggggcgggcgcagggcttcccgctctggacctcgcaaaggcccagcgtgaacacggagtcctgggcgggaagctgaggcagcgcttaggtctccaacttttggagctgcctccagaagagagcctcccccttggtcccctgctgggagatacagccgtcatacagggtgacacagcgttgattacccgcccatggtcgccagccagaaggcccgaggtcgatggagtgaggaaagcactgcaggatctggggctgagaatcgtcgaaatcggagacgagaacgcaaccctggacggaacagatgtgctttttaccggccgagagttctttgtcgggcttagcaaatggacaaaccaccgcggagcagaaattgtggcagacacattcagagattttgcagtgtcaacggtgccggttagtgggccatcgcatctcagaggtctttgcggtatgggagggccgcggaccgtagtcgcaggcagctctgatgctgctcagaaggcggtgcgggcgatggccgtgctaactgatcacccttacgcgagcctaacgctgcccgatgacgccgctgcggattgcttgttcctcaggcccggtctgcccggcgtcccgccgtttctgctgcactag

SEQ ID NO: 114762 - DNA, 858 bp, Artificial Sequence
  derived and/or modified sequence
atgggcaccccaggagagggcctgggccgctgcagccacgccctgatccggggcgtgcctgagagcctggccagcggggagggcgctggggccggcctgcctgccctggacctggccaaggcccagcgggagcacggcgtgctgggcggcaagctgcggcagaggctgggcctgcagctgctggagctgcccccagaggagagcctgcccctgggccccctgctgggggacacagctgtgatccagggcgacacagccctgatcacccggccctggagccctgcccggcggcctgaggtggatggagtgaggaaggccctgcaggacctgggcctgcgcatcgtggagattggagatgaaaatgccaccctggatggaacagatgtgctcttcaccggccgggagttctttgtgggcctgagcaagtggaccaaccacagaggagctgagatcgtggccgacaccttccgggactttgctgtgtccacagtgcctgtgtctggccccagccacctgcggggcctgtgtggcatgggcggccccaggacagtggtggccggcagcagtgatgctgcccagaaggctgtgcgggccatggctgtgctgacagaccacccctatgccagcctgaccctgcctgatgatgctgctgctgactgcctcttcctgcggcccggcctgcccggggtgccccccttcctgctgcaccggggcggcggggacctgcccaacagccaggaggccctgcagaagctgagtgatgtgaccctggtgcctgtgtcctgcagcgagctggagaaggccggggccggcctgagcagcctgtgcctggtgctgagcacccggccccacagctag

SEQ ID NO: 114763 - DNA, 567 bp, Artificial Sequence
  derived and/or modified sequence
tgaagaagacctgaggtggatggagtgaggaaggccctgcaggacctgggcctgcgcatcgtggagattggagatgaaaatgccaccctggatggaacagatgtgctcttcaccggccgggagttctttgtgggcctgagcaagtggaccaaccacagaggagctgagatcgtggccgacaccttccgggactttgctgtgtccacagtgcctgtgtctggccccagccacctgcggggcctgtgtggcatgggcggccccaggacagtggtggccggcagcagtgatgctgcccagaaggctgtgaggatgacccagctgctgactgtgtccttctttgtgctgggctgcctggtgtgccccctgagcagctgcaccgtggaggtgggcatctgccccacagcccggcggcactgccgcagcagcctgatgagcccctggtacctgtgcccagcccagaactggaggcggctggcccctggcagcgcccccagcgcctggtgcagcgcccacgcccccacagctgagggcctggccctgggctactgctggccaggagtgggctag

SEQ ID NO: 114764 - DNA, 711 bp, Artificial Sequence
  derived and/or modified sequence
atgggcaccccaggagagggcctgggccgctgcagccacgccctgatccggggcgtgcctgagagcctggccagcggggagggcgctggggccggcctgcctgccctggacctggccaaggcccagcgggagcacggcgtgctgggcggcaagctgcggcagaggctgggcctgcagctgctggagctgcccccagaggagagcctgcccctgggccccctgctgggggacacagctgtgatccagggcgacacagccctgatcacccggccctggagccctgcccggcggcctgaggtggatggagtgaggaaggccctgcaggacctgggcctgcgcatcgtggagattggagatgaaaatgccaccctggatggaacagatgtgctcttcaccggccgggagttctttgtgggcctgagcaagtggaccaaccacagaggagctgagatcgtggccgacaccttccgggactttgctgtgtccacagtgcctgtgtctggccccagccacctgcggggcctgtgtggcatgggcggccccaggacagtggtggccggcagcagtgatgctgcccagaaggctgtgcgggccatggctgtgctgacagaccacccctatgccagcctgaccctgcctgatgatgctgctgctgactgcctcttcctgcggcccggcctgcccggggtgccccccttcctgctgcactag

SEQ ID NO: 114765 - DNA, 681 bp, Artificial Sequence
  derived and/or modified sequence
atgggcaccccaggagagggcctgggccgctgcagccacgccctgatccggggcgtgcctgagagcctggccagcggggagggcgctggggccggcctgcctgccctggacctggccaaggcccagcgggagcacggcgtgctgggcggcaagctgcggcagaggctgggcctgcagctgctggagctgcccccagaggagagcctgcccctgggccccctgctgggggacacagctgtgatccagggcgacacagccctgatcacccggccctggagccctgcccggcggcctgaggtggatggagtgaggaaggccctgcaggacctgggcctgcgcatcgtggagattggagatgaaaatgccaccctggatggaacagatgtgctcttcaccggccgggagttctttgtgggcctgagcaagtggaccaaccacagaggagctgagatcgtggccgacaccttccgggactttgctgtgtccacagtgcctgtgtctggccccagccacctgcggggcctgtgtggcatgggcggccccaggacagtggtggccggcagcagtgatgctgcccagaaggctgtgcgggccatggctgtgctgacagaccacccctatgccagcctgaccctgcctgatgatgctgctgctgactgcctcttcctgcggcctggatag

SEQ ID NO: 114766 - DNA, 678 bp, Artificial Sequence
  derived and/or modified sequence
atgggcaccccaggagagggcctgggccgctgcagccacgccctgatccggggcgtgcctgagagcctggccagcggggagggcgctggggccggcctgcctgccctggacctggccaaggcccagcgggagcacggcgtgctgggcggcaagctgcggcagaggctgggcctgcagctgctggagctgcccccagaggagagcctgcccctgggccccctgctgggggacacagctgtgatccagggcgacacagccctgatcacccggccctggagccctgcccggcggcctgaggtggatggagtgaggaaggccctgcaggacctgggcctgcgcatcgtggagattggagatgaaaatgccaccctggatggaacagatgtgctcttcaccggccgggagttctttgtgggcctgagcaagtggaccaaccacagaggagctgagatcgtggccgacaccttccgggactttgctgtgtccacagtgcctgtgtctggccccagccacctgcggggcctgtgtggcatgggcggccccaggacagtggtggccggcagcagtgatgctgcccagaaggctgtgcgggccatggctgtgctgacagaccacccctatgccagcctgaccctgcctgatgatgctgctgctgactgcctcttcctgcggccctag

SEQ ID NO: 114767 - DNA, 858 bp, Artificial Sequence
  derived and/or modified sequence
atgggcacccccggcgagggcctgggccggtgcagccacgccctgattcgaggcgtccccgagagtttggccagtggagaaggggcaggggctggcctgccggccttggatcttgcgaaggctcagagggaacatggtgtacttggaggcaaattgaggcagaggcttgggttacagctcctcgaacttccacccgaagaatctctacccctgggcccactgctcggtgacaccgccgttattcagggggataccgctctgattacaaggccctggagccctgcaagaagacctgaagtggatggggttaggaaggccctgcaggacctgggcctgagaattgtggagatcggtgatgaaaatgccacattggacggtactgatgtgttgttcacagggcgcgagttcttcgtgggattaagtaagtggacgaaccatcgcggcgccgagattgtggccgatacgtttcgcgactttgccgttagcaccgtgcccgtgagcggacctagtcacttacggggcttgtgcggcatgggcggacctcgaactgtcgtggctggatcctctgatgccgcccagaaggcagtgcgggccatggccgtacttactgaccatccttatgcctccctgaccctgcccgacgatgccgcagctgactgtctcttcctgagacctggacttccgggcgtgcccccgtttcttctgcaccgaggagggggtgacttgccaaattcccaggaagccctccagaagctttccgacgtcacactggtgcccgtgtcctgctccgaactcgaaaaggccggcgcaggcctgtcgtcactttgcctcgttctgtccacacggcctcactcttag

SEQ ID NO: 114768 - DNA, 858 bp, Artificial Sequence
  derived and/or modified sequence
atgggcacccccggcgagggcctgggccggtgcagccacgccctgatcaggggtgtccccgaatcactggctagcggcgaaggcgccggtgccggcctgccagctctggaccttgctaaagctcagcgagaacatggggtgttggggggaaaattgaggcagcgtctgggactgcaactcttagaactgccccctgaggagtcccttccactaggccccctgttaggggatactgccgtaatccagggcgacacagcacttataactaggccctggtccccagcacggagacccgaggttgacggcgtccggaaggcgttacaggacctgggcctaagaatcgtggagatcggcgacgagaacgccacattggacggtactgatgtattgtttacagggcgtgaattctttgtcgggctctctaagtggacaaatcaccgtggcgctgaaatcgttgccgacacgttccgtgatttcgccgtgagcacagtgcctgtgagcggcccttcccatctgcgtggcctttgtgggatgggtgggcctcgcactgtagtggccggctcatctgacgctgcccagaaggctgtgcgggcgatggcagtcctgaccgatcatccatacgcctcactgacattgccggacgatgccgcagccgattgcctgtttctgaggccagggcttcccggggtgcctcctttcctgctgcaccgcggtggaggagacctcccaaactcgcaggaggccctacagaaactctcggatgtgactcttgttccagtgagctgctcggaactggagaaggcaggggctggcctgtcctcgttatgcttggtgctgtcaacgcgaccccactcctag

SEQ ID NO: 114769 - DNA, 858 bp, Artificial Sequence
  derived and/or modified sequence
atgggcacccccggcgagggcctgggccggtgcagccacgccctgattaggggggtccctgagtcgctggcttctggcgaaggggcaggagccggtctgccggctttagatctcgctaaggcacaacgggaacatggcgtgctgggaggaaagctgcgtcagcgcctgggactccagctgctggagttgcctcccgaggaatccctccctcttggaccactccttggcgacacagcagtgattcaaggcgataccgcattgattacccggccctggagcccagcaagaaggccagaggtagatggtgtcaggaaagcattacaggacctagggctgcgcatcgtggaaataggagatgagaatgccacactcgatggaacagatgtgctattcacaggcagggagttctttgttgggctctcaaagtggacaaaccaccggggcgccgagatcgtcgcggatacatttcgggatttcgcagttagtaccgttcctgtctccggtccatcacacctgcgcggtctctgcggcatgggcgggcctcgcactgtggtcgctggtagttccgacgccgcccagaaggcagtaagagccatggcggtactgacagaccatccttatgctagtctgacattgccagacgacgctgccgccgactgcttatttctgaggccagggcttccaggagtgcccccttttttacttcaccgaggaggaggagacctcccaaatagccaagaggctctgcagaagctatccgacgtcacactcgtgcccgtatcatgttctgagctggagaaggcaggggctggactgtcctcgctctgcctagttctttccacacgtccccatagctag

SEQ ID NO: 114770 - DNA, 858 bp, Artificial Sequence
  derived and/or modified sequence
atgggcacccccggcgagggcctgggccggtgcagccacgccctgatccgcggcgtccccgaaagcctagcgtcaggagagggcgccggggctggactacctgcactggacctcgctaaagcacaacgagaacacggagttctgggcggtaagttgaggcaacgtctgggactgcagttattagagctgcccccggaggagtcactgcccctcggccccctgctcggggacacagctgtcatccagggcgataccgccttgatcaccagaccatggtctccagcccgacgccctgaagtagacggtgtgaggaaagccctgcaggaccttggcctgcgcatcgttgaaatcggtgatgaaaacgcaacgctggatggaactgacgtgctgttcacgggtcgcgagttcttcgtgggtttatcaaaatggacgaaccataggggggctgagattgttgccgacaccttcagggattttgccgtgagcactgtgccagtgagtggcccctcccacctgagaggcctgtgtggaatggggggtccaagaacagttgtcgcaggttcttccgatgctgctcagaaggctgtgcgtgccatggctgtgctgactgatcacccttatgcctcgcttacactgcccgacgacgccgctgccgactgcttgttcttgcgccccggccttcctggtgtgcctcccttccttcttcacaggggcggcggagacctgccaaacagccaggaagcactgcagaagttatcagatgtgacactcgttcccgtatcctgcagcgagctcgagaaggccggcgctggcctgtcatcattgtgtttggtcctcagtacaagacctcactcctag

SEQ ID NO: 114771 - DNA, 858 bp, Artificial Sequence
  derived and/or modified sequence
atgggcacccccggcgagggcctgggccggtgcagccacgccctgattcggggcgtacccgagagcttagcctctggtgaaggcgcaggagctgggctgccagccttggatctcgcaaaggctcagagggaacatggagtgctgggaggtaaacttcgtcagaggctcggacttcagcttctcgaactgccccccgaagagagcctgcccctgggacctctgctgggcgataccgcagtgattcagggcgatactgccctcatcacccgcccatggagccccgccaggaggccagaagtggatggcgtcaggaaggctctccaagatctggggttgcggatcgttgagataggcgacgagaatgctaccctcgacggcactgatgtcttattcacaggtcgcgaattttttgtaggactgtccaagtggactaaccatagaggcgccgagatcgtggccgacactttccgggacttcgctgtgagcaccgttcctgtgagcggaccatcacacctgcgcggattgtgcggaatgggtggcccacggactgtcgtcgccggttcttccgacgccgctcagaaagccgtgcgcgcaatggcagtactcacagaccatccatatgcctctctcaccctgcccgatgatgctgccgcggattgtctgttcctccggccaggacttccgggtgtccccccattccttctgcacaggggaggaggcgacctgcctaatagccaggaggccctccagaagcttagcgatgtgaccttggttccggtgagctgtagcgagctcgaaaaggccggggcgggactttccagtctgtgcttagtgttgtcaacccggccccattcttag

SEQ ID NO: 114772 - DNA, 858 bp, Artificial Sequence
  derived and/or modified sequence
atgggcacccccggcgagggcctgggccggtgcagccacgccctgataaggggggtgcctgagtccttggcatccggcgagggggcaggcgccgggttgccagctcttgatctggctaaggcccagcgtgagcacggcgttctcgggggcaagctccgccaacggctcggtctgcagttattggaattacccccagaggagtcactgcccttgggcccactgttaggggataccgccgtgattcagggtgatactgccctgattacccgcccatggagtccagcaagacgccccgaagtcgatggcgtgcgaaaagctcttcaagacctgggcctgcggattgttgagatcggtgacgagaatgccaccctagacggaacagatgtgctttttacaggaagagaatttttcgtgggactgtcaaagtggacaaatcatcgcggcgctgagatcgtggccgataccttcagagacttcgcggtatctaccgtgcctgtgtcgggtccgtcccatctccggggcttgtgcggcatgggcggcccgagaactgtggtagccggtagcagcgatgccgcccagaaggctgtgagagccatggctgtgcttaccgatcacccctatgcctcactgacccttccagacgacgctgctgctgactgcctgttcctaagaccgggcttgcctggggttccccctttcctactgcacagaggcggtggtgacctgcccaatagccaggaggccctccagaagctgtccgatgtgactctggtgcccgtctcgtgctccgagttagagaaggctggcgctggtctttcatcgctgtgtttggttctgagtacacgacctcattcgtag

SEQ ID NO: 114773 - DNA, 858 bp, Artificial Sequence
  derived and/or modified sequence
atgggcacccccggcgagggcctgggccggtgcagccacgccctgatccgcggcgtgcccgagtcccttgctagtggtgagggcgccggagccggattacccgctcttgacctcgcaaaagcacagcgcgaacatggagtcctgggtgggaagctcagacagaggctaggactccaattactagagcttccccccgaggagtcactacccttgggccccctcttgggtgataccgccgtaatccagggggatactgcactcataactaggccctggagtccagccagacgtccagaggtcgatggcgtccggaaggcactgcaggatctcgggttacgcattgtagagatcggagatgaaaacgctactctcgatggtaccgacgtgttgttcaccggaagggagtttttcgtaggactttctaaatggaccaaccaccgcggtgccgagattgtggcggatacctttcgcgattttgcagtgtctactgtgcctgttagcggtcccagtcatctgcgtgggctctgcggaatgggcggacccaggaccgtcgtagcaggaagtagcgatgcagctcagaaagctgtgcgggccatggcggtactgacagaccacccttacgccagcctcaccttgcccgatgatgccgctgcagattgcctgttcttgagaccgggcctgcctggtgtcccacccttcctgctccatcggggcggcggcgacctacctaattctcaggaagctctgcagaagctaagcgacgtgaccttagtgcccgtttcctgctccgagttagagaaggccggggccggactgtcctccctttgtctggtgttgtcaacgcgtccccatagctag

SEQ ID NO: 114774 - DNA, 567 bp, Artificial Sequence
  derived and/or modified sequence
tgacggcggcccgaggtggacggcgtgcggaaggccctgcaggacctgggacttcgtatcgtggaaattggagacgaaaatgcaacactcgacggcactgatgtcctgttcaccgggagggagttttttgtggggctttcaaaatggaccaaccacagaggcgcagagatcgtggcagatacatttagagattttgccgtctctaccgtacccgtgtcagggccctctcatctgcgtggcctctgcgggatgggaggacctcgcacagtggtcgccggctccagcgatgccgcacagaaagccgtccggatgacacagctgctgactgtctcatttttcgtcctgggctgcttggtgtgtcccctgagctcttgcaccgtagaggtcgggatatgtccaacggcgaggaggcattgcaggagctcactgatgtctccttggtacctctgtcccgcccagaactggaggcgcctggctcccggaagcgctccgtcggcctggtgcagcgctcacgcaccaacggctgagggcttagcactggggtattgctggcccggtgtaggttag

SEQ ID NO: 114775 - DNA, 567 bp, Artificial Sequence
  derived and/or modified sequence
tgacggcggcccgaggtggacggcgtgcggaaggccctgcaggacttgggattgagaatagtagagatcggggatgaaaacgcgacactggacggaacagatgtcctgtttacagggcgggaattctttgtcgggcttagcaaatggacaaatcatcgaggcgccgaaatcgtcgcggacacattccgggattttgcagttagcactgtccccgtctctggaccctcccatctgcgcggcctttgcgggatgggtgggccaagaaccgtcgtcgcaggttcctccgacgccgcgcagaaggccgtcagaatgacacagttactgacagtttctttctttgtgctcgggtgcctagtttgtccattatccagctgtaccgtcgaagtgggaatctgcccgaccgcgaggcggcattgcagatcgtctcttatgagcccctggtacctgtgcccagcacagaactggagacgcctggctccaggctccgctccttccgcatggtgctccgcgcatgctcctaccgctgaggggttggctctaggctactgttggcccggagtcgggtag

SEQ ID NO: 114776 - DNA, 858 bp, Artificial Sequence
  derived and/or modified sequence
atgggcacccccggcgagggcctgggccggtgcagccacgccctgattcgcggcgtcccggagagtcttgcatcaggcgaaggcgcaggagctggcctgcctgccctcgacttagctaaagctcaacgtgagcacggtgtacttggcggtaagctgcgtcagagactaggattacagctgttggaacttccccctgaagaatctttgcctttaggccccctattgggtgacaccgcagtgatccagggtgacacggcattaataactaggccgtggagccccgcccggcggcctgaggtggatggtgtgcgcaaggcactgcaagacctcgggctgcggatagtggaaattggtgatgagaatgccacactggacgggacagatgttcttttcaccggaagagaattcttcgtcggcttgagcaaatggactaaccacagaggggccgagatcgtagccgataccttccgcgattttgcagtctctacagtcccagtgagcggaccctcccaccttcgtggcctttgtggaatgggtggcccccgaactgtcgtagctggcagctctgacgccgcccagaaggctgtccgggcaatggccgtgctgacagaccacccctacgccagtctcacgcttcccgatgacgcggccgcagattgtttgtttctgcgtccggggttgcccggagtgcctccatttctcctccaccgaggggggggtgacttaccgaattcccaggaggcgctgcaaaagctctcagatgtgactctggtgcctgtgagctgcagtgagttggagaaggctggcgcagggttgagttccctgtgtttggttctgtcaaccagaccacactcatag

SEQ ID NO: 114777 - DNA, 858 bp, Artificial Sequence
  derived and/or modified sequence
atgggcacccccggcgagggcctgggccggtgcagccacgccctgattagaggagtgccggagtcactagcttccggagagggtgcaggagcggggctccctgctttggatctggctaaagcacagcgggagcacggagtgctcggtggcaaactccgacaacgattgggtctacaactgctggagcttcccccagaagaatcgcttccactgggccctctgcttggggataccgccgttatccagggcgacacggccctgattacacggccctggtcccccgctaggcgccctgaggtggatggggttcgaaaagcactccaggaccttgggctcaggatcgtggagataggagacgaaaatgcaacattagacggtactgacgtcctgtttaccggccgagagttttttgtgggactgtccaagtggacaaaccaccggggcgcggaaatcgtggcagacacattccgagatttcgcagtctccactgtgcccgtgtcaggtccgtcccaccttcgaggtctgtgcggaatgggcggacctcgaacagtagtggcgggctcatccgacgccgcccaaaaagccgtcagagccatggccgtgctcaccgatcacccttacgcctcccttacgttgccagacgatgctgccgcagactgcctcttcttaagacccggactgcctggcgtgcctccgtttttgttgcacagaggtggaggtgatttacctaacagccaggaagcccttcagaagctgagtgacgtgacactcgtgccagtcagctgttctgagctggagaaggctggcgctgggctaagctcactctgcctggtgctgtcgacgcgccctcactcttag

SEQ ID NO: 114778 - DNA, 858 bp, Artificial Sequence
  derived and/or modified sequence
atgggcacccccggcgagggcctgggccggtgcagccacgccctgattagaggtgtgcctgagagcctggccagcggagagggcgccggagcgggcctgcccgcattagatttagctaaggcccagcgagagcacggcgttctagggggcaagctgagacagcgcctcgggctgcagctgctcgagttgcccccggaagagtccctgcccttaggccccctcctgggggacacagccgtcatccagggggatacggcactcatcaccaggccttggtctccagctcgtagacctgaggtggatggagtacgtaaagcactgcaagatctggggctgagaattgtcgaaatcggcgacgaaaacgctactcttgatggcacagacgtacttttcaccgggcgcgagttttttgtgggtctgtccaaatggacaaatcaccggggtgccgagatcgttgccgatacatttcgggactttgccgtctctactgtaccggtctctggcccaagccacttgagaggactatgcggcatgggaggcccgcgcacggtggtggcgggctcctccgacgcggcacagaaggcggtacgagcaatggctgtgctgacagaccatccttatgcttctttgacactgcctgacgatgccgcagccgactgtttatttctgagaccagggctgcccggggtcccgccatttctgcttcaccgaggcggaggcgacttgccaaactctcaggaagctctccaaaagttgagcgatgtgaccctggtcccagtgagttgctccgagcttgaaaaagctggggccgggctttcttcattgtgtttggtcctctcaaccaggcctcactcttag

SEQ ID NO: 114779 - DNA, 711 bp, Artificial Sequence
  derived and/or modified sequence
atgggcacccccggcgagggcctgggccggtgcagccacgccctgattaggggagtgccggagtccttggcttcaggggaaggtgccggcgctggcctacctgccttggacctggcaaaggcccagcgcgagcacggggtcctgggtggcaaactgagacagcggcttgggttacagctcttggaactccccccagaagaaagtctgccgttgggacccctgctgggtgacaccgccgtcatacagggtgacaccgccctgataacgagaccctggtcgcctgctaggagaccagaagttgacggggtccgtaaggctctgcaggatctcggcctgcgtattgtagagatcggagatgagaacgccaccctagatggcaccgatgtcctctttactggacgagaattcttcgtgggtctttctaagtggacaaatcatcgcggagcggagatcgtcgcggacacctttcgggacttcgccgtgtcgacagtacccgtgtccggcccaagtcatctacgcgggctctgtggaatgggaggtccaagaacagttgttgctggcagttcagatgccgcccagaaggctgttagggctatggctgtactgacagaccacccgtacgcttcacttacactcccggacgacgccgccgctgactgcttgttcctcagacccggactacctggggtgcctcccttccttctgcactag

SEQ ID NO: 114780 - DNA, 681 bp, Artificial Sequence
  derived and/or modified sequence
atgggcacccccggcgagggcctgggccggtgcagccacgccctgattaggggtgtccccgaaagcttggcttcaggagagggggctggggcaggactcccagctctggacctcgccaaagcccagcgggagcacggagtcctgggtgggaagctgagacaacgtttgggacttcagttgttagagttgccccccgaagagagtttaccactggggcccctgttgggggacacagctgtcatccagggagataccgctctcatcactaggccttggtcccctgcaagacggcccgaggttgatggcgtgcgcaaggccctgcaagaccttggactcagaatcgtggagattggcgatgaaaacgccacactggacggtacagatgtgctctttactggccgggagttttttgttggactgagtaaatggaccaaccacagaggagccgaaatcgtggctgatactttcagggactttgctgtttccaccgtacccgtcagcggtccctcgcacctgcgggggctctgcggtatggggggacccaggactgtggtggcagggtcatcggacgcagctcagaaggcagtaagggctatggccgtcttaactgaccacccctatgccagtctcactctgccagacgatgccgccgccgattgtttgttcctaagacctggatag

SEQ ID NO: 114781 - DNA, 711 bp, Artificial Sequence
  derived and/or modified sequence
atgggcacccccggcgagggcctgggccggtgcagccacgccctgatcaggggcgtgcctgagtctttggcgtccggggaaggagcaggggccgggctccctgctcttgatctcgccaaggctcagagagagcatggggttcttgggggaaagctaaggcagcgtctcgggctgcagctgctcgagttgccccctgaggaatctttacccctggggcctttgctgggagatacagcggtaatccagggagacactgcattaataactcgaccatggtcaccagcccgccgacctgaagtcgatggtgtgagaaaagccctgcaggatctggggctgaggattgtggaaatcggggacgagaatgctacactcgatggtacagacgtgctcttcaccgggcgcgagttcttcgtgggactgagcaaatggacaaatcaccgcggggcagagatcgtcgccgacaccttccgagacttcgctgtgtcaacagttccagtgagcggcccgtcccacctcaggggtctctgtggcatgggaggacccagaactgtcgtggccggaagcagcgacgccgcccagaaggcagtacgagcaatggctgtcttgaccgatcacccttatgcctctttaacattgccggatgacgccgccgccgattgtctctttctgaggccgggattgcctggtgtgcccccgttcctcctgcattag

SEQ ID NO: 114782 - DNA, 858 bp, Artificial Sequence
  derived and/or modified sequence
atgggcacccccggcgagggcctgggccggtgcagccacgccctgatcagaggcgtccctgagagcctggctagcggtgaaggcgccggggccggcttgcccgccctggatctggctaaagctcagcgggagcacggcgttttgggtggtaagctgcggcagaggctgggactacagcttttggagctgcccccagaggaatctctgccactggggccactcctcggcgacacggccgtcatacaaggtgacacagccctgatcactcggccttggagccccgcccgcaggcctgaagtcgatggcgtacgaaaggccctccaggacctcggcttgcgcattgtcgagatcggtgacgaaaacgcaacccttgatggtacagacgtgctgttcaccggtagagaattctttgtgggcctttctaaatggaccaaccacagaggggctgaaatcgtggccgacaccttcagagatttcgccgtaagtacagtgcctgtgtccggcccaagtcacctgcgagggctgtgcggcatgggcgggcctagaacagtagtcgctggatccagtgacgcagcgcaaaaagccgttagagccatggcagtgcttactgaccacccctacgcctcactcacactgcctgatgacgctgccgcggactgcttgtttctccgaccaggcctcccaggggttcctccctttctgctccacaggggcggaggagatttgcccaattctcaggaagccctgcaaaagctgtcagacgtgactctggtgccggtttcttgctcagagctggagaaggcaggcgctggccttagctccctgtgcctggtcctgagcactcgaccacatagctag

SEQ ID NO: 114783 - DNA, 858 bp, Artificial Sequence
  derived and/or modified sequence
atgggcacccccggcgagggcctgggccggtgcagccacgccctgattcgcggcgtgcctgagtctcttgcaagcggcgagggagcaggtgctggactccctgccctggacctcgctaaggcgcaacgagaacacggagtgcttggagggaaactccggcagcgcctgggactgcagctgctggaactacctcccgaggagtccctccctctgggtcctctccttggagacactgctgtgatacaaggtgataccgcacttattactagaccatggtcgccggctaggcgccctgaagtcgatggtgttcggaaagctctgcaagacttaggcctgcggattgtcgaaatcggcgatgaaaatgcaacgctggatggaaccgacgttttgttcacaggaagggagttctttgtgggactgagtaaatggaccaaccatcggggagcagaaatcgttgccgatacctttcgtgacttcgccgtgtctaccgttccagtgagtggacccagccacttgcgcggactttgcggcatgggggggcctaggaccgtggttgctgggtcatcagacgccgcacagaaggccgttcgcgcgatggccgtgctgactgaccacccctatgccagtctgaccctccccgacgacgctgccgctgactgcctgttcttaagacctggcttgccaggggtgccaccttttcttctccatcggggcggcggagacctgcccaattcacaggaagccttgcagaagctgtcggacgtgaccctcgtccctgtctcatgctctgagttagaaaaggccggagcggggctctcgagcctgtgtcttgtactgtccaccagaccacactcgtag

SEQ ID NO: 114784 - DNA, 858 bp, Artificial Sequence
  derived and/or modified sequence
atgggcacccccggcgagggcctgggccggtgcagccacgccctgatacgtggggttcctgaaagtctggcttcgggggaaggcgcaggtgccggacttcccgcgctggatctggcaaaagcccagcgcgaacacggggtcttaggcggtaagctccgtcagaggctggggctacaacttctcgagctgcctccagaggaatcccttcctcttgggcccctgctgggcgatacggctgtgatccaaggtgatactgctttaattaccaggccttggtcgccagcccgtagaccagaagttgacggtgtgaggaaagccttgcaggacttgggactgagaatcgttgaaattggagatgagaatgcaacactcgatggcaccgacgtgctgttcacaggtcgcgagttcttcgtgggtttgtcgaaatggaccaaccacaggggcgcagaaattgtggccgacacctttagagattttgcagtgagtacagtacccgtatcaggaccttcccatttgaggggactgtgcggaatggggggaccgagaactgttgtggccggaagctcagacgccgcacagaaggctgttcgcgctatggctgtccttaccgatcatccttacgcatcactgactctaccggacgatgctgctgccgactgtctgtttttacgccccggtctgcctggcgtgccccccttcctgttacatcgaggcggaggtgacttacctaactcccaggaagccttgcagaaactctcagacgtcacactggtccctgtctcgtgctctgaactggagaaggctggggcaggactgagctcgttatgcttggtacttagtactagacctcactcatag

SEQ ID NO: 114785 - DNA, 681 bp, Artificial Sequence
  derived and/or modified sequence
atgggcacccccggcgagggcctgggccggtgcagccacgccctgatccggggtgtcccagagtcattagcctcaggtgagggggccggcgcagggcttcctgccctggatcttgctaaggcccagcgggagcatggggtcctgggtggcaagctcaggcagcggctgggtctccagttgctggaactgccaccagaagaaagcctgccattagggcctctgctgggagacacggccgttattcagggagacactgcccttattaccagaccttggtcacccgcgagacgaccggaggtagatggagtgaggaaggctctgcaagatctgggcctgagaatcgtggaaattggtgatgaaaatgccaccctggatggtacggatgttcttttcaccggtagagagttttttgtcggtttgtcaaagtggaccaatcatagaggcgccgaaatcgttgctgacacctttcgtgatttcgcggtgagcaccgttcctgtcagtggaccctctcacctgcggggtctctgtgggatgggcgggcctcgcaccgtggtggccgggtcttctgacgccgcccaaaaagcggtcagggccatggccgttcttacagatcatccctacgcatcccttacattgcctgatgacgctgccgctgattgcctctttctccgaccagggtag

SEQ ID NO: 114786 - DNA, 858 bp, Artificial Sequence
  derived and/or modified sequence
atgggcacccccggcgagggcctgggccggtgcagccacgccctgattaggggcgtgcccgaaagcctggcttcaggggaaggggcaggggccggccttcctgccctggatctagctaaggctcagcgggagcacggcgtgttaggagggaagctaaggcagagactgggactgcagctgctggaattacctcccgaagaaagtctgccacttggaccactcctgggagataccgccgtcattcaaggggacaccgcactaatcacccgcccctggtccccagctagaagaccagaagtcgacggcgtgagaaaggccctgcaggacctggggcttcggatagtggaaatcggcgacgagaacgccaccttggatggaacggacgtactgtttaccggaagggagtttttcgtgggcctaagtaaatggacaaatcacaggggcgctgagatcgttgcagatacattccgagattttgctgtgtccacagttcccgtgtccggccctagccatctgcggggcttgtgtgggatggggggtcctcgtaccgtggtcgcgggaagttctgacgcagctcagaaagccgtgagagcaatggccgtgctcaccgatcatccctacgcctcattgacattgcccgacgatgcggccgcggactgtctgttcctgcggccgggactgcctggtgtgccaccatttctcctacacaggggaggcggcgacctgccaaattcgcaggaagccctacagaaattgagcgacgttactttggtgcccgtgtcttgttccgagctggaaaaggccggcgccggattgtcctccctgtgcctggttcttagtaccaggcctcattcgtag

SEQ ID NO: 114787 - DNA, 681 bp, Artificial Sequence
  derived and/or modified sequence
atgggcacccccggcgagggcctgggccggtgcagccacgccctgatccggggcgttcccgagagcttggcctcaggggagggagcaggggctggtctacccgctctggacctcgctaaagcacaaagggagcacggggtcctgggagggaagctgcggcaaagactcggattgcaacttttagaactgcctcctgaggaaagcctgccactgggacccctccttggtgacacagcggttatccagggcgacacggcgctcataacccgcccctggtccccagcgaggagacccgaagtagacggcgtccgaaaggcgctgcaggatttgggcctccggatcgttgaaattggagatgagaacgcgacgctagacggaaccgacgtcctcttcacaggtagagaattcttcgttgggttgtctaagtggaccaatcacagaggagcggagatagttgcggacacctttcgggattttgcggtctccactgtgcctgtcagtggccccagccatctgcgggggttatgtggcatgggaggccctagaaccgtcgtggcgggatcaagtgacgccgcacagaaagcggtgcgcgctatggcagttctgacagatcatccttatgcttccctgaccctccctgacgatgccgctgcggattgcctcttccttcgacccggctag

SEQ ID NO: 114788 - DNA, 681 bp, Artificial Sequence
  derived and/or modified sequence
atgggcacccccggcgagggcctgggccggtgcagccacgccctgatcaggggtgttccggagtcactcgcctcaggtgaaggggccggagcagggctccccgcccttgacctggcaaaagcccagagggagcacggagtcctgggtgggaaactgcgacaacgcttaggattgcagctcttagaactccctccagaggaatccctcccgctgggccctctgctgggggacactgccgtgatccagggcgatactgccctgatcacaagaccttggtctcccgcccgacggccggaggtggacggcgttcgcaaggctctgcaggatctcgggctgcgaatcgtggagattggcgacgagaatgccactctcgatggtactgacgtgctgtttaccggtcgggaattttttgtaggactttctaagtggacaaatcataggggcgcggagattgtggccgatacatttagggatttcgcagtaagcactgtgccagtttcagggccttctcaccttagaggactgtgcggaatgggcggaccccggactgttgtggcaggctcgtcagacgccgcccagaaggcagtgcgagccatggcagtccttacagaccatccttatgccagcctgacactccccgacgatgccgcggcggattgtcttttccttagaccgggatag

SEQ ID NO: 114789 - DNA, 858 bp, Artificial Sequence
  derived and/or modified sequence
atgggcacccccggcgagggcctgggccggtgcagccacgccctgatcagaggagtcccagagagtctggcgtcaggagaaggagccggcgccggcctgccagccctggacctagctaaagctcagcgggagcacggagttctgggggggaaactgcgccagaggttgggactgcaactgctcgaactgcccccggaggagagtttgcctctgggtccattgttgggagatacggccgtgattcaaggagatactgcgctgataactcgcccctggtctccggctcgtcgtcccgaagtggatggtgttaggaaggctctgcaagatctaggcctgcggattgtggagatcggagacgaaaatgctactctggatggcacagacgtgctgttcactggtagagagttctttgtcggactgagtaaatggactaatcataggggggccgagatcgtagcagacacgttccgtgatttcgccgtgtcgacagtgcccgtgagcgggccctctcatctgcggggcctctgtgggatgggcgggcccaggaccgttgtagcagggagtagtgacgccgcccaaaaggctgtccgggcgatggctgtgctgacggatcacccatacgcttccctgacgctgcccgatgacgccgctgccgactgtctgtttctcaggcccggtttgccgggagtgccacccttccttctgcacaggggggggggcgacctgcctaacagccaggaagcgctacagaagctctcagatgttacactcgttcccgtcagctgttcggagcttgaaaaggcgggcgctgggttgagctcattatgcttagtgctgtcaactcggccgcacagctag

SEQ ID NO: 114790 - DNA, 681 bp, Artificial Sequence
  derived and/or modified sequence
atgggcacccccggcgagggcctgggccggtgcagccacgccctgatccgcggcgtccctgaaagtttagcctctggggagggcgccggggccggcttacccgcgcttgatctcgccaaggcccagagagagcacggcgttctagggggtaagttgcggcagagactgggccttcagctgcttgagctcccgccggaggaatctctccccctgggacctttacttggggacaccgcagttattcagggagacactgcacttattacacgtccgtggtcaccagcaagacgccctgaagttgacggagtccgtaaggccctgcaggacttgggactgcgaattgtggaaatcggcgatgagaatgcaactttagacggaaccgacgtcctttttactggccgggaattcttcgtgggcctgagcaaatggacaaaccacaggggtgccgaaatcgtggctgatacattccgcgatttcgcagtttccactgtgcccgtttctggacctagccatctccggggactgtgcgggatgggcggtccacgcacggtagtggccggctccagcgatgccgcgcagaaagctgttagagcgatggcagtgctaacagatcatccctatgcttcgctgacgctgccagatgatgcggctgccgattgtcttttcctacgacccggatag

SEQ ID NO: 114791 - DNA, 567 bp, Artificial Sequence
  derived and/or modified sequence
tgacggcggcccgaggtggacggcgtgcggaaggccctgcaggacctaggactgcgcattgttgagatcggtgatgaaaatgccactcttgacggcactgacgtcctgttcaccggcagggagttcttcgtgggactatcaaagtggacaaaccatcggggcgctgagatcgttgctgatacattcagggattttgccgtcagtaccgtgccggtgtcaggccctagccacctccgtggtctgtgcggcatggggggccctcgaaccgtcgtggccggctcatcagacgcggcccagaaagcagtcagaatgacccagcttttgaccgtaagtttttttgtattgggttgtctagtctgccccctgtcctcatgcactgtggaggtgggcatatgccccactgccaggcgtcattgtaggtcttccctgatgtccccatggtacctgtgtcctgcccagaactggcggagattggcgccaggatctgctcctagtgcttggtgtagcgcacacgcacccacagctgagggactggctctagggtattgctggcctggggtcggatag

SEQ ID NO: 114792 - DNA, 567 bp, Artificial Sequence
  derived and/or modified sequence
tgacggcggcccgaggtggacggcgtgcggaaggccctgcaggacctaggtttaaggatcgtagagataggcgacgagaacgccacactggatggcaccgatgtcctgttcaccggacgcgagttcttcgtagggttgagcaaatggactaatcatcgaggggctgagattgtagccgacactttcagagacttcgctgtgtctactgtccccgtcagcggcccatcccatttgcgagggctgtgcggcatgggcggaccaagaacagtggtcgctggctcttcagacgctgcacagaaggcagtaaggatgacacagttactaaccgtttcattcttcgtactcggctgcctggtgtgccctctgtctagttgcacagtcgaggttggaatctgtcccactgcccgccgccattgtcgctctagcctgatgtctccatggtacctgtgccctgctcaaaactggagacggctggccccaggatctgccccatcggcttggtgctcagctcacgctcccacggcagaaggcctggcactcgggtattgttggccaggggtgggatag

SEQ ID NO: 114793 - DNA, 681 bp, Artificial Sequence
  derived and/or modified sequence
atgggcacccccggcgagggcctgggccggtgcagccacgccctgatccggggtgtacctgaatctctggcaagtggagaaggagcaggtgccggattgcccgccctggatttggctaaagcccagcgggaacacggggtattgggggggaaactcagacaaaggctgggcctccagctcctggaactgccgcccgaggagtcactacctctgggacccttactgggcgacactgcagtgattcagggcgataccgcccttatcaccagaccctggtccccagccagaagaccagaagttgatggagtccgcaaggcactgcaggatctggggctcaggatcgtggagatcggtgacgagaatgccaccctggacggcacagatgtgcttttcaccggccgggagttcttcgtgggcctgagtaagtggacgaaccaccggggcgctgagatcgtagccgatacattcagagacttcgccgtgtctaccgtgcctgtgtccggcccatcccacctaagaggactgtgcggaatggggggcccacgcaccgttgttgctggttcgtcagacgcggcgcagaaggcagttcgggctatggccgttctcactgatcacccatatgccagcctcacgttgcccgatgacgcagcagcggactgtctgtttcttcggcccgggtag

SEQ ID NO: 114794 - DNA, 858 bp, Artificial Sequence
  derived and/or modified sequence
atgggcacccccggcgagggcctgggccggtgcagccacgccctgatcagaggcgtgccggagagtttggcctcaggcgagggagcaggcgccggcctgcctgctctggatctggccaaggcgcagcgagagcatggagtactgggcgggaagcttcgacagcgtcttgggttacagcttctcgaactgccccccgaggagtctctcccactgggtccgctgttaggcgatacggccgtaattcagggtgacacagcattgataacgcggccatggtcaccagccaggagacccgaggtggatggagttcgaaaggccttacaagatctcggactgcgtattgtggagatcggggatgagaacgcaaccttggacggcacagatgtgctcttcacgggtagagagttttttgtgggattgagcaaatggactaaccatcggggcgctgagattgtggcagacacatttagggattttgcagtgagcactgtccccgtgtcaggaccttcacatctgcgaggactgtgcggtatgggtggcccgcgaactgtggtggccggcagctcagacgccgcccagaaagccgtgagagctatggcagtcctgactgatcacccatacgcctcactgaccctccccgacgacgcggcagccgattgtcttttcttgcggccaggacttccgggcgtgcccccgtttttgctccaccgcggtggaggtgatttaccgaattcacaagaggccctgcagaagctgtccgacgtgaccctcgtgccagtgtcgtgttccgagctagaaaaagcgggagctggcctcagttccctgtgcctggtactgtctactcgtccacatagctag

SEQ ID NO: 114795 - DNA, 711 bp, Artificial Sequence
  derived and/or modified sequence
atgggcacccccggcgagggcctgggccggtgcagccacgccctgatacgcggtgtgccagagagtcttgcaagcggagagggggccggcgctggactgcctgccctggacctcgcgaaagcgcaacgcgagcatggagtcttagggggcaagctgcgccagaggctggggctgcaactcctcgagctgccacccgaggagtccctcccactcggcccattgctcggcgacaccgctgttatacagggggacacggcactgataactcgcccctggtcccctgctcgccggccagaagttgatggggtgagaaaggcactgcaagacctgggtctgcgtattgttgaaataggtgacgaaaatgccacattggatgggactgacgtgttgttcacaggcagggaattctttgtgggactttcgaaatggacaaatcatcgcggcgctgaaatagtggccgacacctttcgcgacttcgccgtgtccacggtcccagtttccggtccatcacatttgaggggactgtgcggaatggggggccccaggactgtggtggctgggagctctgatgctgcccagaaggccgtacgcgcgatggcagtgttaacagatcacccttacgcatccctcacgctcccagacgacgcagcagccgattgtctttttctccggcccggactgcccggcgtgccccctttcctgctgcactag

SEQ ID NO: 114796 - DNA, 711 bp, Artificial Sequence
  derived and/or modified sequence
atgggcacccccggcgagggcctgggccggtgcagccacgccctgatacgtggggtgcccgagagcttggccagcggagagggagcaggggctgggctcccagctctggacctcgctaaggcccagagggaacacggggttctgggaggcaaactgaggcagcgcctaggtctccagctgcttgaactcccaccagaagaatctctccccctcggtcccctgctgggcgataccgccgttattcagggcgatactgctctgataacgcgcccttggtctcccgcaagacgtccagaggttgatggagtgcggaaagccttgcaagacctgggcctgcggatagtcgaaataggcgatgaaaatgcgacgctggacggtactgacgtgctcttcacaggtagggaattcttcgtcggtctctctaagtggaccaatcatcggggggcagagattgtggccgatacgttccgggatttcgctgtttcaacagttccagtatccggtcctagccatctcagggggctctgtggtatggggggcccccgtacagttgtggctgggagttccgacgcagcacagaaggccgtcagggcgatggctgtgctaacagaccatccttatgcgagcctcactctgcctgatgacgcagcagccgattgcctgttcttgaggccaggtctccctggtgttccaccttttttattgcactag

SEQ ID NO: 114797 - DNA, 858 bp, Artificial Sequence
  derived and/or modified sequence
atgggcacccccggcgagggcctgggccggtgcagccacgccctgatacgaggggtgcctgaatctctcgcctccggggaaggggctggggctggattgcctgctcttgatctggcaaaggctcagcgcgagcacggggtgctcggtggaaagctgagacagcgattagggctgcaactgttggagctgccgccagaagagtcccttccactggggccactcctgggcgatactgcagtgattcagggggataccgccctaatcaccagaccatggtcccctgcgaggagaccagaggtcgatggcgttagaaaagcccttcaggatctgggcctccggatcgttgagattggcgacgagaacgcaacattagatggaaccgacgtgctatttactggtagggaatttttcgtgggtctcagcaagtggactaaccacagaggagccgaaatcgtcgccgatacttttagggattttgctgtgtccaccgtgcctgtgagtggaccctcccacctgcgtggactctgtggaatgggggggccgcgtaccgttgttgccggaagctcagatgccgctcagaaggccgtccgagccatggccgtgttaactgaccatccgtacgccagccttaccctgccagatgacgcagccgccgattgcttgttcctgcggcccggactacccggcgtccctcccttcctgctccaccgggggggaggggacctgcccaattcacaagaggccctgcaaaagctctctgatgtgacactcgtccccgtgtcatgcagcgaacttgagaaggctggagctggcctctcatcgctgtgcctcgtcctcagcacgcgccctcatagctag

SEQ ID NO: 114798 - DNA, 678 bp, Artificial Sequence
  derived and/or modified sequence
atgggcacccccggcgagggcctgggccggtgcagccacgccctgattcgtggagtcccagaatccctggcgtccggggaaggggcaggagcgggtttgcctgctttagacctcgccaaggcccagcgagaacacggagtactgggaggaaaactgcgacagagattaggcttgcagttgcttgagcttcctcctgaggaaagtctccccctggggcccttactcggggacaccgctgtcattcagggtgatactgctctgatcacaaggccttggtcacccgccaggcgccctgaggtggatggcgttcggaaagccctgcaggatctcggtctgcgcatcgtcgagattggagatgaaaacgcgactctggatgggaccgacgtgttgttcactgggcgtgagtttttcgttggactctccaagtggactaatcaccgcggcgcagagattgtcgctgatacctttcgggacttcgcagtgagcactgtccccgtatcaggaccgtctcacctgaggggattgtgtggtatgggcggtcctagaacagtggtcgctggctcaagcgacgctgcacagaaggccgttagggccatggctgttcttactgaccatccatatgccagcttgacattgcctgatgatgccgccgcagattgtttatttcttcgaccatag

SEQ ID NO: 114799 - DNA, 858 bp, Artificial Sequence
  derived and/or modified sequence
atgggcacccccggcgagggcctgggccggtgcagccacgccctgatacgaggagtcccggagtcgctggccagtggagaaggcgcgggagctgggcttccggccctggatctggcaaaggcgcagagagaacacggcgtgctggggggtaaactcaggcagaggcttggtctgcaactacttgagctccctccagaggaatcactgcctcttggaccacttttgggagacaccgctgtcatacagggcgacactgccctgattacgcgcccctggtccccagcccggcggcctgaggtggacggagtccgcaaggccctccaggatctaggattaaggatcgttgagattggggacgaaaatgcgacactggatgggaccgacgtcctgtttactggacgggagttttttgttggcttgtctaagtggacaaatcatcggggcgccgagatcgtcgctgacacctttagggacttcgcagtcagcacagtccctgtctctggtccttcacatctaaggggcttatgtggtatggggggccctcgcactgttgttgccggctcatcagatgccgcacagaaagcggtcagagccatggccgtcctaaccgatcacccttacgcttccttaaccctccccgatgacgcggcggccgactgtctgtttttgaggccaggacttccgggagtgccacccttccttttgcaccggggtggcggagatctgccgaattcccaggaagcactccagaagctttcagatgtaacgctggttcccgtaagctgctccgagttggaaaaagccggcgctggtctgagttcactgtgtcttgtcctgtcaactagaccacactcatag

SEQ ID NO: 114800 - DNA, 567 bp, Artificial Sequence
  derived and/or modified sequence
tgacggcggcccgaggtggacggcgtgcggaaggccctgcaggacttaggcctcaggatcgtcgagatcggggatgagaacgcaactctggacggaacagatgtgctcttcaccggccgagagtttttcgtaggactatcaaagtggacgaaccatcgaggggctgaaatcgtagccgacacgtttagggacttcgcggtctccaccgtacctgtatccggtccatcccatctgcgcggcttgtgcggaatgggggggcctcggactgtggtcgcaggatcgtccgatgcggctcagaaggccgtgcgtatgacacaactgctgacagtgtcattcttcgtactgggatgtctcgtctgtccactgagttcatgtacagtggaggtgggtatttgtccgaccgcacggcggcattgcagatcatcacttatgtctccctggtacctgtgtccggcccagaactggagaaggctggcacccggttctgctccttcggcttggtgctccgctcatgcccctactgcagagggtcttgccctgggttactgttggcccggagtcggatag

SEQ ID NO: 114801 - DNA, 567 bp, Artificial Sequence
  derived and/or modified sequence
tgacggcggcccgaggtggacggcgtgcggaaggccctgcaggacctcggcttgaggattgtggagatcggggatgagaacgcaactctcgatgggaccgacgtgttgtttaccggaagagaatttttcgtgggtctctccaaatggaccaaccacaggggcgctgaaatcgttgcggataccttcagagactttgccgtgtccactgtccccgtgtctggcccaagccacctcagagggctgtgcggcatgggcgggcccagaaccgttgtggccgggtctagtgacgccgcacagaaggccgtgcgtatgactcagctgctgactgtgtcattttttgtgctagggtgcctcgtttgccccttaagctcctgtaccgttgaagtgggaatctgtcctacagcgagaagacactgtagaagctcactgatgagcccttggtacctctgtccagctcagaattggaggaggctggctccaggctcagctccatccgcttggtgcagtgcccacgctcctaccgcagaaggactggctctgggatactgttggcccggtgtaggatag

SEQ ID NO: 114802 - DNA, 858 bp, Artificial Sequence
  derived and/or modified sequence
atgggcacccccggcgagggcctgggccggtgcagccacgccctgatccggggagttcccgagagtttagcttccggcgagggggccggggccgggctcccagctctagacctggccaaggcccagagagagcatggcgtgctggggggcaaactgcgacaacggctgggactacagttgctcgagcttcccccagaagagtccctgccgctcggtcctctgctaggggatacagccgttattcagggagacaccgccctcataacccgcccatggtctcccgcgcgtaggcctgaagtcgatggggtgagaaaagccctgcaagatcttggcctcagaatcgtagagattggtgacgagaacgccacacttgacgggactgatgtgctcttcactggccgggagttttttgtggggctttctaaatggaccaaccatagaggcgccgagatcgtcgctgacacttttcgtgactttgcagtctctaccgttccagtcagtgggccatctcacctacgcggactctgcggaatgggcggacctcgcaccgtcgtggctggttcaagcgacgccgcacaaaaagccgtgagagccatggcagtgctgacagaccatccgtacgccagtctgacgctgcccgatgatgcagccgcagactgcttattcttgcgccccggactacccggagtacctccattcttacttcaccgcggcggcggggatctgcccaattcccaggaggccctccagaaactgagtgatgttaccctggtgcccgttagctgtagtgaactcgagaaggccggcgccggtttgtcttcattgtgccttgttctgtccactcgtccccactcctag

SEQ ID NO: 114803 - DNA, 711 bp, Artificial Sequence
  derived and/or modified sequence
atgggcacccccggcgagggcctgggccggtgcagccacgccctgatcaggggcgtcccagagagcctggccagtggtgaaggagcgggtgccggcctgcccgccttggacctggccaaagcccagagggaacacggcgttcttggggggaaattgagacaacgcctcgggctccagctccttgagctccctcctgaggaaagcttgcccttaggtccactgcttggagacaccgcagtaattcagggagacaccgctcttattacacgtccctggtcccctgctaggcggcctgaggtggatggggtcaggaaggcgctgcaagacctagggctcagaatcgtcgagattggcgatgaaaacgctacactcgacggaacggacgtactgttcaccggccgagagttttttgtgggcctttccaaatggaccaaccaccgcggcgctgagatcgttgccgacacattcagagatttcgccgtgagtaccgtaccggttagtggcccaagtcatttgagaggtctgtgtggaatggggggacctcgaacagttgttgctgggtcaagcgacgccgcgcagaaagcagtgcgtgctatggccgtgctaactgatcatccttatgccagcctgaccctgccggatgatgctgcggccgactgcttgttccttcgtcccggactccctggtgtgcctcccttcttgttgcactag

SEQ ID NO: 114804 - DNA, 567 bp, Artificial Sequence
  derived and/or modified sequence
tgacggcggcccgaggtggacggcgtgcggaaggccctgcaggacctgggcctgagaattgtcgagattggggacgagaacgctaccctggatggcactgatgtgctctttaccggacgcgagttttttgtaggcctatccaagtggaccaaccacaggggagcagagatcgtggcagatactttccgtgacttcgccgtgtccacagtgcctgtatccggtccatcccatctcagaggtctgtgtgggatgggcggaccgcgcacagtggtggcaggcagttcagatgccgcccagaaagccgtacggatgacccagctgctgacagtcagtttttttgttcttgggtgtttggtgtgccctctgagctcctgtacggtcgaggtcgggatctgtcctacggctcgccgccactgccgctcctctctcatgagtccatggtacctctgtccagctcagaactggcgaagacttgcacccgggagcgcaccttccgcttggtgctcagcacacgccccaaccgccgaaggactggcactgggctactgctggccgggggttggctag

SEQ ID NO: 114805 - DNA, 858 bp, Artificial Sequence
  derived and/or modified sequence
atgggcacccccggcgagggcctgggccggtgcagccacgccctgattagaggagttcctgagtccctggccagtggtgagggagccggcgccggcctccccgcactggatctggcgaaggctcagagggagcacggcgtgctgggcggaaaattacggcagcgtctggggctgcagctgctcgagcttcccccagaagagtctctgccgttaggacctctgctgggagatactgcagtgattcagggagacacagcactcattacgagaccctggtcccccgctcgacggcctgaggttgacggagtcagaaaggcactccaggaccttggtttgagaatcgtagagattggagacgagaacgctacactggacggaactgatgtgctgttcaccggccgcgagttcttcgtgggactctctaaatggactaaccatagaggcgcagagattgttgctgacaccttcagggacttcgccgtgtccacagtgcctgtgagcgggccatcacatctgcgtggtctgtgcggaatgggtggacctcgcaccgtggtggccggatcgagtgacgccgcgcaaaaggccgtacgggcgatggctgtgctcaccgaccacccatacgcttctctaaccttgcccgatgacgctgctgccgattgtctgttccttaggccaggcctgcctggggtgcctcccttcttactgcacagggggggcggcgatctacccaatagccaggaagctctacaaaaattgagcgacgtaacgttggtacctgtttcttgctctgagctggagaaggcaggcgccggcctaagctccttatgtctagtattaagcaccagacctcattcatag

SEQ ID NO: 114806 - DNA, 858 bp, Artificial Sequence
  derived and/or modified sequence
atgggcacccccggcgagggcctgggccggtgcagccacgccctgatcaggggggtgcctgagtctttggccagcggagaaggagccggcgcgggtctgcccgccctcgatttagcaaaagcccagcgtgaacatggcgtgctcggcggcaaacttagacaacgactcggactccaacttctggagttacctcctgaggaatctctacctttaggtccgttgctgggcgacacagccgtgatccagggcgacaccgctcttatcacaagaccatggagccccgcaaggaggcctgaggtggacggcgttcggaaggctctgcaggacctcggactcaggattgtggaaatcggagacgaaaacgccaccctggacggcacggatgtgctgtttacggggagggagttcttcgtcggactgtctaaatggaccaaccatcgtggagcagagatagtggccgacacctttagggattttgctgtttccaccgtgccagtatccggaccgagtcacctcaggggtctctgtgggatgggcggaccacgcacagtcgttgccggttcttccgacgctgcacagaaggcggtgagagcaatggcagttctcaccgaccacccttacgcaagtctgacgctgccggacgacgccgctgctgattgtctatttctaagacccggtttgcctggcgttccaccatttttgttacatagaggaggtggtgatctgccgaatagccaggaagctctgcagaaactgtctgatgtgacgctagtgcccgtgtcctgctcagagcttgaaaaggctggagctggtctcagcagcttatgcctcgtcctgtccaccagaccacactcctag

SEQ ID NO: 114807 - DNA, 711 bp, Artificial Sequence
  derived and/or modified sequence
atgggcacccccggcgagggcctgggccggtgcagccacgccctgatacgtggcgtgccggagtctctcgcctccggggagggtgctggcgccggcctgccagccctcgatttggctaaagctcagcgagagcatggcgtgctcggcggcaaactccgccaacgcctggggctacagctgttggaattacccccagaggagagccttccactgggcccacttctgggcgacactgccgtgatccaaggggacaccgcccttattacgcgcccttggagtcccgcgcgccggccagaggtagacggcgtgagaaaggcactgcaagacctgggcctgcgtatcgtagaaataggtgacgaaaatgccacactcgacggcaccgacgtcctattcacgggtcgtgaattttttgtgggcttgtccaaatggaccaaccatcggggggctgagatcgtcgccgacacctttcgcgacttcgccgtgtctaccgtgccagtatcaggtccctcccacctgcgcggactgtgcggaatgggaggccctagaactgtggtggcaggaagttctgacgcagcccagaaagctgtgagggccatggccgtgttgaccgaccacccatacgcctctctgacattgcccgatgatgcagccgccgattgtcttttcctgaggccagggctccctggcgttccaccgttcttgctccattag

SEQ ID NO: 114808 - DNA, 711 bp, Artificial Sequence
  derived and/or modified sequence
atgggcacccccggcgagggcctgggccggtgcagccacgccctgatccgcggtgtgccagagagcctcgctagcggcgagggcgcaggagccggcctgcctgctctggatctggctaaagctcagcgagagcatggtgtactgggggggaagctgaggcagcgtctaggactgcagctgctagaactgccccctgaagaaagcctgccactaggaccattattgggcgacacggcagttattcagggcgataccgcccttatcacccgcccctggtcccccgctcggcgccccgaagtggacggcgtcagaaaggccctgcaggatctcggtctgaggatcgtggagatcggcgacgagaatgccaccttagatggtactgacgttttatttacaggccgggaattcttcgtgggcctgtcaaaatggaccaaccacagaggagcggaaatcgtagccgatacctttcgtgatttcgctgtgtccacggtgcccgttagcgggcccagccatctcaggggattgtgtgggatgggaggtccacggaccgtggtagccgggagctcggacgccgcccagaaggccgttcgcgccatggcagtccttaccgaccatccctacgcaagccttaccctgccagatgacgccgctgcggattgtttattccttagacccggtctgcctggcgtccccccatttctcctgcactag

SEQ ID NO: 114809 - DNA, 858 bp, Artificial Sequence
  derived and/or modified sequence
atgggcacaccaggggagggactgggacgatgttcacacgctctgataaggggagtgccagagagcttggctagcggcgaaggggcaggcgcaggtctgccagccctggatctcgcgaaggcacagagggaacacggagtcttgggtggcaagctgaggcagcggctggggctgcaattgttggagctgccacccgaggagtctctgcccctgggaccactgttgggcgataccgccgtgatccagggcgataccgcccttattactagaccctggtcgccggcaaggcgccctgaagtggatggggtccgcaaggccttgcaggacctgggactccgaatcgtggagattggcgatgagaatgccaccttggatggcacagacgtcctattcaccggaagagagttcttcgtggggctgtcaaaatggacaaatcatagaggcgctgagatcgtcgccgatacattccgggattttgcagtgtcaaccgtccctgtgtccggcccaagtcaccttagaggcttgtgcgggatggggggtcctcgaactgttgtggcaggatcctccgacgctgcacagaaggccgtcagggccatggcggtgctgacagaccatccttatgcctctctgaccctgcctgatgacgcggctgcagactgtctgtttctgcgacctggtctgccgggagttcctcccttcctactccatagaggaggcggagacctaccaaactctcaggaggccctgcagaagttgagcgatgtgactttggtgccagtttcctgttccgaactggaaaaggccggtgctgggctctctagtctctgcctggtgttgtctactagaccccatagctag

SEQ ID NO: 114810 - DNA, 858 bp, Artificial Sequence
  derived and/or modified sequence
atggggacaccaggggagggactcggtcggtgctcccacgccctgatcagaggcgtacctgaaagtctcgctagcggggagggggctggtgccggtctaccagccctggacctggccaaggcccagagggagcatggcgtactgggcggaaagctgcgccagcgtttaggcttacagctgctggaattaccacctgaagagagtcttcctctgggaccgctgctcggcgataccgctgtaatccagggagataccgccttgatcacccgcccatggagtcctgcccgtaggcccgaagtggacggcgtgaggaaagccctgcaggatctgggactccggattgtggaaattggagatgagaacgccaccctggacggcacggatgtactgttcacaggcagagagttctttgtgggcctgtcaaaatggacaaaccacaggggcgctgagatcgtcgccgataccttcagggactttgcagtgagcacggtgcccgtttccggcccatctcacttgagggggctgtgcggcatggggggtcctcgtacggtcgtggccggaagctcagacgccgctcagaaggccgtgagagccatggccgtgctgactgaccacccctacgcctccttgacgctcccggatgatgcagccgctgactgcctatttttacgtcctgggctccccggtgtccccccattcctcctgcacagggggggaggagacctgccaaattcccaggaggcattgcaaaagctgtcggatgtcaccctagtccctgtcagctgctcagagctggagaaggccggtgctggattatcctccctttgtctcgtgctgtcaacacgacctcactcctag

SEQ ID NO: 114811 - DNA, 858 bp, Artificial Sequence
  derived and/or modified sequence
atggggacgcctggggagggattaggcaggtgttcccatgctctcattaggggggtccctgagtcacttgcctccggcgagggtgcgggtgccggtctgcctgccctggatctcgctaaggcgcagagggaacacggtgtgctgggtggcaagctgcggcagagactaggcttgcaacttctggagctcccacctgaggagtccctgcctctcggccctctgcttggtgacactgctgtcatccagggcgacaccgcactcattacccgtccctggtctccagctcgtagaccggaggtggatggtgtgcgcaaagcactgcaggaccttggactgcgtattgtggagataggagacgagaacgcaacgctggacggcacggacgttcttttcaccggtcgggagtttttcgtcggtcttagcaagtggaccaatcaccggggagccgaaattgtggccgacacattccgggatttcgcagtgtcaacagtaccggtttccggtccttcccatcttcggggactgtgtggcatggggggacctcggacagtggtggctggctcctctgacgccgctcagaaagctgtacgtgcgatggccgtgctgacagatcatccatatgcttccttaaccctgcctgacgacgccgcagcagactgcctttttctgcgaccgggtcttccgggagtgccgccatttctactgcatagaggtggcggtgatttgcccaatagccaggaggcgctgcagaaactatccgatgtcaccctcgtgcccgtcagttgtagcgagttggaaaaggcaggagcgggtctgtctagcctttgtttagtgctgagcacacgcccacactcatag

SEQ ID NO: 114812 - DNA, 858 bp, Artificial Sequence
  derived and/or modified sequence
atgggaacccccggagagggactcgggaggtgcagccacgcccttattcgcggtgttcctgagtctctggcatctggtgagggagcgggagcagggcttcctgccctggatctcgccaaggctcagcgagagcacggggtgctaggtgggaaactcaggcagagactgggcctgcaactgttggaactccccccagaagaatctctgcctcttgggccattgctgggggataccgctgtgattcaaggtgacaccgccctgatcactaggccttggtctcctgccaggcggccagaggttgatggtgtgcggaaagctctgcaggatctggggctacggatcgttgaaataggtgacgagaacgcgaccctggacggcacagatgtcctctttacaggcagggaattcttcgtcggactgagcaaatggacaaaccataggggcgcagaaattgtggccgatactttcagggatttcgccgtaagtaccgttcctgtgtcagggccttctcatttgagaggactctgcggaatggggggacccagaactgttgtcgccggaagtagcgacgctgcacagaaagcagtgcgcgctatggctgtcctcaccgatcacccctatgccagtctgacactgcccgacgacgctgccgcagattgcctatttctgcggccaggcctccctggcgtgccaccctttctgctccataggggcggaggggatttgccgaacagtcaggaggcgcttcagaaactgagcgacgtgacactggttcctgtttcctgtagcgagctggagaaggccggagccggactttcctccctctgtttagtgctgtccacccggcctcactcatag

SEQ ID NO: 114813 - DNA, 858 bp, Artificial Sequence
  derived and/or modified sequence
atgggaacacctggcgaagggctgggacgctgtagccacgccttaatccgaggggtgcctgagtcccttgcttccggggagggtgcaggagccggtctgccggcattagatttggcaaaagctcagagggagcatggcgttctgggcggaaaactcaggcagcggctggggctccagctgcttgaactgccccctgaggagtctctgccattgggtcctctgctgggagatactgccgttattcagggcgataccgccctcatcacccggccatggtcacccgctcggagaccagaggttgacggtgtgcgcaaagcgctacaggatctcgggcttaggattgtcgagattggcgatgaaaatgccaccctggacgggaccgacgtgcttttcacgggccgtgagttctttgttgggctctccaagtggactaatcatagaggtgcagaaattgtagctgatacattccgcgacttcgcagtctctaccgtccccgtgtcaggccctagtcatctccgaggtttgtgcggaatgggaggtccgaggactgtcgttgcaggctcctctgacgcggctcaaaaggccgttagagctatggcagtgctcactgaccacccctacgcctctctgacactgccggatgatgccgctgccgattgtttgtttctcaggcctggcttgccaggggtgccacccttcttgctacatcgtggaggcggagacctgcccaactctcaagaagctttacagaaactctccgacgtcactctggttcccgtctcctgtagcgaactcgagaaagctggagcaggactgagcagcctgtgtttagtgctgagtactcgccctcacagctag

SEQ ID NO: 114814 - DNA, 858 bp, Artificial Sequence
  derived and/or modified sequence
atgggtactccaggggagggactggggagatgcagccacgccctgatacggggtgtacctgaaagcctggcaagtggggagggtgcaggggctggactcccggcactggatctggcgaaagctcaaagggaacacggggtgctcggtgggaagctgcggcagaggctaggcttgcaacttctggagcttccacctgaggagtcccttcccctaggccctctcctcggtgacactgccgtaattcagggggataccgccttgatcacgcgcccatggtcacccgctagacgcccagaagtagatggggtgcgaaaggccctgcaggatctgggtttgcgcatcgtagaaattggcgacgagaacgccaccctcgacggaaccgacgtcctcttcactggtcgggaattcttcgtgggactgtccaaatggacaaaccataggggcgcagagatcgtcgccgacactttccgggactttgctgtctcaacagtacccgtgagcggaccatcacacctcagggggctgtgcgggatggggggtcctagaacagtagttgccggtagtagcgacgcggctcagaaggccgtcagagccatggccgtcctgaccgatcatccctatgccagtctaactctgcccgatgatgctgcagccgactgtctgtttttacgacccggactgcctggcgtgccacctttcctactgcatcgcggtgggggagatctgccgaatagtcaggaggctctacaaaagctgtccgatgtgacactggtgccggtttcgtgtagcgagctggaaaaggccggtgccggtctgtcatctctgtgtctcgtcctgagcaccaggccacattcgtag

SEQ ID NO: 114815 - DNA, 858 bp, Artificial Sequence
  derived and/or modified sequence
atggggacccccggagaaggtctggggcgttgctctcacgcactgattcgaggagtgcccgagagcctggcatctggcgagggcgcaggagctggattaccggctctggatctggctaaggcccagcgggagcatggagttcttggaggcaaattacgccagcgcctgggcctgcagcttctcgagctgcccccagaagagtccttacctctgggtcctctgctgggcgatacagccgtgatccagggcgacaccgccctaatcacccggccttggtctcccgctcgccgtcctgaagttgacggagtgcggaaggctctgcaggacctggggctgcgcattgtggaaatcggggacgaaaatgcgacgctggacggcacagacgtgctgtttaccggcagagagttctttgtggggctgtctaagtggacaaatcaccgcggagccgagatcgtcgctgacacctttcgcgacttcgccgtttccactgtgcccgtgtcagggccttcgcacctccgcggactttgcgggatgggcggtcctcggacggtggtggccggttccagtgatgcagcccagaaggcagtgagagcaatggcagttctaactgatcacccctacgctagcctgacactaccggacgacgccgctgcagactgccttttcctccggcctggattgcctggcgtcccaccattcctactacatcgaggaggcggagacctgcctaactctcaggaggccctacaaaaactgagcgatgtgaccttggtccctgtgtcatgttccgagctcgaaaaagccggtgccggtctgtcaagcctatgcctagtgctcagtacccgcccacacagctag

SEQ ID NO: 114816 - DNA, 567 bp, Artificial Sequence
  derived and/or modified sequence
taacggagacccgaggtcgacggcgtaagaaaggccctgcaggatctgggactgcgaatagtagagatcggcgacgagaacgccacattggacggcaccgacgtgctgttcacaggtcgggaattttttgttggattatcaaagtggactaaccacaggggagccgaaatagttgccgacaccttcagagacttcgccgtgtccaccgttcccgttagcggacccagccacctaagaggactttgcggcatggggggaccaagaaccgtcgtggcaggctccagcgatgccgctcagaaagctgtgcgaatgacccagttgctgacagtcagtttctttgtacttggttgtttagtgtgtcccctgtcaagttgcaccgtggaagtcggaatttgtccgactgccagaaggcactgccggagtagcctgatgtctccatggtatttgtgtcccgctcaaaattggagacgtctggcaccagggtcggcaccgtcagcctggtgtagtgcccacgcccctaccgccgagggcctggcactgggatattgctggcctggagtggggtag

SEQ ID NO: 114817 - DNA, 567 bp, Artificial Sequence
  derived and/or modified sequence
tgaaggaggcccgaggtagacggggtgcggaaagccttacaggatctggggctgcgcatcgtcgaaataggcgatgagaacgctactctggacggcaccgatgttttgttcactggcagggaatttttcgtgggactgtccaagtggacaaaccaccggggtgcagagatagtggccgacaccttccgcgacttcgccgtctctaccgtacccgtcagcggcccatctcacctgcgcggactgtgcggaatgggtggacccaggaccgtagtggccggaagctccgacgccgcacagaaggcggtaagaatgacacagctactcaccgtgagcttcttcgtcctcggctgccttgtgtgtcccttatcgagctgcactgtggaagtcgggatctgcccaactgcacgcagacattgtcgaagttccctgatgtcgccatggtatctttgccccgcacaaaattggcggcgtctggccccaggaagcgcgcctagtgcctggtgttcagcccacgctccaacagcggaaggcctggcccttggctattgctggccgggtgttggttag

SEQ ID NO: 114818 - DNA, 858 bp, Artificial Sequence
  derived and/or modified sequence
atgggaacccccggtgaggggctcggcagatgctcacatgctctgatcagaggcgtccccgaatccttggcatcaggagaaggcgctggcgctggccttcctgcattggacttagctaaggcccagagggaacacggcgtccttggaggcaagcttaggcagaggctgggactgcagttgctggagctgcccccagaggaaagtctgccactcggcccactactgggcgatactgcggtgatccaaggggacaccgcgttgatcacaaggccctggtctcccgctcgcaggcctgaggtagacggcgttcgcaaggccctgcaggatctgggtttacgcatcgtggagattggggatgaaaatgccaccctggacggaacagacgtcctgttcacaggccgtgaattctttgtgggactgagcaaatggacaaatcaccgcggagctgaaatcgtagccgatactttcagggactttgcggtgtcaaccgtgcctgttagcggaccatctcacctgagaggcttatgcggtatgggtggacccagaaccgtggtggctggctcaagcgatgccgcacagaaggctgttcgagctatggctgtcctgacagatcacccctatgcttcactgacgctccctgatgacgcagctgcagattgcctgttcctcaggccaggcctgcctggggtccccccattcttgttacatcggggagggggagacctcccaaattcacaggaagcactccagaaactcagcgatgtgacacttgtgcctgtgtcctgctcagagctggagaaggcaggagcgggactgtcctcattgtgcctggtgctttcaacccgccctcattcatag

SEQ ID NO: 114819 - DNA, 858 bp, Artificial Sequence
  derived and/or modified sequence
atggggacacctggggagggactgggaagatgctcccacgccctgatcaggggggttcccgaatcacttgctagcggagagggagctggcgctggcctgcccgcactcgatctcgctaaggctcagcgtgagcacggggtcttgggaggtaaactgcggcaacgcttgggtttgcagcttttagagctccctcccgaggaatctctgccgctgggaccgcttttaggggatacagctgttattcagggagatacagctctcattactagaccttggtcgcctgctagacgcccagaagttgacggagtccgcaaggcgctacaggacctgggcctgaggattgtcgagattggagatgagaacgctacactcgacggaactgatgtgttgttcactggacgtgagttctttgtcggactgagtaagtggaccaatcaccgtggtgctgagatagtcgcagacacatttcgggatttcgcagtgagtaccgtgcctgtctccggcccttcccatcttagagggctttgcggcatggggggtccccgaactgtcgtggccggatctagtgatgctgcacaaaaagctgtgcgcgctatggctgtgctgaccgaccatccatacgcttcactgactctccctgatgatgccgctgccgattgtctctttctccggcctggactgcccggtgttcccccttttttgctgcacagggggggaggagatttaccaaacagccaggaggccctgcagaaactctccgacgtcacactggtacccgttagctgctctgagctagagaaggccggtgcaggcctctctagcctgtgtctggtgctgagcacaagaccacattcatag

SEQ ID NO: 114820 - DNA, 858 bp, Artificial Sequence
  derived and/or modified sequence
atggggaccccaggcgaggggctgggtcgctgtagtcacgcattaattcgcggtgtgcctgaatctctcgccagtggagaaggggcaggcgctggactgccagcgctggaccttgctaaggcacagagagaacacggtgtactgggcggtaaactccgtcaaagactggggctacaactgctggaattgccccctgaggaatctctgccactggggcctctcctgggtgacaccgccgtgatccaaggagatactgccctgatcacacgcccttggagccccgctagacgcccagaggtagacggcgtgcggaaagccctacaggaccttggcttaaggattgttgaaatcggcgacgagaacgcgacactggatgggaccgatgtattatttacgggccgagaattcttcgttggtctctcaaagtggacgaatcataggggggctgaaattgtcgctgacacattcagagacttcgccgtctcaacagtcccggtgagcgggcctagccatcttcggggtctatgtggcatgggcggacctcggaccgttgtggccggatcttccgacgcagcacagaaggccgttcgggcaatggcggtgctaaccgaccacccatatgctagcctaaccttgcctgatgatgccgctgcagactgcctatttctgcgccctggactcccaggagtgccgccatttttgcttcaccgtgggggaggtgacttgccaaattctcaggaggccctgcagaaactctccgacgtgaccctggtgcctgtgtcctgtagtgagctggagaaagcaggagcaggtctttcttccctttgtcttgtcctttctacccggcctcactcatag

SEQ ID NO: 114821 - DNA, 711 bp, Artificial Sequence
  derived and/or modified sequence
atgggaactcccggagaaggcttgggcaggtgcagccacgcgcttatcaggggagtgcccgagagtcttgcctctggtgagggtgcaggagctggcctcccagctctcgatttggccaaagcccagagagagcacggtgtccttggagggaagctcaggcagcgtctcggtctccagctgttagaattgccaccagaggagagcctccctctcggtccactccttggcgacaccgccgttatccaaggagatacagctttgattacacgtccatggtcgcccgcacgcaggcctgaagtcgacggagttcgaaaggctctacaggatcttgggttaaggattgtagaaatcggcgatgagaatgccactctcgacggcacagatgtgctttttactggccgtgagtttttcgtggggctgagcaagtggaccaatcacagaggcgcagaaatcgtggcagatacctttcgggattttgcagtgtcaacagtgccagtgtccggtcccagccacctgcgcggtttatgtggaatgggagggcctcggacggtggttgcgggaagttcggatgcggctcagaaagcggtccgcgcaatggcagtgctgaccgaccacccttacgcctctctcactctacccgatgacgcagctgccgattgtctgttcctgagacccggactgcccggtgtgcccccattcttgctgcactag

SEQ ID NO: 114822 - DNA, 681 bp, Artificial Sequence
  derived and/or modified sequence
atgggtactccgggagaaggcttgggcaggtgctcgcatgcactgatccggggagtgcccgaatcgcttgcatcaggcgagggagcaggggcaggactccccgcactggatttagcaaaggcccaacgagagcatggagtcttgggtggcaagcttagacagaggctgggcctccagctgctggagctgcctccggaagagtcattaccacttggtccactactgggtgatacagctgtgattcaaggagacactgccctgatcacaaggccttggtcacccgctcggcgtcctgaagttgatggagtgcgaaaagcattacaggacctgggcctccgcattgtggaaataggagatgagaatgcaacattggacgggacggatgtgctgtttactggcagagaattctttgtcggcctatccaaatggactaatcataggggcgctgagattgtagcagacactttccgcgacttcgccgtcagcaccgtgcctgtttccgggccaagccaccttaggggcctctgcgggatgggtggacctcgcaccgtggtggcagggtcttcagatgccgcacagaaagcggtcagagccatggccgtcctgacagaccacccctacgcctcactgacattgcccgatgatgccgcagctgattgcctgttcctccgtcctggttag

SEQ ID NO: 114823 - DNA, 711 bp, Artificial Sequence
  derived and/or modified sequence
atgggcaccccaggtgagggattagggagatgttcccatgcactgatccgcggagtgcccgaatccctcgctagtggcgagggggcaggggctgggctcccagccctcgacctggctaaagcccaaagggagcatggcgtcttgggcggaaaactgcggcaacgtctggggttgcagctcctggagcttccaccggaagagagcctgcccctcggaccattgctgggagataccgccgtgatacagggggacactgcgctaattacccgcccatggtcacctgctcggagacctgaagtagacggtgtcagaaaggctctccaggatttaggactcaggatcgtcgagataggcgatgaaaacgcaacccttgatggtacagacgtactgttcactggccgagaattcttcgtcgggctctctaagtggaccaatcaccgtggagctgagattgtagctgacacgttcagggattttgcagttagcaccgttcctgtcagtggtccttctcatttacggggattgtgcggcatgggcggaccaagaaccgtcgtcgccggtagcagcgatgccgcacaaaaagcagttagggctatggccgtactgacagatcacccttatgctagccttactctgccagacgacgccgctgctgattgcctgttcttaaggccaggattacctggagtacccccttttctgctccactag

SEQ ID NO: 114824 - DNA, 858 bp, Artificial Sequence
  derived and/or modified sequence
atgggtacaccaggcgagggacttggcaggtgcagccatgccttgatccggggtgtgccagaaagcctggctagcggagaaggagccggagccggactcccagccttggatcttgccaaggcgcagcgcgagcacggggtgctgggaggcaagttgcgacagcggctggggctgcagctgcttgaattgcccccagaggagtccctgcccctgggtccactgctaggcgacacagcagtcatacagggtgacaccgctctgattacacgcccttggagccctgcaagacgacctgaggtggatggagttcgaaaagcactgcaggacctgggactgcgtatcgtcgagattggtgatgaaaacgctaccttggatgggacagacgtgttatttaccggccgagaattttttgtggggctgtcaaagtggacaaaccatcggggtgcagagattgttgctgacaccttccgcgacttcgccgtatctaccgtccctgtatcaggtcctagtcacctcagaggcctgtgcggtatgggtggccctcggaccgtcgtggctggatcgtcagatgcagcccagaaagccgtgcgtgcaatggctgtcttaacagaccatccgtatgcctcattgaccctgccggacgatgctgccgcagattgcctcttccttcggccaggccttcccggtgtcccccctttcctgctgcatcgagggggtggcgatctccccaattcgcaggaggctttgcagaaattaagtgacgtaaccctggtgccagtgagctgcagtgagcttgaaaaggcaggagcaggtctgtcttctctctgtttggtccttagtacacgtcctcacagctag

SEQ ID NO: 114825 - DNA, 858 bp, Artificial Sequence
  derived and/or modified sequence
atgggtactcctggcgaaggactcggacggtgctctcacgccctgatccgcggtgtcccagaaagtctagcatcaggagaaggggcaggagcgggattacccgcacttgacctagccaaggcccaaagagagcatggcgtgctggggggaaagctgagacagcgactaggccttcagctcctcgagcttcctcctgaagagagtttgcccctgggacctcttctgggagacacagccgtgatccaaggtgacacagccctgattacccgcccatggtcgccagccagacgccctgaggttgacggggtaagaaaggccctgcaggacctcggtctgcgtatcgtcgagattggggacgagaacgctactctcgatgggactgatgttctctttactggcagagaattcttcgtgggtcttagtaaatggacaaatcatagaggggcagagatcgtggctgatacttttagggacttcgctgtcagcacagtgcctgtgtcaggaccctctcacctgcggggtttgtgtggcatgggcggtcctcgaactgtagtggccggatcgtctgatgctgctcagaaagcagttcgagccatggccgtgctcacggaccacccatacgccagcctgacacttccggatgatgcggctgccgattgcctgtttctgagacctggccttcccggtgtgcctccctttctcctccacaggggaggtggcgatcttccgaattcccaggaggcactccagaagctgagcgacgtgacactggtcccagtgagttgctctgaactcgaaaaagccggagccggattatccagcttgtgcctggtcttgagcactagaccccactcctag

SEQ ID NO: 114826 - DNA, 858 bp, Artificial Sequence
  derived and/or modified sequence
atggggacaccgggtgaaggtctgggaagatgtagccacgctctgattcgcggtgtgcccgaaagcctggcctcaggagagggcgcaggggctggcttgccagcactggatttagccaaggcgcaaagagaacacggggttttagggggtaaactgcgacagagactgggcctccaactactggagctccccccagaggagtctttgccactggggcctttgctcggcgacacagcggtgatccagggagacaccgcactgatcacccggccttggtcccctgccaggagacccgaagtggacggcgtgagaaaagcactgcaagacctcggactccgaatcgttgaaatcggcgacgaaaacgccacactcgatggcactgatgtactgttcactggtcgagagttctttgtgggattgagtaaatggaccaatcacagaggcgcagaaattgtcgctgatactttccgggattttgccgttagcacagttcccgtctcaggcccttcccacctccgcggactgtgtgggatggggggacccaggacagtggtcgccggaagtagcgacgcagcccagaaggccgttagagccatggccgtcctgacagatcacccttacgccagtctaactttgccggatgatgccgctgccgactgtctgtttctgcgacccggactgcctggtgtccctccattcctactccatcgagggggaggtgatcttccgaattcccaggaggcacttcaaaagctgagtgatgtaaccttggtgccagtgtcctgctccgagcttgagaaagcaggggcaggtctgagttcgctgtgcctcgtgctgtctacgaggccccactcttag

SEQ ID NO: 114827 - DNA, 681 bp, Artificial Sequence
  derived and/or modified sequence
atggggactcccggagaagggctgggacgatgcagtcacgcgctcataaggggggtgcctgagtcacttgcctcgggagagggtgccggagccggtctccccgcactcgacctcgcaaaagcacaacgcgagcacggagtgctgggaggaaaactgaggcagcggctaggtctccagctgctagagctgcccccagaagaaagtctaccgttagggccattactaggcgacactgccgtcatccaaggggatactgcccttattactcggccatggtcacctgcccgtcgcccagaggtcgatggcgtgcgcaaggcactgcaggacctgggcttgaggatagtagagatcggggacgagaacgccaccttagatggcacagatgtgctgttcactggtagagaattctttgtggggctgtccaagtggactaaccaccgcggagcagaaatcgtagctgacacctttagggattttgcagtatccactgtgccagtatcgggtcccagccacctccggggtttgtgtggcatggggggacctcgcactgtagtagccggttccagcgatgccgctcagaaagctgtgcgcgctatggcagttctgaccgaccacccctatgctagccttactctccctgatgacgcagcagctgattgtctcttcctgcggccaggttag

SEQ ID NO: 114828 - DNA, 858 bp, Artificial Sequence
  derived and/or modified sequence
atgggcacacctggcgaaggcctgggcaggtgcagtcacgccttgatccgcggtgtaccagagtcgctggcttctggcgagggcgctggtgccggacttccagctctcgacttagcgaaagcccagagggagcacggggtcctgggcggtaaattgcgccagaggctagggcttcagttgctggagctgcctccagaggagagcttgccgctgggccctctgctgggggacaccgcagtcatacagggcgataccgccctgataaccaggccttggtccccagccagacgacccgaagtagacggagtgaggaaagctcttcaagacctgggacttagaattgtagagattggcgatgagaacgccactttggatggaacggacgtcctatttactggcagagaatttttcgtggggctcagcaaatggaccaaccatcgaggagccgagatcgtagcagatactttcagggacttcgccgtgtcaacagtgccagttagcgggccttcccatctgagaggcctctgcggaatgggtggcccaagaacggtggtggcaggaagttctgatgccgctcaaaaagcagtgcgagcaatggccgtgctgacagaccatccctacgcatccctgactttgcccgacgatgctgccgcagactgcctttttcttcggccaggcctccccggagtgcctccctttttgctgcataggggcggtggcgaccttccaaacagccaggaagctctccagaaactgtccgacgtcaccctggtgccagtgtcttgtagcgagttagagaaggccggagcaggactcagctccctgtgtctcgtgttaagtactcgaccgcattcatag

SEQ ID NO: 114829 - DNA, 681 bp, Artificial Sequence
  derived and/or modified sequence
atgggaacgcccggagaaggtctcggcaggtgttcacacgcactgatccggggtgtgccggagtctttggcctccggcgagggcgcaggtgctgggctgcctgccttggacctggccaaagcacagcgggagcacggtgtcctgggcggaaagcttagacaacggttaggactgcagctgctagaactgccaccggaggaaagtttgccattgggtcctctgcttggcgacacggccgttattcagggggacacagcactcattacgagaccatggtctcctgctcgacgccctgaagtcgacggggttcggaaagcccttcaagacctcgggcttaggatcgtggagattggagacgaaaacgctaccttggatggcacagacgtgctcttcaccggccgtgaatttttcgtaggtctgagcaaatggactaaccaccgcggagccgagatcgtggccgacacttttagagactttgccgtgtcaactgttcctgtgtccgggccttctcatctgagaggactttgcggcatgggaggccctcggacagtcgtggccggatcctccgatgccgctcagaaagcagtacgcgcaatggcagtgctgactgaccatccatacgcttccctcacattacccgacgatgccgcagccgattgtctgttcttgcgacccggatag

SEQ ID NO: 114830 - DNA, 681 bp, Artificial Sequence
  derived and/or modified sequence
atgggtacgcccggagagggcctgggtagatgtagtcacgctcttatcaggggcgtgccagaatccctcgcatctggagaaggggctggagccggactgcctgccttagacctcgctaaagcacagagagaacacggggtgcttggagggaagcttagacagcgcctgggactgcagcttcttgaactccccccagaagaatccctcccgctaggccctctcctgggcgatactgctgttatccagggagacacggctctgatcacacggccatggtcccccgcaagaagaccggaagtggatggagtgcgtaaggccctgcaggaccttggcctgcggatcgtggagattggcgatgagaatgccactctggacggaaccgacgtgctctttacaggacgcgagtttttcgtgggcctgagcaagtggacaaaccaccgcggtgctgaaatcgtggcggatactttcagagatttcgccgtatctacagtccctgtgtctggtccttcccatcttcgcggactgtgtggcatgggaggcccaaggactgtcgtcgcaggctcgtctgacgctgcacagaaggcggttcgcgctatggcagtgcttaccgaccacccttatgcttccctgacactgccagacgacgccgctgcagactgtttgttcctgagaccaggatag

SEQ ID NO: 114831 - DNA, 858 bp, Artificial Sequence
  derived and/or modified sequence
atgggcaccccgggtgaaggcctaggcagatgttcccatgctctaataagaggagtcccagaatccttggcgagcggcgagggagctggagctgggctcccagctctggatttggctaaagcgcagcgggagcacggcgtcctggggggaaagctgcgccagagattggggctgcaactactcgagttgcctcctgaggaatcactgcctttaggcccactcctgggggacaccgcagtaatccagggcgacactgccctgattacccggccatggtcaccagccagacgcccagaagtggacggggttcggaaggcccttcaggacctgggactccggatagtggaaatcggcgacgagaatgctaccttggacggcactgatgtgctgttcactggtagagaattctttgtgggcctgagcaaatggaccaaccaccgcggagccgagattgtggccgacacatttagggacttcgccgtctcgaccgtgccagtgtccgggccttcccacttgcggggactctgtgggatgggaggccctagaaccgtggtggcaggctctagcgacgccgctcagaaagctgtgcgggcaatggccgtgcttaccgaccacccttacgctagtctgactctcccagatgacgcagcagccgactgtctgtttctgcggccaggcttacctggggtgcccccttttctgctgcaccggggtggcggagatctgccaaactctcaggaagccttgcagaagttatccgacgtaacactggtgcctgtgtcctgcagcgagttagagaaagccggagcagggctgtcctccctttgtcttgtcttatcgacgcgaccacactcatag

SEQ ID NO: 114832 - DNA, 681 bp, Artificial Sequence
  derived and/or modified sequence
atgggtaccccgggagaaggcctggggcgttgttcccatgcgctgattcgtggagtgcctgagtccctggcatccggtgagggtgcgggtgctggtctccctgctttagatctggccaaagcgcagcgggaacatggggtgctcggcggaaagctccgacagagacttgggctgcaattgttggagctgcctccggaggagtcactccccctaggtcctctgctgggcgacacagctgtgatccagggcgacaccgctttgattaccagaccctggagccccgcaagacggccagaagtcgacggcgtacgaaaggcactgcaagatctcggcctccgcattgtggagatcggagacgagaacgctactcttgacggaacggatgtgctgtttactggacgcgagttttttgttgggctcagcaagtggactaatcaccgaggagctgagatcgtcgctgacacatttcgggatttcgcggttagcacagtgcctgtgagcgggccatcacacctaaggggcctctgtgggatggggggtcctagaactgtggtcgcgggttcatctgatgccgcacagaaagctgtgcgcgctatggctgtcctcaccgatcacccttatgcgtcacttactctgccagatgacgcggcagcggattgcctgttccttagaccgggatag

SEQ ID NO: 114833 - DNA, 567 bp, Artificial Sequence
  derived and/or modified sequence
tagcgtaggcctgaagtggacggagtcagaaaggcccttcaggacctggggctcaggattgtggagattggcgatgagaacgctacgctagacggcactgacgtcctattcaccgggagggaatttttcgtggggctctcaaagtggacgaatcataggggtgccgagatcgtggccgatacttttcgcgatttcgccgtgtccaccgtgccagtgagcggaccctcccacctcagagggctgtgtggcatgggcggacctaggactgtagtggctggctcttccgacgctgcacagaaagctgtcaggatgactcagctccttacagtgtcctttttcgtgctgggatgtctggtctgtccactgtcctcttgtacggtggaagtggggatttgcccaactgccaggagacactgcaggtcatcattgatgagcccatggtacctgtgtccagcccagaactggcgacgcctggcaccaggctccgctccgagtgcttggtgtagcgctcacgcgcctacagcggagggtctggcgctcggctactgttggccaggcgttggttag

SEQ ID NO: 114834 - DNA, 567 bp, Artificial Sequence
  derived and/or modified sequence
tagagaaggcctgaggtggatggagttcgcaaggctttacaggatctgggcttgcgaatagttgagatcggcgacgagaacgccacgctggacgggacggatgttctgtttacagggcgagagttttttgtgggattgagtaagtggactaatcaccgcggtgctgagattgtagcggacacctttcgggattttgcagtgtctaccgtgccagtgagcggaccaagtcatctcaggggcctatgtggcatggggggtccgagaaccgtggtggctggctcgtcagacgctgcccagaaagccgtgcgaatgactcagctgctaaccgtgagcttcttcgtcctgggttgtctagtatgccctctaagctcttgcacagtagaggtgggcatttgccctaccgccaggcgccattgcagatcaagcctgatgagcccttggtacttgtgccccgctcagaattggagacgactagcgccaggatcggcgccttccgcgtggtgctccgctcacgcccctacagctgaaggactggccctaggctactgttggcccggagtgggttag

SEQ ID NO: 114835 - DNA, 681 bp, Artificial Sequence
  derived and/or modified sequence
atggggacacccggagaaggcctcggtcggtgtagccatgcgctcatcagaggagtccctgagagcttggcatctggggagggagcgggagctggactgcctgcactggatcttgctaaggcccagagggagcacggggtcctgggcggaaaactgcgccagcgcttgggcctccagttgttggaattaccacctgaggaatccctgccccttggcccactgctgggcgatacagctgttattcagggagacactgcactgattacacgaccctggtcccctgcgcgacgcccagaagtggatggcgtgcgaaaggccctgcaggatctggggcttaggatcgttgaaatcggtgatgagaatgctactctggatggcacagacgtgcttttcaccggcagagagttttttgtcgggctttctaagtggacgaaccataggggcgcagagatcgttgcggataccttcagagattttgctgtatcaacggtccctgtaagtggaccttcccatctgaggggactgtgtgggatgggcggacctagaactgtagtggccggatcaagcgatgctgcccaaaaggctgtgcgggctatggctgtgttgaccgaccacccttatgctagcctgacccttcccgatgacgctgccgcagattgtttgttcctgagacctggatag

SEQ ID NO: 114836 - DNA, 858 bp, Artificial Sequence
  derived and/or modified sequence
atgggcacccctggggaaggcttgggtcggtgcagtcacgccctgatccgaggggtacctgaatccctagcatcaggagagggcgcaggtgcaggcctccctgcactggacctagccaaagctcagcgcgagcacggcgtgttgggagggaaacttcgccaaagacttggacttcaacttctagagctacctcccgaggagtctctgcctctggggccactcctaggggacaccgctgtaatacaaggtgataccgcgctgataactaggccctggagtcctgcaagaagaccagaggtggatggcgtccggaaggctctgcaggatctaggcctgcgcattgtcgagattggcgacgagaatgccacactcgacgggacggacgtgttatttaccggaagagaatttttcgtgggactgagcaaatggactaaccatcgcggagcagagatcgttgcagacaccttcagagatttcgctgtctctacggtacccgtgtcaggcccttcacacctgcggggactttgtggcatggggggtccacgaaccgtagtcgctggtagtagtgacgccgctcaaaaggctgtcagggccatggccgtgctgactgaccacccatacgcttcactaacactccccgatgatgccgctgcagactgcctctttttgcgaccgggactcccgggagtgcccccattcttgctgcatcgcggaggcggtgatctacctaattcccaggaagctttacagaagttgtctgatgtgaccctagtgccagtgagctgcagcgagttagagaaggccggagccggactctcatctctatgtctcgtactaagcaccaggccacactcctag

SEQ ID NO: 114837 - DNA, 711 bp, Artificial Sequence
  derived and/or modified sequence
atggggacccccggtgagggcctaggaagatgttctcacgccctcataagaggggtgcctgaatcattggcttctggcgaaggcgctggggctggcttgccagccttggacctggcaaaagcacaacgggagcacggcgtcctcggaggaaagctgcgtcagagactcgggctccaactgttagaactacctcccgaagaaagtttgccactaggacccctcttaggcgatactgccgttattcagggagacacggctcttatcacaagaccctggagtccagctcgcagaccagaagtggatggagtcagaaaagctctccaggaccttggcctgcgcatcgtggaaatcggcgacgagaatgctactttagacgggacggacgtattgtttacagggagagagttcttcgtggggttatctaaatggacaaaccacaggggtgccgagatcgtcgcagacacattccgggatttcgccgtgtcaacagtaccggtaagtggtccttcacaccttcgaggcttgtgcgggatgggtgggccaagaactgtcgttgcgggatcttcggacgcggcacagaaggcggtccgcgcaatggctgtactgacagaccacccatacgcaagcctgactctccccgatgacgcggctgctgactgccttttcctgcgcccaggattgcctggagtcccaccatttctcttgcattag

SEQ ID NO: 114838 - DNA, 711 bp, Artificial Sequence
  derived and/or modified sequence
atgggcactcccggagagggtctggggaggtgttcccacgctctgatccggggtgtgcctgagagcctggcatcaggcgagggagcaggagctggactgcctgccttggacctggcaaaagctcagcgagagcacggagttctcgggggaaagttaaggcaacgactaggcctccagctcctcgagctcccacccgaagaatcactgccactggggccattgttgggcgacacagctgtgattcagggcgatactgctctgattactcgaccctggagtcccgcacgacggccagaggtagatggagtccgtaaggcactgcaggatctcggtttgcggattgtggagattggcgatgaaaacgctacactggacgggacagatgttctgtttacagggcgagagttcttcgtcggcctttcaaagtggacgaatcatcggggagccgaaatagtcgctgacacctttcgcgactttgctgtctctaccgtcccagtaagcggtccaagtcacctgcgcggtttgtgtgggatgggtggacctagaaccgtggtcgctggcagctccgacgccgctcagaaggccgtcagggccatggctgtgctgacagaccacccatacgcaagtctcacactgccagacgacgcagccgctgactgtctgttcctgcgcccagggttgcctggagtgcctccatttctgttgcactag

SEQ ID NO: 114839 - DNA, 858 bp, Artificial Sequence
  derived and/or modified sequence
atgggcaccccaggagagggactcgggagatgctctcatgccctaatacgcggagtgccagagtctctggctagcggagagggagccggtgccggtctgccagccctggacctggctaaggctcagcgagaacacggggtgctggggggaaagctgcgccagcggctgggtctacaactgctggagctgcccccagaagaaagcttgcccctcgggcctctcctgggagataccgccgtcatccagggtgacaccgccttaattacgcggccatggagccccgcaagacggccagaggtagatggcgtccgtaaggcattacaggacttggggctccgtattgttgagatcggcgatgagaacgccacactagatgggacagatgttctgttcactgggagagaattcttcgtcggcctgagtaaatggaccaaccacaggggcgctgagatagttgcagacacctttcgggattttgctgtatctactgttccagtctctggtccatcacacttgcgcggattgtgcgggatgggtggccctaggaccgtagtggccggaagcagtgatgccgcacaaaaagctgttcgagcgatggcagtcctgacagaccatccatacgcgagtctgaccctccccgacgatgccgctgctgattgtctctttttgcgccctgggctgcctggagtgccccctttcctcttacaccgcggagggggtgacctgccaaactcgcaagaagcacttcaaaaactgagcgacgtcacacttgtgcccgttagctgctccgagctcgaaaaagcaggagccggtctcagctcgctgtgtctggtgctcagcacccgcccacactcttag

SEQ ID NO: 114840 - DNA, 678 bp, Artificial Sequence
  derived and/or modified sequence
atgggcacaccgggtgagggattaggtcggtgttcccacgccctaattagaggcgtacctgagtctctcgctagcggtgagggagcaggggcaggcctgcctgccctggacttagccaaggcccagcgtgagcatggcgttctgggcggaaaactccgccagagactgggcctgcaactattggaattaccacctgaagagtcccttcccctgggccctctgctgggggatacggccgtgatccagggcgacacggcactaatcactcggccatggagcccagcacgcaggccagaagtggacggtgtccgtaaggctctgcaggatctggggttacggattgtagagataggagacgaaaacgcaacacttgacggaacagacgtcctgtttactggacgcgaattttttgtaggattgagcaaatggactaaccaccgcggagctgaaatcgtggccgacacgtttagggattttgctgtttctactgttccagtgagtggcccttcacacttaaggggtttgtgtggaatggggggtccacggacagtggtagccggttctagtgacgcggctcaaaaggctgtgcgcgctatggcagtgttgacagaccacccatacgcttctctgacactccccgacgacgcagcagctgattgcctgtttctgagaccctag

SEQ ID NO: 114841 - DNA, 858 bp, Artificial Sequence
  derived and/or modified sequence
atggggacgccaggtgagggcctcggcagatgtagccatgcgctgattcggggtgtcccagagtcacttgccagtggggagggcgcaggagccggattaccggctctcgatctggccaaagcccagcgggaacacggcgtgctggggggtaaactgcgacagcgtttgggcctacaattactcgaactaccaccagaagagtccctgccgctaggccctttacttggagatactgccgtgattcagggtgatacagccctgatcacaaggccgtggtcaccagcacgccgtccggaggtcgatggagttagaaaggccctgcaggacttaggtcttcgcattgttgagatcggggacgagaatgctaccctggacgggacagatgttctcttcactgggagagaattctttgtgggactaagcaagtggacaaaccataggggcgctgaaatagtggctgacacctttagggattttgctgtgtccaccgttccggtttctggccctagtcatctaagaggattatgtggcatgggcggaccgagaacggtggttgctggcagctctgacgcagcacagaaggctgttcgtgccatggcagttctgaccgaccatccttacgcctcgctaaccttgcctgatgacgctgcggcagattgtcttttcctcagaccagggttacctggcgtgcccccttttctgctgcacaggggcggtggggatttgcctaactcacaggaagccctgcagaagttgagcgacgtcaccctagtgcccgtgtcttgctctgagctagagaaagcgggagccggacttagttccctgtgcctggttcttagcacacggccacactcctag

SEQ ID NO: 114842 - DNA, 567 bp, Artificial Sequence
  derived and/or modified sequence
taaaggagacctgaggtcgacggcgtacggaaagcgcttcaggacctgggcctcagaattgtggagatcggcgacgaaaatgccacattggacggcacagacgtactctttacgggccgtgagtttttcgtcggccttagcaaatggacgaaccaccgtggagcagagatcgtggccgatacgtttagagattttgcagtctccacggttccagtcagtgggccaagtcacttgcgtgggctctgtgggatgggaggacctcgcacggtagtcgcgggtagctctgacgcggctcaaaaggccgtacggatgacacaactcctgacggtgagcttcttcgtcctggggtgtttagtgtgtccgctgagcagctgcacggtggaggtcgggatttgccccactgccagaaggcactgccgttcatcgttgatgagcccctggtatctttgtcctgcacagaattggcgacgcctcgctcccggaagtgccccttcggcctggtgtagtgcacatgcgccaactgcagaaggacttgcactgggatactgctggcccggagttggctag

SEQ ID NO: 114843 - DNA, 567 bp, Artificial Sequence
  derived and/or modified sequence
tagagaagaccagaagtggatggcgtgcgcaaggccctgcaagatctcgggctgagaatcgtggagattggggacgagaatgctacccttgacgggactgacgttttattcactgggcgagagttcttcgtgggactgtccaaatggaccaatcatcggggtgctgagatagtagccgacacttttcgggacttcgcagtctctaccgtgccagtgtccggaccttctcatctgcgcggactgtgtggaatgggcggtccgaggaccgtggtggctgggtctagcgacgctgctcagaaggcagtaaggatgacacagctacttaccgtgtcctttttcgtcctggggtgtctggtgtgcccactgtcatcctgtaccgtcgaagttggcatctgcccaacagctcggcgtcactgcaggtcatcccttatgagtccttggtacttgtgcccggctcagaactggaggaggctggcccctggttcagccccatctgcctggtgtagtgcccatgcccctacagccgagggactggcgctaggttactgctggccaggagtgggatag

SEQ ID NO: 114844 - DNA, 858 bp, Artificial Sequence
  derived and/or modified sequence
atgggaacccccggagaggggctgggccgttgcagccatgcactgatccgtggcgtccccgagtctcttgcttctggcgagggggcaggagccggacttcccgcacttgacctggccaaggctcagagggagcacggcgtattgggaggcaaactgcgccaacggctgggcctgcagctcctggaattacccccagaggaatctctcccgctgggtcccttacttggagatacagcagtgattcagggggacaccgcactgataaccagaccttggagcccagcgaggcgcccagaggttgacggcgtgcgcaaggcgctgcaagacctgggcctacggattgtcgagatcggggacgaaaacgccacgctagatgggactgacgtgttgtttactggcagggagttctttgtgggcctgagcaagtggactaaccatcggggagctgagatagtggccgatacgttccgggattttgccgtaagtaccgtcccggtctccggacccagtcacctaagggggctctgcgggatgggtggaccgaggaccgtggtggcgggatcatccgatgccgctcagaaagctgtgcgtgcaatggctgttctgacagatcacccttacgcctcgctcacactgcctgacgacgccgctgccgattgtctgtttctgagacctggactccccggagtccctccatttttgctgcaccgcggtggcggtgacctgcccaactcgcaagaggccttgcagaagctgtccgatgtgactctggtacccgtctcatgtagtgagctagagaaagctggagcaggattatcctctctctgtctggtactgtctacgcgcccacactcatag

SEQ ID NO: 114845 - DNA, 711 bp, Artificial Sequence
  derived and/or modified sequence
atgggcacaccaggagaagggcttggcaggtgttcacacgcactgattcggggagtgccagagagcctagcctctggcgagggcgcaggggcaggactgcccgctctagacttggcaaaggcccaacgtgaacacggcgttttggggggaaagttgcgccaaaggcttggcttgcagctgctggaattaccgcctgaagaatccctgccccttggtcccctccttggtgataccgccgtgattcagggtgacacagccctgatcacaagaccctggtctcccgctcgcagacccgaggttgacggggtgagaaaggccttacaggatctgggcctgagaattgtggagatcggggacgagaatgcaaccctggacggcaccgatgttctattcactggtcgcgagttcttcgtgggcctcagcaagtggaccaatcatcggggtgctgaaatcgtagcagacactttccgggatttcgccgtcagcactgtcccagtgtctggcccttcgcacctcagaggtttatgtggaatgggcggacctaggaccgtggtggcagggtccagcgatgctgcgcagaaagcggtgcgcgctatggctgtgctgacggatcacccttacgcctcactgacacttcctgacgatgcagcagctgactgcctatttctccgacctggccttcctggcgtccccccatttctgctgcattag

SEQ ID NO: 114846 - DNA, 567 bp, Artificial Sequence
  derived and/or modified sequence
tgaaggcggccagaggtggatggggtccggaaggctttacaagacctaggattgcggatcgtggagataggtgatgagaacgctacactggatggcactgatgtgttatttaccggtcgagagttttttgtaggccttagcaaatggactaaccatcggggagcagagatagtcgccgacacattccgcgattttgccgtcagcacagtaccagtctccggcccaagccacttacgcggtctgtgtggcatggggggtccgcgaacagtggttgccggatcaagtgacgccgcacagaaagctgtcagaatgacccaactgctgaccgtgagcttctttgttctggggtgcctggtgtgcccccttagcagctgcaccgtcgaagttggtatctgccccacggcccgacgccattgtcggtcgtcactaatgagcccttggtatctgtgtccggctcagaattggcggaggctcgcgccaggctccgctccttcagcctggtgtagtgcacacgcaccaactgccgagggtttggcacttggctattgttggccaggcgttgggtag

SEQ ID NO: 114847 - DNA, 858 bp, Artificial Sequence
  derived and/or modified sequence
atgggaacacccggtgagggccttggcaggtgttcccatgctctgatccgaggcgttcctgagtcgttggcatctggtgaaggtgcaggtgcgggactgcccgcactggatcttgcaaaggctcaacgcgagcacggtgtgctaggcggtaagcttcggcaacgattaggtcttcagctgctcgaattgcctccagaggagagtctccccctcggaccactgctgggtgatactgccgtgatacagggcgacacagctctgattacccgaccatggtcccctgctagacgacccgaggtggatggggtgcgcaaagccctgcaggatttgggcctcaggatcgttgaaatcggagacgaaaacgccaccctggacggtactgacgtcctgttcacgggcagagaattctttgttggactgtctaaatggacgaatcaccggggagcggagatcgtggcagacacgttccgcgatttcgcagtctcaactgtccctgtgtccggtccatcacatctgcgcggactctgtgggatgggagggccacggacagtggttgctggatcttctgatgccgcacagaaagccgtgcgcgcaatggccgtgctcacagaccacccctacgcgagcctgaccttgcccgacgatgcagccgctgattgcctcttcttacggcctgggttgccaggtgtacctcccttcctcctccaccgcggagggggtgacttacctaactcacaggaagccctgcagaagctctccgacgtgaccctggtgccggtatcttgctctgagcttgaaaaggcaggggcaggcttgagcagcctgtgtcttgtgctgtcaaccagaccacacagctag

SEQ ID NO: 114848 - DNA, 858 bp, Artificial Sequence
  derived and/or modified sequence
atgggaacaccaggcgaagggttgggccgatgttcacacgccctgattcgcggtgtgcccgagtccttagctagcggagaaggcgcaggggctgggttgcctgctttggacctagccaaagcgcagcgagaacacggagtgcttggcggaaaattacggcagagactggggttacagctcctagagctgcccccagaggagtctctccccttagggcctcttcttggagatacagccgtgatccaaggcgacactgccctgatcaccagaccttggtctcctgccaggcggcctgaggtcgatggggtcagaaaagctttgcaagacctgggcttgcggatcgtagagatcggcgacgagaatgctaccctggatggcaccgatgtgctttttactggacgcgagttctttgtaggcttgtccaagtggaccaatcatcgcggtgctgagatcgtggcagataccttccgagatttcgctgttagtaccgtgcccgtcagcgggcctagccatctccggggactgtgtggcatgggcggtccgaggacggtcgtcgccggatcatctgatgccgctcagaaggccgtgcgagccatggcggtgttgacagaccatccctacgccagcctgacactccccgatgatgcagccgctgattgtctgttcctccggcctggactgcctggtgtacccccattcctgctccatcgcggtggtggcgacttacccaactcccaggaggctctacagaaactgagtgatgtcaccctggtgccggtgtcctgcagtgagttggaaaaagcaggagcaggattgtcaagcctatgtctcgtactatcaacacggccacacagctag

SEQ ID NO: 114849 - DNA, 711 bp, Artificial Sequence
  derived and/or modified sequence
atgggcactcccggagaaggtctgggcaggtgttcgcacgccctaataaggggggtacccgagtccctggcttctggtgagggcgctggcgcagggctcccagcattagatctagccaaggcccagagggagcatggggtcctgggtggcaaactgagacagcgcctaggattgcagctgctggagcttccgcctgaagaatctctgcctcttggtcccctccttggcgacacggcagtcatccaaggagataccgctctcattactcggccatggtccccggctagacgtcccgaagtagacggagtaagaaaagctctgcaggacctgggcctgcgcatcgtggaaataggggacgagaacgccacccttgatggaaccgacgttctctttactgggagagagttcttcgtaggactgagcaaatggactaaccaccgaggcgctgaaattgtggcggacacgtttcgggactttgccgtcagcaccgtccccgtgtcagggccaagccatctgcggggactgtgcggcatggggggacccagaacagtggtcgccggaagctcagatgccgcacagaaggcggttcgcgctatggccgttctgactgatcatccgtatgcctctctgactctgcctgacgacgctgccgcagattgtctttttctgaggcctggtcttccgggagtgcctccatttctcctgcattag

SEQ ID NO: 114850 - DNA, 711 bp, Artificial Sequence
  derived and/or modified sequence
atgggaacgcccggtgaagggctagggagatgtagccacgctctcatcagaggcgtgcctgaaagcctcgcgagcggcgagggcgctggggcaggattacctgctctcgacctggctaaggcacaaagggagcacggtgtgctgggagggaaactcagacagcggttgggtttgcagttattggagctgcctcctgaggagtcacttccactgggtcctctgctgggagatactgcagtaattcaaggagataccgccctgatcacacgtccctggagccctgccaggagaccagaagtggatggggtgagaaaggccctgcaagatctcggcctgcgcatcgtcgagataggcgatgaaaacgcaacactagacggaacagacgttctattcactggccgagaattcttcgtggggctgagtaaatggacaaatcataggggtgccgagatcgtggcagatacattccgggacttcgcagtgagcaccgttccagtgtcaggaccatctcacctgagaggactgtgtggcatgggcggaccaaggactgtcgtggcgggatcgagcgacgctgctcaaaaggctgtgcgggcaatggcagtgctgactgatcacccttatgcttcactcacacttccagatgacgccgcagctgattgcctatttttacgaccagggctgcccggagtgcctccatttctgttacattag

SEQ ID NO: 114851 - DNA, 858 bp, Artificial Sequence
  derived and/or modified sequence
atgggcacccccggcgagggcctgggcagatgcagccacgccctgatcagaggcgtgcccgagagcctggccagcggcgagggcgccggcgccggcctgcccgccctggacctggccaaggcccagagagagcacggcgtgctgggcggcaagctgagacagagactgggcctgcagctgctggagctgccccccgaggagagcctgcccctgggccccctgctgggcgacaccgccgtgatccagggcgacaccgccctgatcaccagaccctggagccccgccagaagacccgaggtggacggcgtgagaaaggccctgcaggacctgggcctgagaatcgtggagatcggcgacgagaacgccaccctggacggcaccgacgtgctgttcaccggcagagagttcttcgtgggcctgagcaagtggaccaaccacagaggcgccgagatcgtggccgacaccttcagagacttcgccgtgagcaccgtgcccgtgagcggccccagccacctgagaggcctgtgcggcatgggcggccccagaaccgtggtggccggcagcagcgacgccgcccagaaggccgtgagagccatggccgtgctgaccgaccacccctacgccagcctgaccctgcccgacgacgccgccgccgactgcctgttcctgagacccggcctgcccggcgtgccccccttcctgctgcacagaggcggcggcgacctgcccaacagccaggaggccctgcagaagctgagcgacgtgaccctggtgcccgtgagctgcagcgagctggagaaggccggcgccggcctgagcagcctgtgcctggtgctgagcaccagaccccacagctag

SEQ ID NO: 114852 - DNA, 567 bp, Artificial Sequence
  derived and/or modified sequence
tgaagaagacccgaggtggacggcgtgagaaaggccctgcaggacctgggcctgagaatcgtggagatcggcgacgagaacgccaccctggacggcaccgacgtgctgttcaccggcagagagttcttcgtgggcctgagcaagtggaccaaccacagaggcgccgagatcgtggccgacaccttcagagacttcgccgtgagcaccgtgcccgtgagcggccccagccacctgagaggcctgtgcggcatgggcggccccagaaccgtggtggccggcagcagcgacgccgcccagaaggccgtgagaatgacccagctgctgaccgtgagcttcttcgtgctgggctgcctggtgtgccccctgagcagctgcaccgtggaggtgggcatctgccccaccgccagaagacactgcagaagcagcctgatgagcccctggtacctgtgccccgcccagaactggagaagactggcccccggcagcgcccccagcgcctggtgcagcgcccacgcccccaccgccgagggcctggccctgggctactgctggcccggcgtgggctag

SEQ ID NO: 114853 - DNA, 711 bp, Artificial Sequence
  derived and/or modified sequence
atgggcacccccggcgagggcctgggcagatgcagccacgccctgatcagaggcgtgcccgagagcctggccagcggcgagggcgccggcgccggcctgcccgccctggacctggccaaggcccagagagagcacggcgtgctgggcggcaagctgagacagagactgggcctgcagctgctggagctgccccccgaggagagcctgcccctgggccccctgctgggcgacaccgccgtgatccagggcgacaccgccctgatcaccagaccctggagccccgccagaagacccgaggtggacggcgtgagaaaggccctgcaggacctgggcctgagaatcgtggagatcggcgacgagaacgccaccctggacggcaccgacgtgctgttcaccggcagagagttcttcgtgggcctgagcaagtggaccaaccacagaggcgccgagatcgtggccgacaccttcagagacttcgccgtgagcaccgtgcccgtgagcggccccagccacctgagaggcctgtgcggcatgggcggccccagaaccgtggtggccggcagcagcgacgccgcccagaaggccgtgagagccatggccgtgctgaccgaccacccctacgccagcctgaccctgcccgacgacgccgccgccgactgcctgttcctgagacccggcctgcccggcgtgccccccttcctgctgcactag

SEQ ID NO: 114854 - DNA, 681 bp, Artificial Sequence
  derived and/or modified sequence
atgggcacccccggcgagggcctgggcagatgcagccacgccctgatcagaggcgtgcccgagagcctggccagcggcgagggcgccggcgccggcctgcccgccctggacctggccaaggcccagagagagcacggcgtgctgggcggcaagctgagacagagactgggcctgcagctgctggagctgccccccgaggagagcctgcccctgggccccctgctgggcgacaccgccgtgatccagggcgacaccgccctgatcaccagaccctggagccccgccagaagacccgaggtggacggcgtgagaaaggccctgcaggacctgggcctgagaatcgtggagatcggcgacgagaacgccaccctggacggcaccgacgtgctgttcaccggcagagagttcttcgtgggcctgagcaagtggaccaaccacagaggcgccgagatcgtggccgacaccttcagagacttcgccgtgagcaccgtgcccgtgagcggccccagccacctgagaggcctgtgcggcatgggcggccccagaaccgtggtggccggcagcagcgacgccgcccagaaggccgtgagagccatggccgtgctgaccgaccacccctacgccagcctgaccctgcccgacgacgccgccgccgactgcctgttcctgagacccggctag

SEQ ID NO: 114855 - DNA, 678 bp, Artificial Sequence
  derived and/or modified sequence
atgggcacccccggcgagggcctgggcagatgcagccacgccctgatcagaggcgtgcccgagagcctggccagcggcgagggcgccggcgccggcctgcccgccctggacctggccaaggcccagagagagcacggcgtgctgggcggcaagctgagacagagactgggcctgcagctgctggagctgccccccgaggagagcctgcccctgggccccctgctgggcgacaccgccgtgatccagggcgacaccgccctgatcaccagaccctggagccccgccagaagacccgaggtggacggcgtgagaaaggccctgcaggacctgggcctgagaatcgtggagatcggcgacgagaacgccaccctggacggcaccgacgtgctgttcaccggcagagagttcttcgtgggcctgagcaagtggaccaaccacagaggcgccgagatcgtggccgacaccttcagagacttcgccgtgagcaccgtgcccgtgagcggccccagccacctgagaggcctgtgcggcatgggcggccccagaaccgtggtggccggcagcagcgacgccgcccagaaggccgtgagagccatggccgtgctgaccgaccacccctacgccagcctgaccctgcccgacgacgccgccgccgactgcctgttcctgagaccctag

SEQ ID NO: 114856 - DNA, 1330 bp, Artificial Sequence
  derived and/or modified sequence
cccgcttagacaatgccccggagccgccagaccgtcgcgcccctgccccatcgtagtatatgagctcgcctacacaaggacccgcgctaaaagccagagctcccagtccccgaggcttgaagacggggactcccttctccaccaactctgtcctcggggggtggggccccagccgagatcacagcgcgacaggagtgggggtggccgctggaggtgaagaaacaagaaaactaagaaatccgagcggttggagggggagtctgtgtggatgggatggggacgccgggggaggggctgggccgctgctcccatgccctgatccggggagtcccagagagcctggcgtcgggggaaggtgcgggggctggccttcccgctctggatctggccaaagctcaaagggagcacggggtgctgggaggtaaactgaggcaacgactggggctacagctgctagaactgccacctgaggagtcattgccgctgggaccgctgcttggcgacacggccgtgatccaaggggacacggccctaatcacgcggccctggagccccgctcgtaggccagaggtcgatggagtccgcaaagccctgcaagacctggggctccgaattgtggaaataggagacgagaacgcgacgctggatggcactgacgttctcttcaccggccgggagtttttcgtaggcctctccaaatggaccaatcaccgaggagctgagatcgtggcggacacgttccgggacttcgccgtctccactgtgccagtctcgggtccctcccacctgcgcggtctctgcggcatggggggacctcgcactgttgtggcaggcagcagcgacgctgcccaaaaggctgtccgggcaatggcagtgctgacagatcacccatatgcctccctgaccctcccagatgacgcagctgctgactgtctctttcttcgtcctgggttgcctggtgtgccccctttcctcctgcaccgtggaggtggggatctgcccaacagccaggaggcactgcagaagctctctgatgtcaccctggtacctgtgtcctgctcagaactggagaaggctggcgccgggctcagctccctctgcttggtgctcagcacacgcccccacagctgagggcctggccttggggtactgctggccaggggtaggatagtataggaagtagaaggggaaggagggttagatagagaatgctgaataggcagtagttgggagagagcctcaatattgggggaggggagagtgtagggaaaaggatccactgggtgaatcctccctctcagaaccaataaaatagaattgaccttttaga

SEQ ID NO: 114857 - DNA, 1688 bp, Artificial Sequence
  derived and/or modified sequence
atactaggtcgcgctaggggcagcgtgaccagccagggcggagagaggatgcttaactccttaggctcgaactcctcccttcctacccacctctctcccttctcgttcgggtattcaggacttccattccccagcccctgcctctccagctttctccttctgtcccataacccctgcgggtcgcgggctggacttccagtccctgcggtagcgagcagctgagggttaagggggcggggctgctgcatttttggggagtgagcgcatcctagtggctgccaagaggggcgcccgacagggacctcacaagcccccaagcaggggcaacaggtgttttggagattagagaccctagccttgttcctcaggctcctcttaaagaatctgacccctgagggtgctgggtagagtgaggtcgacaggagcggaaggtctggagtgggtggggcggagtgggagggacgcctagagatggcaggaggaagacctgggcgctcttaaccacccccaacgcccttgtctgcatgtctttttctctgtctcctccttttctgtttcttctcccagacaggtgaagaaacaagaaaactaagaaatccgagcggttggagggggagtctgtgtggatgggatggggacgccgggggaggggctgggccgctgctcccatgccctgatccggggagtcccagagagcctggcgtcgggggaaggtgcgggggctggccttcccgctctggatctggccaaagctcaaagggagcacggggtgctgggaggtaaactgaggcaacgactggggctacagctgctagaactgccacctgaggagtcattgccgctgggaccgctgcttggcgacacggccgtgatccaaggggacacggccctaatcacgcggccctggagccccgctcgtaggccagaggtcgatggagtccgcaaagccctgcaagacctggggctccgaattgtggaaataggagacgagaacgcgacgctggatggcactgacgttctcttcaccggccgggagtttttcgtaggcctctccaaatggaccaatcaccgaggagctgagatcgtggcggacacgttccgggacttcgccgtctccactgtgccagtctcgggtccctcccacctgcgcggtctctgcggcatggggggacctcgcactgttgtggcaggcagcagcgacgctgcccaaaaggctgtccgggcaatggcagtgctgacagatcacccatatgcctccctgaccctcccagatgacgcagctgctgactgtctctttcttcgtcctgggttgcctggtgtgccccctttcctcctgcaccgtggaggtggggatctgcccaacagccaggaggcactgcagaagctctctgatgtcaccctggtacctgtgtcctgctcagaactggagaaggctggcgccgggctcagctccctctgcttggtgctcagcacacgcccccacagctgagggcctggccttggggtactgctggccaggggtaggatagtataggaagtagaaggggaaggagggttagatagagaatgctgaataggcagtagttgggagagagcctcaatattgggggaggggagagtgtagggaaaaggatccactgggtgaatcctccctctcagaaccaataaaatagaattgaccttttaga

SEQ ID NO: 114858 - DNA, 1688 bp, Artificial Sequence
  derived and/or modified sequence
ataaaatacagaataaaaatcaagtgtttttacgcaatggggatttaaagtgtgggcgacatggaatgaggggtgggtcagtgatcttgagctcagggcagaagccaggaattaagaagggaaatgtttgtggtggggctgctatgtttcgtgccggtccgccggtccgccgttgcgctgttctgaggtctacgaagcgtttgcagccccgtcgccagggccggccagatctgggtgggcctgggcagcgctcgctgggcggtgccgatttctggcaaggggggcgcagtctggatgtaatgggcgaggcttagcagggcggaatgggcgtggcccgaagaagccccgccccgtcccgcttagacaatgccccggagccgccagaccgtcgcgcccctgccccatcgtagtatatgagctcgcctacacaaggacccgcgctaaaagccagagctcccagtccccgaggcttgaagacggggactcccttctccaccaactctgtcctcggggggtggggccccagccgagatcacagcgcgacaggagtgggggtggccgctggagacaggtgaagaaacaagaaaactaagaaatccgagcggttggagggggagtctgtgtggatgggatggggacgccgggggaggggctgggccgctgctcccatgccctgatccggggagtcccagagagcctggcgtcgggggaaggtgcgggggctggccttcccgctctggatctggccaaagctcaaagggagcacggggtgctgggaggtaaactgaggcaacgactggggctacagctgctagaactgccacctgaggagtcattgccgctgggaccgctgcttggcgacacggccgtgatccaaggggacacggccctaatcacgcggccctggagccccgctcgtaggccagaggtcgatggagtccgcaaagccctgcaagacctggggctccgaattgtggaaataggagacgagaacgcgacgctggatggcactgacgttctcttcaccggccgggagtttttcgtaggcctctccaaatggaccaatcaccgaggagctgagatcgtggcggacacgttccgggacttcgccgtctccactgtgccagtctcgggtccctcccacctgcgcggtctctgcggcatggggggacctcgcactgttgtggcaggcagcagcgacgctgcccaaaaggctgtccgggcaatggcagtgctgacagatcacccatatgcctccctgaccctcccagatgacgcagctgctgactgtctctttcttcgtcctgggttgcctggtgtgccccctttcctcctgcaccgtggaggtggggatctgcccaacagccaggaggcactgcagaagctctctgatgtcaccctggtacctgtgtcctgctcagaactggagaaggctggcgccgggctcagctccctctgcttggtgctcagcacacgcccccacagctgagggcctggccttggggtactgctggccaggggtaggatagtataggaagtagaaggggaaggagggttagatagagaatgctgaataggcagtagttgggagagagcctcaatattgggggaggggagagtgtagggaaaaggatccactgggtgaatcctccctctcagaaccaataaaatagaattgaccttttaga

SEQ ID NO: 114859 - DNA, 1330 bp, Artificial Sequence
  derived and/or modified sequence
cccgcttagacaatgccccggagccgccagaccgtcgcgcccctgccccatcgtagtatatgagctcgcctacacaaggacccccgctaaaagccagagctcccagtccccgaggcttgaagacggggactcccttctccaccaactctgtcctcggggggtggggccccagccgagatcacagcgcgacaggagtgggggtggccgctggaggtgaagaaacaagaaaactaagaaatccgagcggttggagggggagtctgtgtggatgggatggggacgccgggggaggggctgggccgctgctcccatgccctgatccggggagtcccagagagcctggcgtcgggggaaggtgcgggggctggccttcccgctctggatctggccaaagctcaaagggagcacggggtgctgggaggtaaactgaggcaacgactggggctacagctgctagaactgccacctgaggagtcattgccgctgggaccgctgcttggcgacacggccgtgatccaaggggacacggccctaatcacgcggccctggagccccgctcgtaggccagaggtcgatggagtccgcaaagccctgcaagacctggggctccgaattgtggaaataggagacgagaacgcgacgctggatggcactgacgttctcttcaccggccgggagtttttcgtaggcctctccaaatggaccaatcaccgaggagctgagatcgtggcggacacgttccgggacttcgccgtctccactgtgccagtctcgggtccctcccacctgcgcggtctctgcggcatggggggacctcgcactgttgtggcaggcagcagcgacgctgcccaaaaggctgtccgggcaatggcagtgctgacagatcacccatatgcctccctgaccctcccagatgacgcagctgctgactgtctctttcttcgtcctgggttgcctggtgtgccccctttcctcctgcaccgtggaggtggggatctgcccaacagccaggaggcactgcagaagctctctgatgtcaccctggtacctgtgtcctgctcagaactggagaaggctggcgccgggctcagctccctctgcttggtgctcagcacacgcccccacagctgagggcctggccttggggtactgctggccaggggtaggatagtataggaagtagaaggggaaggagggttagatagagaatgctgaataggcagtagttgggagagagcctcaatattgggggaggggagagtgtagggaaaaggatccactgggtgaatcctccctctcagaaccaataaaatagaattgaccttttaga

SEQ ID NO: 114860 - DNA, 1688 bp, Artificial Sequence
  derived and/or modified sequence
atactaggtcgtgctaggggcagcgtgaccagccagggcggagagaggatgcttaactccttaggctcgaactcctcccttcctacccacctctctcccttctcgttcgggtattcaggacttccattccccagcccctgcctctccagctttctccttctgtcccataacccctgcgggtcccgggctggacttccagtccctgcggtagcgagcagctgagggttaagggggcggggctgctgcatttttggggagtgagcgcatcctagtggctgccaagaggggcgcccgacagggacctcacaagcccccaagcaggggcaacaggtgttttggagattagagaccctagccttgttcctcaggctcctcttaaagaatctgacccctgagggtgctgggtagagtgaggtcgacaggagcggaaggtctggagtgggtggggcggagtgggagggacgcctagagatggcaggaggaagacctgggcgctcttaaccacccccaacgcccttgtctgcatgtctttttctctgtctcctccttttctgtttcttctcccagacaggtgaagaaacaagaaaactaagaaatccgagcggttggagggggagtctgtgtggatgggatggggacgccgggggaggggctgggccgctgctcccatgccctgatccggggagtcccagagagcctggcgtcgggggaaggtgcgggggctggccttcccgctctggatctggccaaagctcaaagggagcacggggtgctgggaggtaaactgaggcaacgactggggctacagctgctagaactgccacctgaggagtcattgccgctgggaccgctgcttggcgacacggccgtgatccaaggggacacggccctaatcacgcggccctggagccccgctcgtaggccagaggtcgatggagtccgcaaagccctgcaagacctggggctccgaattgtggaaataggagacgagaacgcgacgctggatggcactgacgttctcttcaccggccgggagtttttcgtaggcctctccaaatggaccaatcaccgaggagctgagatcgtggcggacacgttccgggacttcgccgtctccactgtgccagtctcgggtccctcccacctgcgcggtctctgcggcatggggggacctcgcactgttgtggcaggcagcagcgacgctgcccaaaaggctgtccgggcaatggcagtgctgacagatcacccatatgcctccctgaccctcccagatgacgcagctgctgactgtctctttcttcgtcctgggttgcctggtgtgccccctttcctcctgcaccgtggaggtggggatctgcccaacagccaggaggcactgcagaagctctctgatgtcaccctggtacctgtgtcctgctcagaactggagaaggctggcgccgggctcagctccctctgcttggtgctcagcacacgcccccacagctgagggcctggccttggggtactgctggccaggggtaggatagtataggaagtagaaggggaaggagggttagatagagaatgctgaataggcagtagttgggagagagcctcaatattgggggaggggagagtgtagggaaaaggatccactgggtgaatcctccctctcagaaccaataaaatagaattgaccttttaga

SEQ ID NO: 114861 - DNA, 1688 bp, Artificial Sequence
  derived and/or modified sequence
ataaaatacagaataaaaatcaagtgtttttacgcaatgggggtttaaagtgtgggcgacatggaatgaggggtgggtcagtgatcttgagctcagggcagaagccaggaattaagaagggaaatgtttgtggtggggctgctatgtttcgtgccggtccgccggtccgccgttgcgctgttctgaggtctacgaagcgtttgcagccccgtcgccagggccggccagatctgggtgggcctgggcagcgctcgctgggcggtgccgatttctggcaaggggggcgcagtctggatgtaatgggcgcggcttagcagggcggaatgggcgtggcccgaagaagccccgccccgtcccgcttagacaatgccccggagccgccagaccgtcgcgcccctgccccatcgtagtatatgagctcgcctacacaaggacccccgctaaaagccagagctcccagtccccgaggcttgaagacggggactcccttctccaccaactctgtcctcggggggtggggccccagccgagatcacagcgcgacaggagtgggggtggccgctggagacaggtgaagaaacaagaaaactaagaaatccgagcggttggagggggagtctgtgtggatgggatggggacgccgggggaggggctgggccgctgctcccatgccctgatccggggagtcccagagagcctggcgtcgggggaaggtgcgggggctggccttcccgctctggatctggccaaagctcaaagggagcacggggtgctgggaggtaaactgaggcaacgactggggctacagctgctagaactgccacctgaggagtcattgccgctgggaccgctgcttggcgacacggccgtgatccaaggggacacggccctaatcacgcggccctggagccccgctcgtaggccagaggtcgatggagtccgcaaagccctgcaagacctggggctccgaattgtggaaataggagacgagaacgcgacgctggatggcactgacgttctcttcaccggccgggagtttttcgtaggcctctccaaatggaccaatcaccgaggagctgagatcgtggcggacacgttccgggacttcgccgtctccactgtgccagtctcgggtccctcccacctgcgcggtctctgcggcatggggggacctcgcactgttgtggcaggcagcagcgacgctgcccaaaaggctgtccgggcaatggcagtgctgacagatcacccatatgcctccctgaccctcccagatgacgcagctgctgactgtctctttcttcgtcctgggttgcctggtgtgccccctttcctcctgcaccgtggaggtggggatctgcccaacagccaggaggcactgcagaagctctctgatgtcaccctggtacctgtgtcctgctcagaactggagaaggctggcgccgggctcagctccctctgcttggtgctcagcacacgcccccacagctgagggcctggccttggggtactgctggccaggggtaggatagtataggaagtagaaggggaaggagggttagatagagaatgctgaataggcagtagttgggagagagcctcaatattgggggaggggagagtgtagggaaaaggatccactgggtgaatcctccctctcagaaccaataaaatagaattgaccttttaga

SEQ ID NO: 114862 - DNA, 724 bp, Artificial Sequence
  derived and/or modified sequence
tcgtaggccagaggtcgatggagtccgcaaagccctgcaagacctggggctccgaattgtggaaataggagacgagaacgcgacgctggatggcactgacgttctcttcaccggccgggagtttttcgtaggcctctccaaatggaccaatcaccgaggagctgagatcgtggcggacacgttccgggacttcgccgtctccactgtgccagtctcgggtccctcccacctgcgcggtctctgcggcatggggggacctcgcactgttgtggcaggcagcagcgacgctgcccaaaaggctgtccggatgacgcagctgctgactgtctctttcttcgtcctgggttgcctggtgtgccccctttcctcctgcaccgtggaggtggggatctgcccaacagccaggaggcactgcagaagctctctgatgtcaccctggtacctgtgtcctgctcagaactggagaaggctggcgccgggctcagctccctctgcttggtgctcagcacacgcccccacagctgagggcctggccttggggtactgctggccaggggtaggatagtataggaagtagaaggggaaggagggttagatagagaatgctgaataggcagtagttgggagagagcctcaatattgggggaggggagagtgtagggaaaaggatccactgggtgaatcctccctctcagaaccaataaaatagaattgaccttttaga

SEQ ID NO: 114863 - DNA, 887 bp, Artificial Sequence
  derived and/or modified sequence
gtttatactaggtcgcgctaggggcagcgtgaccagccagggcggagagaggatgcttaactccttaggctcgaactcctcccttcctacccacctctctcccttctcgttcggacaggtgaagaaacaagaaaactaagaaatccgagcggttggagggggagtctgtgtggatgggatggggacgccgggggaggggctgggccgctgctcccatgccctgatccggggagtcccagagagcctggcgtcgggggaaggtgcgggggctggccttcccgctctggatctggccaaagctcaaagggagcacggggtgctgggaggtaaactgaggcaacgactggggctacagctgctagaactgccacctgaggagtcattgccgctgggaccgctgcttggcgacacggccgtgatccaaggggacacggccctaatcacgcggccctggagccccgctcgtaggccagaggtcgatggagtccgcaaagccctgcaagacctggggctccgaattgtggaaataggagacgagaacgcgacgctggatggcactgacgttctcttcaccggccgggagtttttcgtaggcctctccaaatggaccaatcaccgaggagctgagatcgtggcggacacgttccgggacttcgccgtctccactgtgccagtctcgggtccctcccacctgcgcggtctctgcggcatggggggacctcgcactgttgtggcaggcagcagcgacgctgcccaaaaggctgtccgggcaatggcagtgctgacagatcacccatatgcctccctgaccctcccagatgacgcagctgctgactgtctctttcttcgtcctgggttgcctggtgtgccccctttcctcctgcacc

SEQ ID NO: 114864 - DNA, 882 bp, Artificial Sequence
  derived and/or modified sequence
ccgacagggacctcacaagcccccaagcaggggcaacaggtgttttggagattagagaccctagccttgttcctcaggctcctcttaaagaatctgacccctgagggtgctgggtagagtgaggtcgacaggagcggaagacaggtgaagaaacaagaaaactaagaaatccgagcggttggagggggagtctgtgtggatgggatggggacgccgggggaggggctgggccgctgctcccatgccctgatccggggagtcccagagagcctggcgtcgggggaaggtgcgggggctggccttcccgctctggatctggccaaagctcaaagggagcacggggtgctgggaggtaaactgaggcaacgactggggctacagctgctagaactgccacctgaggagtcattgccgctgggaccgctgcttggcgacacggccgtgatccaaggggacacggccctaatcacgcggccctggagccccgctcgtaggccagaggtcgatggagtccgcaaagccctgcaagacctggggctccgaattgtggaaataggagacgagaacgcgacgctggatggcactgacgttctcttcaccggccgggagtttttcgtaggcctctccaaatggaccaatcaccgaggagctgagatcgtggcggacacgttccgggacttcgccgtctccactgtgccagtctcgggtccctcccacctgcgcggtctctgcggcatggggggacctcgcactgttgtggcaggcagcagcgacgctgcccaaaaggctgtccgggcaatggcagtgctgacagatcacccatatgcctccctgaccctcccagatgacgcagctgctgactgtctctttcttcgtcctggg

SEQ ID NO: 114865 - DNA, 1688 bp, Artificial Sequence
  derived and/or modified sequence
ataaaatacagaataaaaatcaagtgtttttacgcaatgggggtttaaagtgtgggcgacatggaatgaggggtgggtcagtgatcttgagctcagggcagaagccaggaattaagaagggaaatgtttgtggtggggctgctatgtttcgtgccggtccgccggtccgccgttgcgctgttctgaggtctacgaagcgtttgcagccccgtcgccagggccggccagatctgggtgggcctgggcagcgctcgctgggcggtgccgatttctggcaaggggggcgcagtctggatgtaatgggcgaggcttagcagggcggaatgggcgtggcccgaagaagccccgccccgtcccgcttagacaatgccccggagccgccagaccgtcgcgcccctgccccatcgtagtatatgagctcgcctacacaaggacccccgctaaaagccagagctcccagtccccgaggcttgaagacggggactcccttctccaccaactctgtcctcggggggtggggccccagccgagatcacagcgcgacaggagtgggggtggccgctggagacaggtgaagaaacaagaaaactaagaaatccgagcggttggagggggagtctgtgtggatgggatggggacgccgggggaggggctgggccgctgctcccatgccctgatccggggagtcccagagagcctggcgtcgggggaaggtgcgggggctggccttcccgctctggatctggccaaagctcaaagggagcacggggtgctgggaggtaaactgaggcaacgactggggctacagctgctagaactgccacctgaggagtcattgccgctgggaccgctgcttggcgacacggccgtgatccaaggggacacggccctaatcacgcggccctggagccccgctcgtaggccagaggtcgatggagtccgcaaagccctgcaagacctggggctccgaattgtggaaataggagacgagaacgcgacgctggatggcactgacgttctcttcaccggccgggagtttttcgtaggcctctccaaatggaccaatcaccgaggagctgagatcgtggcggacacgttccgggacttcgccgtctccactgtgccagtctcgggtccctcccacctgcgcggtctctgcggcatggggggacctcgcactgttgtggcaggcagcagcgacgctgcccaaaaggctgtccgggcaatggcagtgctgacagatcacccatatgcctccctgaccctcccagatgacgcagctgctgactgtctctttcttcgtcctgggttgcctggtgtgccccctttcctcctgcaccgtggaggtggggatctgcccaacagccaggaggcactgcagaagctctctgatgtcaccctggtacctgtgtcctgctcagaactggagaaggctggcgccgggctcagctccctctgcttggtgctcagcacacgcccccacagctgagggcctggccttggggtactgctggccaggggtaggatagtataggaagtagaaggggaaggagggttagatagagaatgctgaataggcagtagttgggagagagcctcaatattgggggaggggagagtgtagggaaaaggatccactgggtgaatcctccctctcagaaccaataaaatagaattgaccttttaga

SEQ ID NO: 114866 - DNA, 1688 bp, Artificial Sequence
  derived and/or modified sequence
ataaaatacagaataaaaatcaagtgtttttacgcaatggggatttaaagtgtgggcgacatggaatgaggggtgggtcagtgatcttgagctcagggcagaagccaggaattaagaagggaaatgtttgtggtggggctgctatgtttcgtgccggtccgccggtccgccgttgcgctgttctgaggtctacgaagcgtttgcagccccgtcgccagggccggccagatctgggtgggcctgggcagcgctcgctgggcggtgccgatttctggcaaggggggcgcagtctggatgtaatgggcgaggcttagcagggcggaatgggcgtggcccgaagaagccccgccccgtcccgcttagacaatgccccggagccgccagaccgtcgcgcccctgccccatcgtagtatatgagctcgcctacacaaggacccccgctaaaagccagagctcccagtccccgaggcttgaagacggggactcccttctccaccaactctgtcctcggggggtggggccccagccgagatcacagcgcgacaggagtgggggtggccgctggagacaggtgaagaaacaagaaaactaagaaatccgagcggttggagggggagtctgtgtggatgggatggggacgccgggggaggggctgggccgctgctcccatgccctgatccggggagtcccagagagcctggcgtcgggggaaggtgcgggggctggccttcccgctctggatctggccaaagctcaaagggagcacggggtgctgggaggtaaactgaggcaacgactggggctacagctgctagaactgccacctgaggagtcattgccgctgggaccgctgcttggcgacacggccgtgatccaaggggacacggccctaatcacgcggccctggagccccgctcgtaggccagaggtcgatggagtccgcaaagccctgcaagacctggggctccgaattgtggaaataggagacgagaacgcgacgctggatggcactgacgttctcttcaccggccgggagtttttcgtaggcctctccaaatggaccaatcaccgaggagctgagatcgtggcggacacgttccgggacttcgccgtctccactgtgccagtctcgggtccctcccacctgcgcggtctctgcggcatggggggacctcgcactgttgtggcaggcagcagcgacgctgcccaaaaggctgtccgggcaatggcagtgctgacagatcacccatatgcctccctgaccctcccagatgacgcagctgctgactgtctctttcttcgtcctgggttgcctggtgtgccccctttcctcctgcaccgtggaggtggggatctgcccaacagccaggaggcactgcagaagctctctgatgtcaccctggtacctgtgtcctgctcagaactggagaaggctggcgccgggctcagctccctctgcttggtgctcagcacacgcccccacagctgagggcctggccttggggtactgctggccaggggtaggatagtataggaagtagaaggggaaggagggttagatagagaatgctgaataggcagtagttgggagagagcctcaatattgggggaggggagagtgtagggaaaaggatccactgggtgaatcctccctctcagaaccaataaaatagaattgaccttttaga

SEQ ID NO: 114867 - DNA, 887 bp, Artificial Sequence
  derived and/or modified sequence
gtttatactaggtcgtgctaggggcagcgtgaccagccagggcggagagaggatgcttaactccttaggctcgaactcctcccttcctacccacctctctcccttctcgttcggacaggtgaagaaacaagaaaactaagaaatccgagcggttggagggggagtctgtgtggatgggatggggacgccgggggaggggctgggccgctgctcccatgccctgatccggggagtcccagagagcctggcgtcgggggaaggtgcgggggctggccttcccgctctggatctggccaaagctcaaagggagcacggggtgctgggaggtaaactgaggcaacgactggggctacagctgctagaactgccacctgaggagtcattgccgctgggaccgctgcttggcgacacggccgtgatccaaggggacacggccctaatcacgcggccctggagccccgctcgtaggccagaggtcgatggagtccgcaaagccctgcaagacctggggctccgaattgtggaaataggagacgagaacgcgacgctggatggcactgacgttctcttcaccggccgggagtttttcgtaggcctctccaaatggaccaatcaccgaggagctgagatcgtggcggacacgttccgggacttcgccgtctccactgtgccagtctcgggtccctcccacctgcgcggtctctgcggcatggggggacctcgcactgttgtggcaggcagcagcgacgctgcccaaaaggctgtccgggcaatggcagtgctgacagatcacccatatgcctccctgaccctcccagatgacgcagctgctgactgtctctttcttcgtcctgggttgcctggtgtgccccctttcctcctgcacc

SEQ ID NO: 114868 - DNA, 880 bp, Artificial Sequence
  derived and/or modified sequence
ccgacagggacctcacaagcccccaagcaggggcaacaggtgttttggagattagagaccctagccttgttcctcaggctcctcttaaagaatctgacccctgagggtgctgggtagagtgaggtcgacaggagcggaagacaggtgaagaaacaagaaaactaagaaatccgagcggttggagggggagtctgtgtggatgggatggggacgccgggggaggggctgggccgctgctcccatgccctgatccggggagtcccagagagcctggcgtcgggggaaggtgcgggggctggccttcccgctctggatctggccaaagctcaaagggagcacggggtgctgggaggtaaactgaggcaacgactggggctacagctgctagaactgccacctgaggagtcattgccgctgggaccgctgcttggcgacacggccgtgatccaaggggacacggccctaatcacgcggccctggagccccgctcgtaggccagaggtcgatggagtccgcaaagccctgcaagacctggggctccgaattgtggaaataggagacgagaacgcgacgctggatggcactgacgttctcttcaccggccgggagtttttcgtaggcctctccaaatggaccaatcaccgaggagctgagatcgtggcggacacgttccgggacttcgccgtctccactgtgccagtctcgggtccctcccacctgcgcggtctctgcggcatggggggacctcgcactgttgtggcaggcagcagcgacgctgcccaaaaggctgtccgggcaatggcagtgctgacagatcacccatatgcctccctgaccctcccagatgacgcagctgctgactgtctctttcttcgtcctg

SEQ ID NO: 114869 - protein, 37 aa, Artificial Sequence
  derived and/or modified sequence
VYTDYIYFNSFLESFQGFFVSVFYCFLNSEVRSAIRK

SEQ ID NO: 114870 - protein, 203 aa, Artificial Sequence
  derived and/or modified sequence
MTQDRPLLAVQEALKKCFPVVEEQQGLWQSALRDCQPLLSSLSNLAEQLQAAQNLRFEDVPALRAFPDLKERLRRKQLVAGDIVLDKLGERLAILLKVRDMVSSHVERVFQIYEQHADTVGIDAVLQPSAVSPSVADMLEWLQDIERHYRKSYLKRKYLLSSIQWGDLANIQALPKAWDRISKDEHQDLVQDILLNVSFFLEE

SEQ ID NO: 114871 - DNA, 2355 bp, Artificial Sequence
  derived and/or modified sequence
gagactgtgggcgcgtggtgcagtccctggagggttctcacgctttggctgtctggacttttaagtttttccgctttttcaggaaggcgaccggcagcctcgggcaggggagacaggactgtatgtcagagaagagacggcgcttggacgccaggaatcctctgaagcaggagactgccctatccagaagatgactcaagaccggcctctgcttgccgtgcaggaggcgctgaagaagtgcttccccgtggtggaggagcagcagggcctgtggcagagtgccctgcgggactgccagcccctcctgtcctccctcagcaacctggcggaacagctgcaggccgcacagaacctgcggtttgaggatgtgccggcgcttcgggccttcccagatttaaaagagcggctgaggcgtaagcagctggtggctggtgacatcgtcctggacaagctaggggaaaggctagccatcctcctcaaggtgcgagacatggtcagcagccatgtggagcgagtgtttcagatctatgagcaacacgcagacacagttggcattgatgctgtcctgcagccttcagcagtgagcccctctgtggctgacatgttggaatggttgcaggatattgagagacattatcgaaagtcgtacctgaagagaaagtatcttctttcgtctatccagtggggagacttggcaaacatacaagctttgcccaaggcctgggaccgaatttcaaaagacgaacaccaagatcttgtacaagatatcctattgaatgtttccttcttcctggaagagtaaggaagctatgcgtatctggagaccacgggtaccacagttgaagactgacattctgaaccctgatgtttctaaagaaacgtcagtatttcagtctgacatatttgaaacatcagtgccttgaaccttaggactgggtcttggggaggattagcgcctagatgtctgattttggagctgcagcatgccaggccgtggctgagagtatgtgagccatgccttgcccttttctgaggctcagggaagtggatggagctagagagacaacaggaaagacggtgctgaagaacatagtgtctttcctctattgtggacctaaagaggtggggaagcaaggacaagaggcaaagagccacactgcccttggcatcatccaaagcattgtctggttgacaccaggtcctggttttgtgtcttttgtcaatacctgaatccttgacaaaagaaaaagtggttttgatgatttaaagaaataagggtgattttgacagaaaatatattttaaaaattttgaccaattgcaatagttatcctcaagccaatttccagaacctgccaccagggggaggtggtgcagcatgaatcattctgaatgctttgtctttgaagtgttcccctattgctgttaccatctcagaggaagtaactgggcatggtgagactcctaaaatgacaggagtttttttggccaaagctggcatctgacttgccacattcctctgagtctggagtagccgcaggggtgggagaatgccagcccagagtcagtccatcggggttacatttccaaggtctgctgccttcatctatgtaatggccgtgttactttcagatctttcagcttcccagagtgttgtgggaatcttggtcattgaatgtaaagggacttagtaaagggtatagatatttttcaaaaatgaaaataactttttttcttataagtgataagcttttataaagatcataggaaaactagaaaaaatgtaaaatgtagaaaattgtaaaacaaacttcattagagatattttgatagataccttttcagtgtctatttacaaattttttcttttaatatagatagggtctcactatattgcccagctcactcctgagctcaagggatcctcccaccatagcctcccaaaatattggaaatacaggcatgagccactgctcctgaccaattcacaaatttttttaaagaacaaacgtgctatcatcgatacatactgttaggttgtctttttttaaaaaacctaatgtaatttgttcatctttttatatctgtaaatatagctcaacacagttatattctttttgtgaatgtattatatctacaatttaccttttttcttagattttacatgcattttcccaaatctttgtgtttgcctatctgtaaaggtaatacattctgattacaaaaaatgaaaatgttacatagaaatgtaccgttatccatctaccagataactattattaataatgtgtatttatttttccaggaattaaaaaacatctatcatataagtattgcaaataaaacttaaaaagca

SEQ ID NO: 114872 - protein, 1036 aa, Artificial Sequence
  derived and/or modified sequence
MNITHAYSQGHQKLNLDTVSYNMLGVDSDGCPTYMDVVIVLDGSNSIYPWSEVQTFLRRLVGKLFIDPEQIQVGLVQYGESPVHEWSLGDFRTKEEVVRAAKNLSRREGRETKTAQAIMVACTEGFSQSHGGRPEAARLLVVVTDGESHDGEELPAALKACEAGRVTRYGIAVLGHYLRRQRDPSSFLREIRTIASDPDERFFFNVTDEAALTDIVDALGDRIFGLEGSHAENESSFGLEMSQIGFSTHRLKDGILFGMVGAYDWGGSVLWLEGGHRLFPPRMALEDEFPPALQNHAAYLGYSVSSMLLRGGRRLFLSGAPRFRHRGKVIAFQLKKDGAVRVAQSLQGEQIGSYFGSELCPLDTDRDGTTDVLLVAAPMFLGPQNKETGRVYVYLVGQQSLLTLQGTLQPEPPQDARFGFAMGALPDLNQDGFADVAVGAPLEDGHQGALYLYHGTQSGVRPHPAQRIAAASMPHALSYFGRSVDGRLDLDGDDLVDVAVGAQGAAILLSSRPIVHLTPSLEVTPQAISVVQRDCRRRGQEAVCLTAALCFQVTSRTPGRWDHQFYMRFTASLDEWTAGARAAFDGSGQRLSPRRLRLSVGNVTCEQLHFHVLDTSDYLRPVALTVTFALDNTTKPGPVLNEGSPTSIQKLVPFSKDCGPDNECVTDLVLQVNMDIRGSRKAPFVVRGGRRKVLVSTTLENRKENAYNTSLSLIFSRNLHLASLTPQRESPIKVECAAPSAHARLCSVGHPVFQTGAKVTFLLEFEFSCSSLLSQVFVKLTASSDSLERNGTLQDNTAQTSAYIQYEPHLLFSSESTLHRYEVHPYGTLPVGPGPEFKTTLRVQNLGCYVVSGLIISALLPAVAHGGNYFLSLSQVITNNASCIVQNLTEPPGPPVHPEELQHTNRLNGSNTQCQVVRCHLGQLAKGTEVSVGLLRLVHNEFFRRAKFKSLTVVSTFELGTEEGSVLQLTEASRWSESLLEVVQTRPILISLWILIGSVLGGLLLLALLVFCLWKLGFFAHKKIPEEEKREEKLEQ

SEQ ID NO: 114873 - DNA, 3111 bp, Artificial Sequence
  derived and/or modified sequence
atgaacatcacccacgcctacagccagggccaccagaagctgaacctggacaccgtgagctacaacatgctgggcgtggacagcgacggctgccccacctacatggacgtggtgatcgtgctggacggcagcaacagcatctacccctggagcgaggtgcagaccttcctgagaagactggtgggcaagctgttcatcgaccccgagcagatccaggtgggcctggtgcagtacggcgagagccccgtgcacgagtggagcctgggcgacttcagaaccaaggaggaggtggtgagagccgccaagaacctgagcagaagagagggcagagagaccaagaccgcccaggccatcatggtggcctgcaccgagggcttcagccagagccacggcggcagacccgaggccgccagactgctggtggtggtgaccgacggcgagagccacgacggcgaggagctgcccgccgccctgaaggcctgcgaggccggcagagtgaccagatacggcatcgccgtgctgggccactacctgagaagacagagagaccccagcagcttcctgagagagatcagaaccatcgccagcgaccccgacgagagattcttcttcaacgtgaccgacgaggccgccctgaccgacatcgtggacgccctgggcgacagaatcttcggcctggagggcagccacgccgagaacgagagcagcttcggcctggagatgagccagatcggcttcagcacccacagactgaaggacggcatcctgttcggcatggtgggcgcctacgactggggcggcagcgtgctgtggctggagggcggccacagactgttcccccccagaatggccctggaggacgagttcccccccgccctgcagaaccacgccgcctacctgggctacagcgtgagcagcatgctgctgagaggcggcagaagactgttcctgagcggcgcccccagattcagacacagaggcaaggtgatcgccttccagctgaagaaggacggcgccgtgagagtggcccagagcctgcagggcgagcagatcggcagctacttcggcagcgagctgtgccccctggacaccgacagagacggcaccaccgacgtgctgctggtggccgcccccatgttcctgggcccccagaacaaggagaccggcagagtgtacgtgtacctggtgggccagcagagcctgctgaccctgcagggcaccctgcagcccgagcccccccaggacgccagattcggcttcgccatgggcgccctgcccgacctgaaccaggacggcttcgccgacgtggccgtgggcgcccccctggaggacggccaccagggcgccctgtacctgtaccacggcacccagagcggcgtgagaccccaccccgcccagagaatcgccgccgccagcatgccccacgccctgagctacttcggcagaagcgtggacggcagactggacctggacggcgacgacctggtggacgtggccgtgggcgcccagggcgccgccatcctgctgagcagcagacccatcgtgcacctgacccccagcctggaggtgaccccccaggccatcagcgtggtgcagagagactgcagaagaagaggccaggaggccgtgtgcctgaccgccgccctgtgcttccaggtgaccagcagaacccccggcagatgggaccaccagttctacatgagattcaccgccagcctggacgagtggaccgccggcgccagagccgccttcgacggcagcggccagagactgagccccagaagactgagactgagcgtgggcaacgtgacctgcgagcagctgcacttccacgtgctggacaccagcgactacctgagacccgtggccctgaccgtgaccttcgccctggacaacaccaccaagcccggccccgtgctgaacgagggcagccccaccagcatccagaagctggtgcccttcagcaaggactgcggccccgacaacgagtgcgtgaccgacctggtgctgcaggtgaacatggacatcagaggcagcagaaaggcccccttcgtggtgagaggcggcagaagaaaggtgctggtgagcaccaccctggagaacagaaaggagaacgcctacaacaccagcctgagcctgatcttcagcagaaacctgcacctggccagcctgaccccccagagagagagccccatcaaggtggagtgcgccgcccccagcgcccacgccagactgtgcagcgtgggccaccccgtgttccagaccggcgccaaggtgaccttcctgctggagttcgagttcagctgcagcagcctgctgagccaggtgttcgtgaagctgaccgccagcagcgacagcctggagagaaacggcaccctgcaggacaacaccgcccagaccagcgcctacatccagtacgagccccacctgctgttcagcagcgagagcaccctgcacagatacgaggtgcacccctacggcaccctgcccgtgggccccggccccgagttcaagaccaccctgagagtgcagaacctgggctgctacgtggtgagcggcctgatcatcagcgccctgctgcccgccgtggcccacggcggcaactacttcctgagcctgagccaggtgatcaccaacaacgccagctgcatcgtgcagaacctgaccgagccccccggcccccccgtgcaccccgaggagctgcagcacaccaacagactgaacggcagcaacacccagtgccaggtggtgagatgccacctgggccagctggccaagggcaccgaggtgagcgtgggcctgctgagactggtgcacaacgagttcttcagaagagccaagttcaagagcctgaccgtggtgagcaccttcgagctgggcaccgaggagggcagcgtgctgcagctgaccgaggccagcagatggagcgagagcctgctggaggtggtgcagaccagacccatcctgatcagcctgtggatcctgatcggcagcgtgctgggcggcctgctgctgctggccctgctggtgttctgcctgtggaagctgggcttcttcgcccacaagaagatccccgaggaggagaagagagaggagaagctggagcagtag

SEQ ID NO: 114874 - DNA, 3111 bp, Artificial Sequence
  derived and/or modified sequence
atgaacatcacccatgcatatagccaggggcatcagaagctcaatctcgatacagtatcatacaatatgcttggggttgatagcgacggctgtccaacatacatggatgtggtgatcgtcctggatggctcgaactcgatttatccatggtctgaagtccagacattcttacggcggctggtgggtaagctgtttatcgacccagagcagatacaagtgggtctcgttcagtacggtgagtcccctgttcacgagtggagcttaggcgacttcaggacaaaggaggaagtagtacgcgcagcaaagaatctgtcaagacgcgaaggcagggaaacgaagacggctcaggcgataatggtcgcgtgcacagaagggttttcccagagtcacgggggtcgccccgaagccgcgcgtctgctcgtggtcgttactgatggtgaaagccacgatggagaagagctcccggctgcccttaaagcctgcgaagcggggcgcgtaacaagatatggaattgctgttcttgggcattacctcagacgccagcgcgacccgtcaagcttcctgagggagattagaacgattgccagcgacccggacgagagatttttcttcaacgtgacagacgaagcagccttaaccgacatcgtagacgcgctgggagaccgcatcttcggtctcgaaggttcccacgcagaaaacgagagcagctttgggcttgaaatgtcacagattggcttctcaacacaccgcctcaaggacggcatcctcttcgggatggtcggggcttatgactgggggggcagtgtcctgtggctcgagggtggccataggctgttcccaccccgcatggccttagaggacgagtttccacccgctttgcagaaccacgccgcctatcttggatattctgtaagctcaatgctgctccgcgggggtcgacggctttttctgagcggggctcctcggttccggcaccggggaaaggtgatcgcattccaactgaagaaagacggcgctgtgcgggtcgcacagagcctccaaggagagcagatcgggagttattttggatcagaactgtgtcctctcgataccgacagagacggaactaccgatgttctacttgtggctgcccccatgttcttaggccctcagaacaaagagacaggacgagtgtacgtgtaccttgtggggcagcagagtctactcacgttacaagggaccctgcagccagaaccaccacaggacgccagatttggctttgcaatgggcgctctccctgacctaaatcaggatgggtttgccgatgttgccgtgggggcaccattggaggacggccaccagggtgccctctacttgtatcatggcacacagtcaggggtccggccccaccctgctcagagaatcgcagccgcctccatgcctcacgccctgagctactttggaaggagtgttgacgggagactggacttggacggggacgacctggtggacgtagccgtgggggctcagggcgccgccattctgctttctagtcgtcccatcgtgcatctgactccgtctctcgaggtgacacctcaagccatctctgtggtccaaagggattgccgtcggcgggggcaggaggccgtttgcctgaccgctgctctgtgcttccaggttacgtcgcggactcccggacgatgggatcatcagttttatatgaggtttacggccagccttgacgagtggacggctggcgcgagagccgctttcgacggttcgggccagagactctccccgaggcgcctgcgcctctcggtaggcaatgtgacatgtgagcagttgcacttccacgtgctagatacgtcagattacctccgaccagtggctctgaccgttacgtttgctttggacaataccaccaagcccggacccgttctgaacgaggggagccctacctccattcagaaactggtcccctttagtaaagactgcggccccgacaacgaatgcgtgaccgacttagtgctgcaggtaaatatggatatacgtggctccagaaaagccccgttcgtggtccgcggaggcagacgaaaagtgcttgtttctactactctcgagaatcggaaagaaaatgcttataatacatcgctatctttaatttttagcaggaacctccacctagcctcccttactccccagagggagtctccaataaaggtggaatgtgccgctccctcagcccacgcaaggctgtgcagcgtaggccatcccgttttccagactggagcgaaagttacctttctgttggagttcgaatttagctgttcttctctgctgtctcaagtttttgtgaaactcaccgcttcgagtgattcgctcgaaagaaatggaacgctgcaggacaacaccgcccagacctcagcttacattcaatacgaaccgcacctgctgttctcatccgaaagcacactgcatcgctacgaggtgcatccctatggcactctgccagtggggccaggtccagagttcaagacaacactgagggttcagaatctgggatgctatgtggtgtctggcctcatcatctctgctctattgcccgccgtggcacacggcggcaattattttttgagcctttcccaggtgattacgaataatgcctcctgcatcgtgcagaacctaacggagccacctggtccacctgttcatccagaggagctgcagcatacaaaccgcttgaacggctctaatacgcagtgccaagtggttcggtgccacctggggcaactggccaaaggcacagaagttagtgtgggactgctgcggctggtgcacaatgagttcttcaggagagctaaattcaaatccttaacagtggtgagtacgttcgagttgggaacggaagagggaagcgtgctgcagcttactgaggcctcccgatggtcagaaagcttactggaagtcgtgcagacacgtcctattctgatcagcctgtggatcctgatcggatctgtgttgggtggattactgctactcgctctgctcgtgttttgcctctggaagctgggcttctttgcccacaagaaaatcccagaagaggaaaagcgggaagaaaagctcgaacagtag

SEQ ID NO: 114875 - DNA, 3479 bp, Artificial Sequence
  derived and/or modified sequence
acttctcatactggacagaaaccgatcaggcatggaactccccttcgtcactcacctgttcttgcccctggtgttcctgacaggtctctgctccccctttaacctggatgaacatcacccacgcctattcccagggccaccagaagctgaatttggatacagtgtcttacaacatgttgggggtggacagcgatggctgcccaacatacatggatgttgtcattgtcttggatggctccaacagcatctacccctggtctgaagttcagaccttcctacgaagactggtagggaaactgtttattgacccagaacagatacaggtgggactggtacagtatggggagagccctgtacatgagtggtccctgggagatttccgaacgaaggaagaagtggtgagagcagcaaagaacctcagtcggcgggagggacgagaaacaaagactgcccaagcaataatggtggcctgcacagaagggttcagtcagtcccatgggggccgacccgaggctgccaggctactggtggttgtcactgatggagagtcccatgatggagaggagcttcctgcagcactaaaggcctgtgaggctggaagagtgacacgctatgggattgcagtccttggtcactacctccggcggcagcgagatcccagctctttcctgagagaaattagaactattgccagtgatccagatgagcgattctttttcaatgtcacagatgaggctgctctgactgacattgtggatgcactaggagatcggatttttggccttgaagggtcccatgcagaaaacgaaagctcctttgggctggaaatgtctcagattggtttctccactcatcggctaaaggatgggattctttttgggatggtgggggcctatgactggggaggctctgtgctatggcttgaaggaggccaccgccttttccccccacgaatggcactggaagacgagttcccccctgcattgcagaaccatgcagcctacctgggttactctgtttcttccatgcttttgcggggtggacgccgcctgtttctctctggggctcctcgatttagacatcgaggaaaagtcatcgccttccagcttaagaaagatggggctgtgagggttgcccagagcctccagggggagcagattggttcatactttggcagtgagctctgcccattggatacagatagggatggaacaactgatgtcttacttgtggctgcccccatgttcctgggaccccagaacaaggaaacaggacgtgtttatgtgtatctggtaggccagcagtccttgctgaccctccaaggaacacttcagccagaacccccccaggatgctcggtttggctttgccatgggagctcttcctgatctgaaccaagatggttttgctgatgtggctgtgggggcgcctctggaagatgggcaccagggagcactgtacctgtaccatggaacccagagtggagtcaggccccatcctgcccagaggattgctgctgcctccatgccacatgccctcagctactttggccgaagtgtggatggtcggctagatctggatggagatgatctggtcgatgtggctgtgggtgcccagggggcagccatcctgctcagctcccggcccattgtccatctgaccccatcactggaggtgaccccacaggccatcagtgtggttcagagggactgtaggcggcgaggccaagaggcagtctgtctgactgcagccctttgcttccaagtgacctcccgtactcctggtcgctgggatcaccaattctacatgaggttcaccgcatcactggatgaatggactgctggggcacgtgcagcatttgatggctctggccagaggttgtcccctcggaggctccggctcagtgtggggaatgtcacttgtgagcagctacacttccatgtgctggatacatcagattacctccggccagtggccttgactgtgacctttgccttggacaatactacaaagccagggcctgtgctgaatgagggctcacccacctctatacaaaagctggtccccttctcaaaggattgtggccctgacaatgaatgtgtcacagacctggtgcttcaagtgaatatggacatcagaggctccaggaaggccccatttgtggttcgaggtggccggcggaaagtgctggtatctacaactctggagaacagaaaggaaaatgcttacaatacgagcctgagtctcatcttctctagaaacctccacctggccagtctcactcctcagagagagagcccaataaaggtggaatgtgccgccccttctgctcatgcccggctctgcagtgtggggcatcctgtcttccagactggagccaaggtgacctttctgctagagtttgagtttagctgctcctctctcctgagccaggtcttcgtgaagctgactgccagcagtgacagcctggagagaaatgggacccttcaagataacacagcccagacctcagcctacatccaatatgagccccacctcctgttctctagtgagtctaccctgcaccgctatgaggttcacccatatgggaccctcccagtgggtcctggcccagaattcaaaaccactctcagggttcagaacctaggctgctatgtggtcagtggcctcatcatctcagccctccttccagctgtggcccatgggggcaattacttcctatcactgtctcaagtcatcactaacaatgcaagctgcatagtgcagaacctgactgaacccccaggcccacctgtgcatccagaggagcttcaacacacaaacagactgaatgggagcaatactcagtgtcaggtggtgaggtgccaccttgggcagctggcaaaggggactgaggtctctgttggactattgaggctggttcacaatgaatttttccgaagagccaagttcaagtccctgacggtggtcagcacctttgagctgggaaccgaagagggcagtgtcctacagctgactgaagcctcccgttggagtgagagcctcttggaggtggttcagacccggcctatcctcatctccctgtggatcctcataggcagtgtcctgggagggttgctcctgcttgctctccttgtcttctgcctgtggaagcttggcttctttgcccataagaaaatccctgaggaagaaaaaagagaagagaagttggagcaatgaatgtagaataagggtctagaaagtcctccctggcagcttcttcaagagacttgcataaaagcagaggtttgggggctcagatgggacaagaagccgcctctggactatctccccagaccagcagcctgacttgacttttgagtcctagggatgctgctggctagagatgaggctttacctcagacaagaagagctggcaccaaaactagccatgctcccaccctctgcttccctcctcctcgtgatcctggttccatagcc

SEQ ID NO: 114876 - DNA, 3111 bp, Artificial Sequence
  derived and/or modified sequence
atgaacatcacccacgcctacagccagggccaccagaagctgaacctggacacagtgtcctacaacatgctgggcgtggacagtgatggctgccccacctacatggatgtggtgattgtgctggatggcagcaacagcatctacccctggagcgaggtgcagaccttcctgcggcggctggtgggcaagctgttcatcgaccctgagcagatccaggtgggcctggtgcagtacggggagagccctgtgcatgagtggagcctgggggacttccgcaccaaggaggaggtggtgcgggccgccaagaacctgagccggcgggagggccgggagaccaagacagcccaggccatcatggtggcctgcacagagggcttcagccagagccacggcggccggcctgaggccgcccggctgctggtggtggtgacagatggagagagccatgatggagaggagctgcctgctgccctgaaggcctgtgaggccggccgggtgaccaggtatggaattgctgtgctgggccactacctgcggcggcagagggaccccagcagcttcctgcgggagatccgcaccatcgccagtgaccctgatgagcgcttcttcttcaacgtgacagatgaggccgccctgacagacatcgtggatgccctgggggaccgcatcttcggcctggagggcagccatgctgaaaatgaaagcagctttggcctggagatgagccagatcggcttcagcacccaccggctgaaggatggcatcctgtttggcatggtgggcgcctatgactggggcggctctgtgctgtggctggagggcggccacaggctcttcccccccaggatggccctggaggatgagttccccccagccctgcagaaccacgccgcctacctgggctacagcgtgtcctccatgctgctgcggggcggcagaagactcttcctgagcggggccccccgcttccgccaccggggcaaggtgattgccttccagctgaagaaggatggagctgtgcgggtggcccagagcctgcagggcgagcagatcggcagctactttggaagtgagctgtgccccctggacacagacagagatggcaccacagatgtgctgctggtggccgcccccatgttcctgggcccccagaacaaggagaccggccgggtgtatgtgtacctggtgggccagcagagcctgctgaccctgcagggcaccctgcagcctgagcccccccaggatgcccgcttcggctttgccatgggcgccctgcctgacctgaaccaggacggctttgctgatgtggccgtgggcgcccccctggaggatggccaccagggcgccctgtacctgtaccacggcacccagagcggcgtgcggccccacccagcccagagaattgctgctgcctccatgcctcatgccctgagctacttcggccgctctgtggatggccgcctggacctggatggagatgacctggtggatgtggccgtgggcgcccagggcgccgccatcctgctgagcagccggcccatcgtgcacctgacccccagcctggaggtgaccccccaggccatctctgtggtgcagagggactgcagaagaagaggccaggaggccgtgtgcctgacagctgccctgtgcttccaggtgaccagcaggaccccaggccgctgggaccaccagttctacatgaggttcaccgccagcctggatgagtggacagctggggcccgggccgcctttgatggcagcggccagaggctgagcccccggcggctgcggctgtctgtgggcaatgtgacctgtgagcagctgcacttccacgtgctggacaccagtgactacctgcggcctgtggccctgactgtgacctttgccctggacaacaccaccaagccaggccctgtgctgaatgaaggcagccccaccagcatccagaagctggtgcccttcagcaaggactgtggccctgacaatgaatgtgtgacagacctggtgctgcaggtgaacatggacatccggggcagcaggaaggccccctttgtggtgcggggcggccgcaggaaggtgctggtgtccaccaccctggagaacagaaaagaaaatgcctacaacaccagcctgagcctcatcttcagcaggaacctgcacctggccagcctgaccccccagcgggagagccccatcaaggtggagtgtgccgcccccagcgcccacgcccggctgtgcagcgtgggccaccctgtgttccagacaggagccaaggtgaccttcctgctggagtttgagttcagctgcagcagcctgctgagccaggtgtttgtgaagctgacagccagcagtgacagcctggagagaaatggcaccctgcaggacaacacagcccagaccagcgcctacatccagtatgagccccacctgctcttcagcagcgagagcaccctgcacagatatgaggtgcacccctacggcaccctgcctgtgggccctggccctgagttcaagaccaccctgcgggtgcagaacctgggctgctacgtggtgtctggcctcatcatcagcgccctgctgcctgctgtggcccatggaggcaactacttcctgagcctgagccaggtgatcaccaacaatgccagctgcatcgtgcagaacctgacagagcccccaggcccccctgtgcaccctgaggagctgcagcacaccaaccggctgaatggcagcaacacccagtgccaggtggtgcgctgccacctgggccagctggccaagggcacagaggtgtctgtgggcctgctgcggctggtgcacaatgagttcttccggcgggccaagttcaagagcctgactgtggtgtccacctttgagctgggcacagaggagggctctgtgctgcagctgacagaggccagccgctggagcgagagcctgctggaggtggtgcagacccggcccatcctgatcagcctgtggatcctgattggctctgtgctgggcggcctgctgctgctggccctgctggtgttctgcctgtggaagctgggcttctttgcccacaagaagatccctgaggaggagaagcgggaggagaagctggagcagtag

SEQ ID NO: 114877 - DNA, 3111 bp, Artificial Sequence
  derived and/or modified sequence
atgaacatcacccacgcctacagccagggccaccagaagctgaacctggacacagttagctacaatatgctcggagtggattctgacggctgccctacctacatggacgtggtgatcgttctggatggttctaacagcatctatccttggtccgaggtccagacttttttgaggaggctagttgggaaactcttcattgaccccgaacagatccaagtgggcctggtgcaatacggcgagtcgcccgtgcacgaatggtctctgggcgattttcgaacgaaggaggaagtcgttagggccgccaagaacctgtctcgcagagaagggagggagacgaaaactgctcaggcgataatggttgcctgtactgaggggttctcccagagccacggcggtcgacccgaggccgctcgcttattggtggtcgtgaccgatggggaatcacatgatggcgaggagctgcctgcggcattgaaggcttgcgaagccgggagagtcacccgatatggcatcgctgtattaggacactatcttcgccgccaacgcgatccctcttctttcttgcgcgagatccggacaatcgctagcgatcccgatgagcggttcttttttaatgtgaccgatgaagctgctctcactgatatcgtagacgctttaggggaccgaatctttggccttgaaggcagccacgcagaaaacgaaagtagcttcggactggaaatgagccagattggcttctctactcatcgcctgaaggacggaatactttttggcatggtcggggcctacgattggggtggatccgtcttatggctggaaggtgggcatcgccttttccctccacggatggccctggaggacgaattccctcccgccttacaaaatcacgcagcgtacctagggtatagcgtgtcgtctatgctgctccgcggcggtagacgactgtttctgagcggagcacccagatttcgccacaggggaaaagtgatcgctttccaactgaagaaggacggggctgttagagtggcccaaagcctccagggcgaacagattggctcatacttcggatcagagctctgtccactggacacggatcgtgacgggacgacagatgtcctcttggtggccgcccccatgttccttggcccacaaaacaaggagacaggcagagtttatgtctacctagtgggacaacagtcgctgttgacactgcagggaacactccagcccgagccaccccaggatgccagattcggcttcgcaatgggcgccttacccgacctgaatcaggatgggtttgctgacgtagcagttggagctcctctcgaggacggccatcagggagctctgtatctctatcatggcacacagtcaggagttagaccacacccggcgcaacggattgccgccgccagtatgccccacgctctctcttacttcggtcgctccgtggacggacgccttgatctcgacggcgatgatctcgtggacgttgctgtgggggcccagggcgcagcaatcctactctcctcgcgacccattgtacacttgacaccctccttggaggtcactccccaggccataagtgtggttcagcgggattgcaggaggaggggacaggaagcagtatgtctgacagccgccctctgttttcaggttacttcccgtacccctgggagatgggaccaccagttctatatgaggttcactgccagtcttgatgagtggacagcaggtgctcgcgccgcttttgatggcagcgggcagagactgtccccccggcgtctgcggttgtcagtcggtaacgtaacttgtgagcagctgcactttcacgtgttggatacatcagattatctccggccagtggccctgacagttaccttcgctctggataatactacaaaaccgggacctgtccttaatgaaggttcccctacatcaattcagaagctagtgcccttcagcaaggattgtggccctgacaacgaatgtgtcacggatctggttctgcaggtgaacatggacatacgcggctctcgcaaggctccattcgtcgtgcgcggtgggaggaggaaggttctcgtgtcaacaaccttagagaatcgcaaggaaaacgcctacaacacgtctctgtcacttatcttcagcaggaacctgcatctggcctcactgactccacagcgcgaatcccccattaaagtggagtgtgcggctccttccgctcacgctaggctttgctccgtgggccatcccgtgtttcagacaggcgccaaagtcacattcctactggagttcgagttcagctgcagttctctcctgagtcaggtctttgtgaaattgactgcatctagcgactcactggagaggaacggaactctgcaggacaataccgctcagactagcgcctacatccagtatgaaccccacttgctcttcagctccgagtccacacttcacaggtacgaagtccatccatatgggacactccccgtaggtccgggcccagagtttaagacaaccctccgcgtgcagaacctgggatgctacgtggtgtcaggcctgattatttcggctcttttgcctgcagttgctcacggcggcaactattttctgtctctatctcaggttattactaataatgcaagctgcatcgtgcagaatctgaccgaacctcctggaccacccgttcatccagaggagctgcagcatacaaatcgcctcaatgggtctaacactcagtgccaggttgtgcggtgccacctaggccagctggccaagggtactgaagtctctgtagggctattacggctcgtccacaacgaattttttcgacgggccaagtttaagtcccttacggtggtgtcaacgttcgagctggggacggaggaagggtccgtcttacaactgaccgaggctagccggtggtctgaaagcctgctcgaggtggtgcagacacgccccatactcatctccctctggatcctgatcggctctgtgctgggggggttgctcctgctcgctcttctcgtcttctgcttatggaagctgggtttttttgcccataagaaaatcccagaggaggagaagcgtgaggagaaactggagcagtag

SEQ ID NO: 114878 - DNA, 3111 bp, Artificial Sequence
  derived and/or modified sequence
atgaatattacacatgcatacagtcagggacatcagaagctaaacctggacaccgtgtcatacaacatgctcggcgtagattcagatgggtgtccaacctacatggatgttgtcatcgtattggatggctccaacagcatctacccttggagcgaagtgcagacctttttaagaaggctcgtcggcaaactgtttatcgacccggagcagatccaggtgggattagtgcagtatggtgagtcgcccgtccatgagtggagccttggtgatttccgcacgaaagaggaggtggtgagggctgctaagaatctgagcaggcgggagggtcgggagacaaaaacagcgcaggctatcatggtcgcgtgtacggagggattctcacagtctcacggtggcagacccgaggcggcacggttgctcgtagtggtgaccgacggcgaaagccatgacggagaagaattgcccgctgccctgaaggcatgcgaggcaggacgcgtaaccagatacggcattgcagtacttggccactatctaaggagacagagagatccaagctcctttctgagagaaatacggaccatcgcatccgatccagatgagagattcttcttcaatgtcacagacgaagctgccttaactgacatcgtggacgctctgggagaccgaatattcggcctcgaggggagtcacgcagagaatgagtcatcatttggcctggagatgtcccagatcggattctccacacaccgcttaaaggatgggatactttttggtatggtcggcgcatacgactggggagggtctgtattgtggttggaaggtggacatagattgttccctccacgaatggctctggaggacgagtttcccccagctcttcaaaaccatgcagcttatctgggctattctgtgtcttccatgctgctgcgtggaggaagaagactgtttttgagcggcgcaccacgatttaggcaccgaggcaaggtcatcgcgtttcagctgaagaaggacggagcagtcagagttgctcaaagcctgcagggtgagcagattggctcctatttcggttccgaactctgccccttggatacagaccgcgatggcaccaccgacgtcctcttggtcgctgcccctatgtttctgggcccacagaataaggagacaggcagggtttacgtttatctcgtgggacaacagtccttgctgaccctgcaggggactctgcagcctgagccacctcaggacgccagatttggttttgctatgggagcactgcctgaccttaaccaggacggctttgccgatgtggccgtaggggctcccctcgaagacggccatcagggtgccctttacctgtaccatggtacccagtctggtgttaggccccatcccgctcagcggatagccgctgcctctatgccccatgctctgtcctactttggacggagcgtcgacgggagactcgatctcgacggagacgatctggttgatgtggccgtgggcgcacagggtgctgctattctgctgagcagtcgtccgatcgtacatctcacaccatctcttgaggtcacacctcaagctatctcggtggtccagcgggactgtagaagaagaggccaggaggccgtctgcctgacagcagccctgtgcttccaggtgacatcacggactcctgggcgatgggatcatcagttctatatgcggttcacagcttcgctggatgagtggactgcaggggcacgggctgcctttgatggctccggtcagaggctgtctccccgaaggctgcgcctgtccgtgggcaacgttacctgtgagcagctgcactttcatgtcctcgacacatccgactacctccgcccagtcgccctgactgtgacgttcgcactggacaataccactaaaccagggccagttctgaacgaaggttctcccaccagcatccagaagttggtgcctttctctaaagactgcgggccagacaacgaatgtgtgaccgatctggttctgcaggtgaacatggacatcagggggtcccgcaaggctcctttcgtggtaaggggcggtaggagaaaagtgctggtctctacaactcttgagaaccggaaggagaatgcgtacaatacaagcctgtctctcattttctccaggaatctgcaccttgccagtttgacaccgcaaagggagagccccattaaagtggagtgcgccgctcccagcgctcacgcgagactatgctcagtgggccacccagtgttccagactggggctaaagtgacatttctgctagaattcgagttcagctgctcaagcttattgagtcaagtttttgtcaagctgactgccagcagtgattccttggagagaaacgggactctgcaggataacacagcacagactagtgcctacatccagtatgaaccccacctcctgtttagctcagagtccactcttcataggtacgaagttcacccgtacggaaccttgccagtcggacccggacctgagtttaaaaccacactgcgggtgcagaacctcggttgttacgtggtctccggattgatcatctccgcgctgctgccagctgttgcccatggagggaattacttcctgtcgctaagccaggtaattacaaacaatgcttcatgcattgtgcagaacttgacggagcccccaggcccacctgtccatcccgaggaactccaacatacaaatagactgaacgggagcaatacccagtgtcaggtagtaagatgtcatctgggacagctggcaaagggcaccgaggtctctgttggacttctgcgactcgtgcataatgaattctttcgccgagctaagtttaaatccttgacggtggtaagtaccttcgagctcgggactgaggaagggtctgtgctccaactaaccgaagctagccgctggagcgagagccttctagaggtggtgcagacaaggcccatcctgatctccctgtggatcctcataggttctgttctgggcggattgcttctcctcgcgctgctagtgttctgtttatggaagctgggcttcttcgctcataagaaaattccggaggaagagaagcgcgaggaaaagctggaacagtag

SEQ ID NO: 114879 - protein, 1024 aa, Artificial Sequence
  derived and/or modified sequence
MELPFVTHLFLPLVFLTGCPTYMDVVIVLDGSNSIYPWSEVQTFLRRLVGKLFIDPEQIQVGLVQYGESPVHEWSLGDFRTKEEVVRAAKNLSRREGRETKTAQAIMVACTEGFSQSHGGRPEAARLLVVVTDGESHDGEELPAALKACEAGRVTRYGIAVLGHYLRRQRDPSSFLREIRTIASDPDERFFFNVTDEAALTDIVDALGDRIFGLEGSHAENESSFGLEMSQIGFSTHRLKDGILFGMVGAYDWGGSVLWLEGGHRLFPPRMALEDEFPPALQNHAAYLGYSVSSMLLRGGRRLFLSGAPRFRHRGKVIAFQLKKDGAVRVAQSLQGEQIGSYFGSELCPLDTDRDGTTDVLLVAAPMFLGPQNKETGRVYVYLVGQQSLLTLQGTLQPEPPQDARFGFAMGALPDLNQDGFADVAVGAPLEDGHQGALYLYHGTQSGVRPHPAQRIAAASMPHALSYFGRSVDGRLDLDGDDLVDVAVGAQGAAILLSSRPIVHLTPSLEVTPQAISVVQRDCRRRGQEAVCLTAALCFQVTSRTPGRWDHQFYMRFTASLDEWTAGARAAFDGSGQRLSPRRLRLSVGNVTCEQLHFHVLDTSDYLRPVALTVTFALDNTTKPGPVLNEGSPTSIQKLVPFSKDCGPDNECVTDLVLQVNMDIRGSRKAPFVVRGGRRKVLVSTTLENRKENAYNTSLSLIFSRNLHLASLTPQRESPIKVECAAPSAHARLCSVGHPVFQTGAKVTFLLEFEFSCSSLLSQVFVKLTASSDSLERNGTLQDNTAQTSAYIQYEPHLLFSSESTLHRYEVHPYGTLPVGPGPEFKTTLRVQNLGCYVVSGLIISALLPAVAHGGNYFLSLSQVITNNASCIVQNLTEPPGPPVHPEELQHTNRLNGSNTQCQVVRCHLGQLAKGTEVSVGLLRLVHNEFFRRAKFKSLTVVSTFELGTEEGSVLQLTEASRWSESLLEVVQTRPILISLWILIGSVLGGLLLLALLVFCLWKLGFFAHKKIPEEEKREEKLEQ

SEQ ID NO: 114880 - DNA, 3075 bp, Artificial Sequence
  derived and/or modified sequence
atggagctgcccttcgtgacccacctgttcctgcccctggtgttcctgaccggctgccccacctacatggacgtggtgatcgtgctggacggcagcaacagcatctacccctggagcgaggtgcagaccttcctgagaagactggtgggcaagctgttcatcgaccccgagcagatccaggtgggcctggtgcagtacggcgagagccccgtgcacgagtggagcctgggcgacttcagaaccaaggaggaggtggtgagagccgccaagaacctgagcagaagagagggcagagagaccaagaccgcccaggccatcatggtggcctgcaccgagggcttcagccagagccacggcggcagacccgaggccgccagactgctggtggtggtgaccgacggcgagagccacgacggcgaggagctgcccgccgccctgaaggcctgcgaggccggcagagtgaccagatacggcatcgccgtgctgggccactacctgagaagacagagagaccccagcagcttcctgagagagatcagaaccatcgccagcgaccccgacgagagattcttcttcaacgtgaccgacgaggccgccctgaccgacatcgtggacgccctgggcgacagaatcttcggcctggagggcagccacgccgagaacgagagcagcttcggcctggagatgagccagatcggcttcagcacccacagactgaaggacggcatcctgttcggcatggtgggcgcctacgactggggcggcagcgtgctgtggctggagggcggccacagactgttcccccccagaatggccctggaggacgagttcccccccgccctgcagaaccacgccgcctacctgggctacagcgtgagcagcatgctgctgagaggcggcagaagactgttcctgagcggcgcccccagattcagacacagaggcaaggtgatcgccttccagctgaagaaggacggcgccgtgagagtggcccagagcctgcagggcgagcagatcggcagctacttcggcagcgagctgtgccccctggacaccgacagagacggcaccaccgacgtgctgctggtggccgcccccatgttcctgggcccccagaacaaggagaccggcagagtgtacgtgtacctggtgggccagcagagcctgctgaccctgcagggcaccctgcagcccgagcccccccaggacgccagattcggcttcgccatgggcgccctgcccgacctgaaccaggacggcttcgccgacgtggccgtgggcgcccccctggaggacggccaccagggcgccctgtacctgtaccacggcacccagagcggcgtgagaccccaccccgcccagagaatcgccgccgccagcatgccccacgccctgagctacttcggcagaagcgtggacggcagactggacctggacggcgacgacctggtggacgtggccgtgggcgcccagggcgccgccatcctgctgagcagcagacccatcgtgcacctgacccccagcctggaggtgaccccccaggccatcagcgtggtgcagagagactgcagaagaagaggccaggaggccgtgtgcctgaccgccgccctgtgcttccaggtgaccagcagaacccccggcagatgggaccaccagttctacatgagattcaccgccagcctggacgagtggaccgccggcgccagagccgccttcgacggcagcggccagagactgagccccagaagactgagactgagcgtgggcaacgtgacctgcgagcagctgcacttccacgtgctggacaccagcgactacctgagacccgtggccctgaccgtgaccttcgccctggacaacaccaccaagcccggccccgtgctgaacgagggcagccccaccagcatccagaagctggtgcccttcagcaaggactgcggccccgacaacgagtgcgtgaccgacctggtgctgcaggtgaacatggacatcagaggcagcagaaaggcccccttcgtggtgagaggcggcagaagaaaggtgctggtgagcaccaccctggagaacagaaaggagaacgcctacaacaccagcctgagcctgatcttcagcagaaacctgcacctggccagcctgaccccccagagagagagccccatcaaggtggagtgcgccgcccccagcgcccacgccagactgtgcagcgtgggccaccccgtgttccagaccggcgccaaggtgaccttcctgctggagttcgagttcagctgcagcagcctgctgagccaggtgttcgtgaagctgaccgccagcagcgacagcctggagagaaacggcaccctgcaggacaacaccgcccagaccagcgcctacatccagtacgagccccacctgctgttcagcagcgagagcaccctgcacagatacgaggtgcacccctacggcaccctgcccgtgggccccggccccgagttcaagaccaccctgagagtgcagaacctgggctgctacgtggtgagcggcctgatcatcagcgccctgctgcccgccgtggcccacggcggcaactacttcctgagcctgagccaggtgatcaccaacaacgccagctgcatcgtgcagaacctgaccgagccccccggcccccccgtgcaccccgaggagctgcagcacaccaacagactgaacggcagcaacacccagtgccaggtggtgagatgccacctgggccagctggccaagggcaccgaggtgagcgtgggcctgctgagactggtgcacaacgagttcttcagaagagccaagttcaagagcctgaccgtggtgagcaccttcgagctgggcaccgaggagggcagcgtgctgcagctgaccgaggccagcagatggagcgagagcctgctggaggtggtgcagaccagacccatcctgatcagcctgtggatcctgatcggcagcgtgctgggcggcctgctgctgctggccctgctggtgttctgcctgtggaagctgggcttcttcgcccacaagaagatccccgaggaggagaagagagaggagaagctggagcagtag

SEQ ID NO: 114881 - DNA, 3075 bp, Artificial Sequence
  derived and/or modified sequence
atggaactgccctttgtgacacatctgttcctacctttggtgttcctgacaggctgtccaacctatatggatgtggtgatagtgcttgatggcagcaattccatttacccttggagtgaagttcagacctttctccgaaggctggtgggcaaattgtttatcgacccagaacagatacaggtcggcttggtgcagtacggggaatcacccgtacacgagtggagtttaggggactttaggacaaaggaggaagtcgtccgcgccgcaaagaaccttagtcggagggaggggagagagacaaaaacagctcaggccataatggtggcttgcaccgaaggcttctctcagagtcacgggggccgcccagaagcagcccgtttgctcgtggttgttactgatggcgagagtcacgatggggaggagctgcccgcagccctgaaggcatgtgaggccggtagggtgacgagatacggcattgcagtcctgggacactacctgagacggcagagagaccctagctcattcttgcgcgagattcggaccatcgcgagtgaccccgacgagaggttctttttcaacgtaacagatgaggccgcgctcaccgatattgtcgacgctttaggcgatcgcatattcgggttggagggcagccacgcagaaaacgaaagcagttttggcttagagatgagccagattggcttctcaactcataggctgaaggatggcatcctctttggcatggtgggagcctacgactggggggggagcgtgttgtggcttgaaggcggccatagactgtttcctccaagaatggctctggaagacgagttccctcctgcgctgcagaaccacgcagcgtacctgggctatagcgtgtcttccatgcttctccgcggcgggcggagactctttctgagtggcgcacccagatttagacatagaggaaaagtgatagcattccaactgaagaaagacggggccgtccgcgttgcacagtcattacaaggcgagcagatcgggagctattttggctcggaactttgccccctggacaccgacagggacggcaccacagacgttctgttggtcgcagctcctatgtttttagggccccagaacaaggagaccggacgtgtgtacgtgtatctggtgggccaacaatcactgctgaccttgcagggcactcttcagccagaaccgccacaagacgcacgtttcgggtttgctatgggagctctgcctgatctcaaccaggatgggttcgcagatgtggccgtgggcgccccactcgaggatggacatcagggcgccctgtacttataccacggcacacaatcaggggtgaggccacatccagctcagcgtatcgccgcggcctctatgcctcacgcactatcttatttcggccgatcagtagatggccgcctggatttggacggagatgatctcgtggatgtggctgtcggtgcacaaggcgctgcaatattgctctccagcaggcccattgtacacctcacaccatcactcgaagtcactcctcaggccatctccgtagttcaacgcgactgtcggagaaggggtcaggaagcagtgtgtctgacggctgccctttgttttcaagtcacctcccgaacacccggcaggtgggatcatcagttctacatgcgtttcacagcctcactggacgaatggaccgcgggggcccgggccgccttcgacggctccggtcagcgcttgtccccccgccggctcagactctccgtcggcaacgtgacttgcgaacagttgcactttcatgtgctcgacactagtgattatctaaggcctgttgcccttaccgtgacattcgctttggataataccaccaaacccgggccagtgttgaacgaaggctctccgacatccatccaaaagctggttccttttagtaaagactgtgggccagacaacgagtgcgtgactgatctggtgctgcaagtcaacatggacatccggggctcccgtaaggctcccttcgttgtcaggggagggcggaggaaggtgctcgtctctacgactctggagaatcgaaaagaaaatgcctataataccagccttagtcttatattttcgcggaacctccacctcgcaagtcttacgccacagcgtgaaagccccatcaaggtggaatgtgctgcccctagcgcacatgctaggttgtgctctgtcggacatcccgtctttcaaaccggagccaaagtgacttttcttctcgaatttgagttctcttgctcctctctgctgtcacaggtgtttgtgaaactgacggcatccagtgacagccttgagcgaaacggcaccctacaggacaataccgctcagacctcagcctacatccaatatgaaccacacctgctgttcagtagtgaaagtactctacaccgctacgaagtccacccctatggtaccttaccagtgggcccaggcccggagttcaagactactcttagagtgcagaatcttggatgttacgtggtctccggcctgatcattagcgccttattgccagcagttgcacacggggggaattattttctatctttgagtcaggtgattacgaacaacgcatcatgtatcgtgcagaatctgaccgagccaccaggaccgcctgttcacccggaggaactgcaacacactaacaggctgaacgggtccaatacccagtgtcaggttgttaggtgtcacttgggacagctagcaaaggggaccgaagtttcagtgggcttattgcggctggttcacaacgagttctttagaagggccaagttcaagagcctgaccgtggtctcgaccttcgagctgggcacagaggaaggatccgtgctgcagttgaccgaggcctcaagatggagcgagtcccttctagaagtggtccagaccagaccaatcctcatttcactatggatcctgattggtagcgtgctcggggggctcctgctcctggccctccttgtcttttgtctgtggaaacttggattctttgcccacaagaaaatcccggaagaggagaaacgcgaagaaaagcttgagcagtag

SEQ ID NO: 114882 - DNA, 3380 bp, Artificial Sequence
  derived and/or modified sequence
gagggacagaggccagaggacttctcatactggacagaaaccgatcaggcatggaactccccttcgtcactcacctgttcttgcccctggtgttcctgacaggctgcccaacatacatggatgttgtcattgtcttggatggctccaacagcatctacccctggtctgaagttcagaccttcctacgaagactggtagggaaactgtttattgacccagaacagatacaggtgggactggtacagtatggggagagccctgtacatgagtggtccctgggagatttccgaacgaaggaagaagtggtgagagcagcaaagaacctcagtcggcgggagggacgagaaacaaagactgcccaagcaataatggtggcctgcacagaagggttcagtcagtcccatgggggccgacccgaggctgccaggctactggtggttgtcactgatggagagtcccatgatggagaggagcttcctgcagcactaaaggcctgtgaggctggaagagtgacacgctatgggattgcagtccttggtcactacctccggcggcagcgagatcccagctctttcctgagagaaattagaactattgccagtgatccagatgagcgattctttttcaatgtcacagatgaggctgctctgactgacattgtggatgcactaggagatcggatttttggccttgaagggtcccatgcagaaaacgaaagctcctttgggctggaaatgtctcagattggtttctccactcatcggctaaaggatgggattctttttgggatggtgggggcctatgactggggaggctctgtgctatggcttgaaggaggccaccgccttttccccccacgaatggcactggaagacgagttcccccctgcattgcagaaccatgcagcctacctgggttactctgtttcttccatgcttttgcggggtggacgccgcctgtttctctctggggctcctcgatttagacatcgaggaaaagtcatcgccttccagcttaagaaagatggggctgtgagggttgcccagagcctccagggggagcagattggttcatactttggcagtgagctctgcccattggatacagatagggatggaacaactgatgtcttacttgtggctgcccccatgttcctgggaccccagaacaaggaaacaggacgtgtttatgtgtatctggtaggccagcagtccttgctgaccctccaaggaacacttcagccagaacccccccaggatgctcggtttggctttgccatgggagctcttcctgatctgaaccaagatggttttgctgatgtggctgtgggggcgcctctggaagatgggcaccagggagcactgtacctgtaccatggaacccagagtggagtcaggccccatcctgcccagaggattgctgctgcctccatgccacatgccctcagctactttggccgaagtgtggatggtcggctagatctggatggagatgatctggtcgatgtggctgtgggtgcccagggggcagccatcctgctcagctcccggcccattgtccatctgaccccatcactggaggtgaccccacaggccatcagtgtggttcagagggactgtaggcggcgaggccaagaggcagtctgtctgactgcagccctttgcttccaagtgacctcccgtactcctggtcgctgggatcaccaattctacatgaggttcaccgcatcactggatgaatggactgctggggcacgtgcagcatttgatggctctggccagaggttgtcccctcggaggctccggctcagtgtggggaatgtcacttgtgagcagctacacttccatgtgctggatacatcagattacctccggccagtggccttgactgtgacctttgccttggacaatactacaaagccagggcctgtgctgaatgagggctcacccacctctatacaaaagctggtccccttctcaaaggattgtggccctgacaatgaatgtgtcacagacctggtgcttcaagtgaatatggacatcagaggctccaggaaggccccatttgtggttcgaggtggccggcggaaagtgctggtatctacaactctggagaacagaaaggaaaatgcttacaatacgagcctgagtctcatcttctctagaaacctccacctggccagtctcactcctcagagagagagcccaataaaggtggaatgtgccgccccttctgctcatgcccggctctgcagtgtggggcatcctgtcttccagactggagccaaggtgacctttctgctagagtttgagtttagctgctcctctctcctgagccaggtcttcgtgaagctgactgccagcagtgacagcctggagagaaatgggacccttcaagataacacagcccagacctcagcctacatccaatatgagccccacctcctgttctctagtgagtctaccctgcaccgctatgaggttcacccatatgggaccctcccagtgggtcctggcccagaattcaaaaccactctcagggttcagaacctaggctgctatgtggtcagtggcctcatcatctcagccctccttccagctgtggcccatgggggcaattacttcctatcactgtctcaagtcatcactaacaatgcaagctgcatagtgcagaacctgactgaacccccaggcccacctgtgcatccagaggagcttcaacacacaaacagactgaatgggagcaatactcagtgtcaggtggtgaggtgccaccttgggcagctggcaaaggggactgaggtctctgttggactattgaggctggttcacaatgaatttttccgaagagccaagttcaagtccctgacggtggtcagcacctttgagctgggaaccgaagagggcagtgtcctacagctgactgaagcctcccgttggagtgagagcctcttggaggtggttcagacccggcctatcctcatctccctgtggatcctcataggcagtgtcctgggagggttgctcctgcttgctctccttgtcttctgcctgtggaagcttggcttctttgcccataagaaaatccctgaggaagaaaaaagagaagagaagttggagcaatgaatgtagaataagggtctagaaagtcctccctggcagcttcttcaagagacttgcataaaagcagaggtttgggggctcagatgggacaagaagccgcctctggactatctccccagaccagcagcctgacttgacttttgagtcctagggatgctgctggctagagatgaggctttacctcagacaagaagagctggcaccaaaactagccatgctcccaccctctgcttccctcctcctcgtgatcctggttcc

SEQ ID NO: 114883 - DNA, 3075 bp, Artificial Sequence
  derived and/or modified sequence
atggagctgccctttgtgacccacctgttcctgcccctggtgttcctgaccggctgccccacctacatggatgtggtgattgtgctggatggcagcaacagcatctacccctggagcgaggtgcagaccttcctgcggcggctggtgggcaagctgttcatcgaccctgagcagatccaggtgggcctggtgcagtacggggagagccctgtgcatgagtggagcctgggggacttccgcaccaaggaggaggtggtgcgggccgccaagaacctgagccggcgggagggccgggagaccaagacagcccaggccatcatggtggcctgcacagagggcttcagccagagccacggcggccggcctgaggccgcccggctgctggtggtggtgacagatggagagagccatgatggagaggagctgcctgctgccctgaaggcctgtgaggccggccgggtgaccaggtatggaattgctgtgctgggccactacctgcggcggcagagggaccccagcagcttcctgcgggagatccgcaccatcgccagtgaccctgatgagcgcttcttcttcaacgtgacagatgaggccgccctgacagacatcgtggatgccctgggggaccgcatcttcggcctggagggcagccatgctgaaaatgaaagcagctttggcctggagatgagccagatcggcttcagcacccaccggctgaaggatggcatcctgtttggcatggtgggcgcctatgactggggcggctctgtgctgtggctggagggcggccacaggctcttcccccccaggatggccctggaggatgagttccccccagccctgcagaaccacgccgcctacctgggctacagcgtgtcctccatgctgctgcggggcggcagaagactcttcctgagcggggccccccgcttccgccaccggggcaaggtgattgccttccagctgaagaaggatggagctgtgcgggtggcccagagcctgcagggcgagcagatcggcagctactttggaagtgagctgtgccccctggacacagacagagatggcaccacagatgtgctgctggtggccgcccccatgttcctgggcccccagaacaaggagaccggccgggtgtatgtgtacctggtgggccagcagagcctgctgaccctgcagggcaccctgcagcctgagcccccccaggatgcccgcttcggctttgccatgggcgccctgcctgacctgaaccaggacggctttgctgatgtggccgtgggcgcccccctggaggatggccaccagggcgccctgtacctgtaccacggcacccagagcggcgtgcggccccacccagcccagagaattgctgctgcctccatgcctcatgccctgagctacttcggccgctctgtggatggccgcctggacctggatggagatgacctggtggatgtggccgtgggcgcccagggcgccgccatcctgctgagcagccggcccatcgtgcacctgacccccagcctggaggtgaccccccaggccatctctgtggtgcagagggactgcagaagaagaggccaggaggccgtgtgcctgacagctgccctgtgcttccaggtgaccagcaggaccccaggccgctgggaccaccagttctacatgaggttcaccgccagcctggatgagtggacagctggggcccgggccgcctttgatggcagcggccagaggctgagcccccggcggctgcggctgtctgtgggcaatgtgacctgtgagcagctgcacttccacgtgctggacaccagtgactacctgcggcctgtggccctgactgtgacctttgccctggacaacaccaccaagccaggccctgtgctgaatgaaggcagccccaccagcatccagaagctggtgcccttcagcaaggactgtggccctgacaatgaatgtgtgacagacctggtgctgcaggtgaacatggacatccggggcagcaggaaggccccctttgtggtgcggggcggccgcaggaaggtgctggtgtccaccaccctggagaacagaaaagaaaatgcctacaacaccagcctgagcctcatcttcagcaggaacctgcacctggccagcctgaccccccagcgggagagccccatcaaggtggagtgtgccgcccccagcgcccacgcccggctgtgcagcgtgggccaccctgtgttccagacaggagccaaggtgaccttcctgctggagtttgagttcagctgcagcagcctgctgagccaggtgtttgtgaagctgacagccagcagtgacagcctggagagaaatggcaccctgcaggacaacacagcccagaccagcgcctacatccagtatgagccccacctgctcttcagcagcgagagcaccctgcacagatatgaggtgcacccctacggcaccctgcctgtgggccctggccctgagttcaagaccaccctgcgggtgcagaacctgggctgctacgtggtgtctggcctcatcatcagcgccctgctgcctgctgtggcccatggaggcaactacttcctgagcctgagccaggtgatcaccaacaatgccagctgcatcgtgcagaacctgacagagcccccaggcccccctgtgcaccctgaggagctgcagcacaccaaccggctgaatggcagcaacacccagtgccaggtggtgcgctgccacctgggccagctggccaagggcacagaggtgtctgtgggcctgctgcggctggtgcacaatgagttcttccggcgggccaagttcaagagcctgactgtggtgtccacctttgagctgggcacagaggagggctctgtgctgcagctgacagaggccagccgctggagcgagagcctgctggaggtggtgcagacccggcccatcctgatcagcctgtggatcctgattggctctgtgctgggcggcctgctgctgctggccctgctggtgttctgcctgtggaagctgggcttctttgcccacaagaagatccctgaggaggagaagcgggaggagaagctggagcagtag

SEQ ID NO: 114884 - DNA, 3075 bp, Artificial Sequence
  derived and/or modified sequence
atggagctgcccttcgtgacccacctgttcctgcccctggtgttcttaactggctgccctacttacatggatgttgtcattgtcctggacggttccaattcaatttatccgtggtcggaagtccagacgttccttcgcagactggtgggaaagctttttattgacccagagcagatacaggtcggcctcgttcagtacggagagagtcccgttcatgagtggtctctgggagacttcagaacaaaagaagaggtggtccgggcagcaaagaatctttctagaagggagggtcgggagactaagactgctcaggcgataatggtcgcctgtaccgaaggtttctcacagtcgcacggaggccgacctgaagctgcccggctcctggtggtcgtgacagacggtgagtcacacgatggtgaggagcttcctgctgctctgaaggcttgcgaagccggcagagtgacgcgctacgggatcgccgtgctgggacactacctccgaaggcagagggaccctagctcttttctgagggagataaggactatagccagtgacccagatgaacggttttttttcaacgttactgatgaagcagctctcactgacattgtggatgctctgggcgacagaatttttgggttagagggcagtcacgcagagaacgagtccagctttggattagaaatgagtcagattggattctctactcatagattgaaggacgggattttgtttggcatggtgggagcttatgactggggagggtcagtcctgtggctcgaaggggggcaccgcttgtttccccctcgcatggcgcttgaggatgagttcccgcctgcactacagaaccatgctgcgtacctcggatattccgtgtctagtatgcttttacgcggaggccgccggttgtttctctccggagcaccacggttccgacatcgaggcaaggtgatcgcctttcagctaaagaaagatggcgccgtccgggtggcacaaagcctgcagggtgaacagatcggctcttactttggctccgaactttgccccctggacactgaccgtgacgggaccacagacgtcctgctggtggcagcccccatgtttctcggacctcagaacaaggagaccggacgggtctatgtgtacctagtggggcagcagtcactgctgactctccagggcactctacagcccgagcccccgcaggatgcaaggtttgggttcgcgatgggcgcgcttccagacttgaatcaagacggctttgctgatgtcgcagtaggcgcccccttagaggacgggcatcaaggggccctctatttgtaccatggcactcagtcaggagttcggccccacccagcgcagcggatcgctgcagcatctatgccccatgcgctctcatactttgggcgttctgtcgatggacggctggatttggatggggatgatttggtcgatgtggctgtcggggctcagggcgctgcgatcctgctgtcttcccgtcctattgtgcatctgacgccatctctggaagtgactccgcaggccatcagtgtggtgcaaagagattgtagacgacggggacaggaagccgtctgcctgaccgcagctctgtgtttccaagtaacttcacggactccaggccgctgggatcatcaattttacatgagatttactgcatctctggacgaatggacagccggcgcccgagctgcttttgacggtagtgggcagcgcctcagcccccgacgcctgcggctgagcgtcggcaatgtaacatgtgaacagttgcattttcatgtgttagacactagcgactacctaaggccagttgctctcacagtcaccttcgcgctggacaacacaaccaaaccaggaccagtcctgaatgaggggtcgccgaccagcattcagaagctcgtgcctttttcgaaggattgtggacctgataatgagtgcgttaccgatctggttctgcaagtgaacatggatatacgaggcagcagaaaagcccctttcgtggtcagaggaggaagaaggaaggtcctggttagcaccaccctggagaacagaaaagaaaacgcatataacacaagtctcagcttgattttcagtaggaacctacatctggctagtttaacaccacaaagagagtcaccaatcaaagtggaatgtgccgcaccaagtgcacacgccaggctgtgttcggtgggccatcctgtgttccagacaggcgccaaggtgacgttcctgctggaattcgaattcagttgcagctcactgctgtcccaggtgttcgtcaagctaactgcatcttccgattcactcgagcgcaatggaacactgcaagataatactgcacagacaagcgcctacattcaatacgagccccatctgctgttttcaagtgagtctacccttcaccgctacgaggtgcacccatatgggacactgccggttggtcccgggccagagtttaagacgacactgagggtccagaatctgggctgttacgtcgtatctgggttgatcatcagtgccttactacctgcggtcgcgcacggcggcaactactttctgtcactgtcccaggtcattacaaacaatgccagttgcattgtgcagaaccttacggaacctcccggccccccagtgcacccggaggagctccagcatacaaatcggctgaatgggtcaaatacccaatgccaggtggtgagatgccatctggggcagcttgcaaaagggactgaggtgtcggttggtctgttgcgtcttgtgcataacgaattctttcggcgggctaagtttaaaagtctgactgtggtgagcaccttcgagctggggacggaagagggttcggtgctacaattgacagaggcctcccgctggtccgagagcttgctcgaggtagtgcaaacccggcctattctgattagtctttggattctcatcgggtctgtactggggggtctcctgctgctagccctcctcgtgttctgtctctggaagctgggtttcttcgcccacaagaagatccccgaagaagaaaagagagaggagaaattggaacagtag

SEQ ID NO: 114885 - DNA, 3075 bp, Artificial Sequence
  derived and/or modified sequence
atggagttgccttttgtcacacacctgttcctgccactcgtgttcctgacagggtgccctacttacatggacgtcgtaatagtgcttgatggatcaaatagtatctatccatggagcgaggtccaaaccttcttgcgccgactagtgggaaagctcttcatagatccggagcagatacaggtgggactagttcaatacggggagtcacctgtgcacgaatggtccctgggggactttcgaactaaggaagaagttgttcgagccgcaaagaacctgagcagaagggagggacgcgagactaaaacagcccaggccattatggtcgcatgtacggaggggttcagccagagccacggcggacggccagaggctgctcgtctgctcgtagtagtgaccgatggtgaatcccatgatggcgaggaattaccagcggcactgaaagcgtgcgaagcaggtcgggtcaccaggtatggaatcgcagtgttaggacactacctgcggagacagagagaccccagctcattcctccgggagattagaaccatagcctctgatcctgatgagcggttcttctttaatgttactgacgaggccgcactcactgatatcgtggacgccctgggggaccgcattttcggcctcgaaggcagccacgcagagaatgaaagcagctttgggctggaaatgagccagataggatttagtacacacagacttaaagatggcatcttgtttgggatggttggggcatacgattgggggggttccgtcttgtggctcgagggcggtcatagactgtttcctccaaggatggctttagaagacgagttcccgcctgccctgcagaatcacgcggcatacttaggctattcagtctcctccatgctgctgcgaggagggagaaggttgtttctctccggcgctcccaggtttcggcaccgtggaaaggtgattgcctttcagctaaagaaagatggcgctgtacgtgtcgcgcaatctctgcaaggagagcaaatcgggagctatttcgggtccgagttatgtcctctagacacagatcgcgacggcaccacggatgttctgctcgtggctgcccctatgttcctgggccctcagaacaaggagaccggcagagtgtacgtgtacttggtcggccagcagtcactgttgaccctccagggcaccctgcaaccggagccaccacaagatgccaggttcggcttcgccatgggggctctgccagacctgaaccaggacggattcgcagatgtagctgtgggcgcaccgttggaggatggccatcaaggcgctctgtatctgtaccatggcactcagtctggcgttcgtccccatcctgctcagcggatcgccgctgcttccatgccacatgcactcagctactttggccgatcggtggacggcaggttggatctggacggcgatgatttggtggatgtggccgtgggcgcacagggcgctgcaatactcctgagtagtcggcctattgtgcacctgacccctagcctggaagtcacaccacaagcaatctccgtagttcaacgagactgcaggagaaggggacaggaggctgtgtgtctgacagctgcactgtgttttcaagtaacgtctaggaccccaggacggtgggatcaccagttctatatgaggttcacagcctccctggatgagtggactgcaggcgcacgagcagcgtttgacggctccgggcagcggttaagccctaggcgcctgagactgtccgttggtaacgtgacttgtgaacagctgcatttccacgtgctggacacctccgactacctgcgccctgtggccctgaccgtgactttcgcacttgacaatactactaagcctggccctgtgttgaacgagggctccccaacctccatacagaagctggtgccattttcaaaagactgtgggccagataatgagtgcgtgacagacctcgtgctccaggtgaatatggatataagggggagccggaaagcgccatttgtagtccggggtgggagacgcaaagttctcgtctctacaactctcgaaaatcgtaaagagaacgcctacaacacaagcctttccctgatctttagccgaaatctccacctagcatcattgacgcctcagagagaatcaccgataaaggttgagtgtgcagctcccagtgcacatgccaggctatgcagcgtagggcaccccgtgttccagaccggggctaaggtgaccttcctgctcgaattcgagttcagttgttcctcccttctctctcaggtattcgtaaaactgacagcatcctcagactccctcgagcgcaatgggacattgcaggacaacacagcgcagacctcggcttacattcaatatgagcctcacctactttttagcagtgaatcaactctccataggtatgaagttcacccctacgggaccctccccgtgggccctggcccagagtttaagactaccctcagagtccagaacctgggctgttatgtggttagcggcctgatcatatctgccttgctccctgctgttgcgcatgggggtaattacttcttgtcactgtcacaagtgatcacgaataatgcctcatgcatagtgcagaatctgacagagcctcccggaccgccagtgcaccctgaagaactgcagcacacaaatagactcaacgggtcaaacacacaatgtcaagttgtaaggtgccatctggggcagctggccaagggtacagaagtaagcgttggcctcctgcgcctggtgcataacgaattttttagacgggcaaagttcaagagtctgaccgttgtgtccacctttgaactgggtacagaagaagggagcgtgctccagctaaccgaagcttctcgctggtctgagagcttattggaagtagttcagactcggccaatcttgatttccctgtggatcctcatcggttcagtcctcggtggtctcctgttgttagcgctacttgtgttttgcctgtggaaattaggtttttttgcacacaagaaaatccccgaggaagagaagcgggaagagaagctggaacagtag

SEQ ID NO: 114886 - protein, 395 aa, Artificial Sequence
  derived and/or modified sequence
MSGGKKKSSFQITSVTTDYEGPGSPGASDPPTPQPPTGPPPRLPNGEPSPDPGGKGTPRNGSPPPGAPSSRFRVVKLPHGLGEPYRRGRWTCVDVYERDLEPHSFGGLLEGIRGASGGAGGRSLDSRLELASLGLGAPTPPSGLSQGPTSWLRPPPTSPGPQARSFTGGLGQLVVPSKAKAEKPPLSASSPQQRPPEPETGESAGTSRAATPLPSLRVEAEAGGSGARTPPLSRRKAVDMRLRMELGAPEEMGQVPPLDSRPSSPALYFTHDASLVHKSPDPFGAVAAQKFSLAHSMLAISGHLDSDDDSGSGSLVGIDNKIEQAMDLVKSHLMFAVREEVEVLKEQIRELAERNAALEQENGLLRALASPEQLAQLPSSGVPRLGPPAPNGPSV

SEQ ID NO: 114887 - DNA, 1990 bp, Artificial Sequence
  derived and/or modified sequence
aaggaacggacagcccgacctcttaggcgccgggaccctcaggctcagatcagtggccgaaggccccagagtttgcaaactcagctctggagttcagcagcaacagcagcaggaaaaacctgcccctgctcccccctcccgccacctcccctctcctcttctcccctcacccagcaggcacccccggttcccgccaggccctcctgccatgtcggacccagacgtccccaggggctcggatgtccccgccatgtggcccccttgttccaggggtgcctgagccccttcaaggagccccaacccacccccaaccttggcccagccctgagccccagggaccatgagcgggggcaagaagaagagtagtttccaaatcaccagcgtcaccacggactatgagggccctgggagcccaggggcttcggatccccctaccccacagcccccaaccgggcccccgccccgcctgcccaatggggagcccagccccgatccggggggcaagggcaccccccggaatggctccccaccacctggggccccttcctcccgtttccgggtggtgaagctgccccacggcctgggagagccttatcgccgcggtcgctggacgtgtgtggatgtttatgagcgagacctggagccccacagcttcggcggactcctggagggaattcgaggggcctcagggggcgccgggggcagatctttggattccaggttggagctggccagcctcggcctgggcgcccccaccccaccgtcaggcctgtctcagggccccacctcctggctccgtccaccccccacctctcctggacctcaggcccgctccttcactgggggactgggccagctggtggtgcccagcaaagccaaggcagagaaacccccactgtcggcctcctcaccccagcagcgccccccagagcctgagaccggtgagagtgcgggcacatcccgggctgccacgcccctgccctctctgagggtggaagcggaggctgggggctcaggggccaggacccctccactgtcccggaggaaagctgtagacatgcggctgcggatggagttgggtgctccagaagagatggggcaggtgcccccacttgactctcgccccagctccccagccctctacttcacccacgatgccagcctggttcacaaatctccagaccccttcggagcagtagcagctcagaagttcagcctggcccactccatgttggccatcagtggtcacctagacagcgacgatgatagtggctccggaagcctggttggcattgacaacaaaatcgagcaagccatggacttggtgaagtcccacctcatgtttgcggtccgggaggaggtggaggtgctgaaggagcagatccgggaattggcggagcggaaacgtgcgctggagcaggagaatgggctgctgcgcgccctggccagcccggagcagctggctcagctgccctcctcgggggtcccacggcttgggccccctgcgcccaatgggccctccgtctgagcctcccttcccttacaatgtgcctttggggctgcccggccttgcgtcagccgcctgccccctcttcctatgcagctttaatgtccccgtgtccccggggtgggagttcaaggctcagtaatggcctggtcccccggcccctgccccatctcctcatcatccccagccttgatggaggagggagggcttcaggacggggcgtcagagggagccccctctgggagggaaccaacccccaccctccctcctgggaccccccagcagtagacggcttgggggagtcggaggctccccggcagacaccccacccccatcttgttcccttgaggtgcctcctctcctctgcccaggggagggagtgtggacagtatctggaagttctgggattcaggttgttattaaaataataataataattaaaaactctgaagaaacttgaaaaaaaaaaaaaaaaaaaaaaaa

SEQ ID NO: 114888 - DNA, 1188 bp, Artificial Sequence
  derived and/or modified sequence
atgagcggcggcaagaagaagagcagcttccagatcaccagcgtgaccaccgactacgagggccccggcagccccggcgccagcgacccccccaccccccagccccccaccggccccccccccagactgcccaacggcgagcccagccccgaccccggcggcaagggcacccccagaaacggcagccccccccccggcgcccccagcagcagattcagagtggtgaagctgccccacggcctgggcgagccctacagaagaggcagatggacctgcgtggacgtgtacgagagagacctggagccccacagcttcggcggcctgctggagggcatcagaggcgccagcggcggcgccggcggcagaagcctggacagcagactggagctggccagcctgggcctgggcgcccccaccccccccagcggcctgagccagggccccaccagctggctgagacccccccccaccagccccggcccccaggccagaagcttcaccggcggcctgggccagctggtggtgcccagcaaggccaaggccgagaagccccccctgagcgccagcagcccccagcagagaccccccgagcccgagaccggcgagagcgccggcaccagcagagccgccacccccctgcccagcctgagagtggaggccgaggccggcggcagcggcgccagaaccccccccctgagcagaagaaaggccgtggacatgagactgagaatggagctgggcgcccccgaggagatgggccaggtgccccccctggacagcagacccagcagccccgccctgtacttcacccacgacgccagcctggtgcacaagagccccgaccccttcggcgccgtggccgcccagaagttcagcctggcccacagcatgctggccatcagcggccacctggacagcgacgacgacagcggcagcggcagcctggtgggcatcgacaacaagatcgagcaggccatggacctggtgaagagccacctgatgttcgccgtgagagaggaggtggaggtgctgaaggagcagatcagagagctggccgagagaaacgccgccctggagcaggagaacggcctgctgagagccctggccagccccgagcagctggcccagctgcccagcagcggcgtgcccagactgggcccccccgcccccaacggccccagcgtgtag

SEQ ID NO: 114889 - DNA, 1188 bp, Artificial Sequence
  derived and/or modified sequence
atgtctggcggtaagaaaaagtccagcttccagatcacgtccgtgacaactgactacgaagggcccggctcgccaggtgcctctgacccacccactccacagccacccaccggaccgccaccccgactgcccaatggagagccctcccctgatcctggcgggaagggaacccctcggaacgggtccccacctccgggagccccttcttctcggttccgggttgtaaagctgccgcacggactgggcgaaccttatcgcagaggccggtggacatgcgtggatgtgtatgagagagatttggaaccacactcttttggcgggcttctagaaggcatcagaggcgcttctggcggagccgggggccgaagccttgactccagacttgagctggcgagtctgggactcggggccccaacacccccttccggactctcacagggccctacctcatggttgcgtcctccacccacttcccccggtccccaggctcggtccttcaccgggggcctgggacagctggtcgtcccgagcaaggcgaaggcagaaaagccacccctatctgcgagctcaccacagcagcggccaccagagccggagaccggcgagagcgctggcaccagtcgtgcagctacgccccttccatctctcagagttgaagcggaagcaggcggaagtggagctaggacgcctcctctgagccggcggaaagctgtcgatatgcggctgcgtatggagctgggcgccccagaagagatgggacaggtccccccactggattccagaccatccagtccagcactatactttacccacgatgcctccctagttcataagtctcccgatccctttggagcagtggcggctcagaagtttagcctcgctcattccatgctggccatatctggccaccttgactctgatgatgactcgggtagcggatctctggtcgggattgataataagattgaacaagccatggacctagtcaagagtcacctgatgtttgcggtgagggaagaggtggaggtgctgaaggaacagattagggagttagcagaacgtaacgcggctctggagcaggagaatggcttgctgagggctctggctagtcctgagcaactcgctcagttgccatcgtccggtgtcccacgattaggcccgcccgcacccaacggcccaagcgtatag

SEQ ID NO: 114890 - DNA, 1188 bp, Artificial Sequence
  derived and/or modified sequence
atgtctgggggcaagaagaagagcagcttccagatcacctctgtgaccacagattatgagggccctggcagccctggggccagtgacccccccaccccccagcccccaactggacctccaccccggctgcccaatggagagcccagcccagaccccggcggcaagggcaccccaagaaatggcagccccccacctggggcccccagcagccgcttccgggtggtgaagctgccccacggcctgggggagccctaccgccggggccgctggacctgtgtggatgtgtatgaaagagacctggagccccacagctttggaggcctgctggagggcatccggggggccagcggcggggccggcggccgcagcctggacagccggctggagctggccagcctgggcctgggcgcccccaccccacccagcggcctgagccagggccccacctcctggctgcggcccccacccaccagccctggcccccaggcccgctccttcaccggcggcctgggccagctggtggtgcccagcaaggccaaggccgagaagccacccctgagcgccagcagcccccagcagaggcctcctgagcctgagaccggggagagcgctggcaccagcagagctgccacccccctgcccagcctgcgggtggaggccgaggccggcggcagcggggcccggaccccacccctgagcaggaggaaggctgtggacatgaggctgaggatggagctgggcgcccctgaggagatgggccaggtgccccccctggacagccggcccagcagccctgccctgtacttcacccatgatgccagcctggtgcacaagagcccagacccctttggagctgtggccgcccagaagttcagcctggcccacagcatgctggccatcagcggccacctggacagtgatgatgacagcggcagcggcagcctggtgggcatcgacaacaagattgagcaggccatggacctggtgaagagccacctgatgtttgctgtgcgggaggaggtggaggtgctgaaggagcagatccgggagctggccgagagaaatgctgccctggagcaggagaatggcctgctgcgggccctggccagccctgagcagctggcccagctgcccagcagcggcgtgccccggctgggccccccagccccaaatggccccagcgtgtag

SEQ ID NO: 114891 - DNA, 1188 bp, Artificial Sequence
  derived and/or modified sequence
atgagcggcggcaagaagaagagcagcttccagatcaccagcgtgacaacagattatgagggcccaggatcgcccggggccagtgacccccctacgcctcagcccccgaccggaccccctcctagactccctaatggtgagcccagtccagacccagggggaaagggcaccccgaggaatggatctccacctcccggtgcgcctagttcccggttccgggtagtgaagcttcctcatgggctaggtgagccttatagaaggggcagatggacatgcgtggacgtctacgagagagacctggagcctcacagcttcggcggacttctggaggggataagaggcgcctccgggggagccggcgggcgttcactcgacagccgcttggagttggcttccctgggactaggggccccaacccccccctctggcctgtcacaggggcccacgtcctggttgcgacctccccccacctcccccggaccccaggcccggagctttactggaggactggggcagctcgtcgtcccgtctaaggccaaagccgagaaacctccgctctcagcgtcctctccccagcagcgcccacctgagcctgaaactggtgagtctgctggtactagcagagctgctacacctctcccaagcctgcgggtggaggccgaagcaggaggctccggcgcccgtactcctccgctctctcgtcggaaggccgttgatatgaggctgagaatggagttaggagctcccgaggagatgggtcaggtccctccacttgatagccggccctcctcccctgccctgtatttcacgcatgacgcctccctggttcacaagtcgccggacccctttggcgccgtggcagcgcagaagttctctttggcacattcgatgctggccatcagcgggcaccttgacagcgatgatgatagtgggagtgggtcattggtcggaatcgataacaagatcgaacaggctatggatctggtcaaatcccacttgatgtttgctgtgagggaggaggtggaagtccttaaggagcagatccgggagctggcagagaggaacgcagccctggagcaggaaaacggactgcttagggcgttggctagtcctgagcagttagcccaactccccagctccggagtgccacgcctcgggccccccgccccaaacggtccatccgtgtag

SEQ ID NO: 114892 - DNA, 1188 bp, Artificial Sequence
  derived and/or modified sequence
atgtctgggggaaagaagaaaagctcttttcagataacatctgtgacaaccgactacgaaggaccaggttctcccggagcgtcagatcctccaacaccacagccacctacaggaccgcctcccaggttgccaaacggggagccaagcccagacccaggaggaaaaggaacaccaagaaatggctcccctccgcctggtgctccttcttctaggtttcgagtcgtgaaactacctcacggactgggcgaaccttacaggaggggtaggtggacatgcgtggacgtctatgagagggacttggagccccactcctttggaggcctcttagaaggtatccgcggtgcttcagggggtgccggtggcaggagtctggacagcagactcgagctagccagcctcggtctaggagcccctacacccccatctgggctgagccaaggaccaacttcttggctccgtcctccccctaccagcccgggtccacaggcacggagcttcacaggaggtctgggccagcttgtagtcccctcgaaggccaaggctgaaaaacccccactgtcagctagttctcctcagcaaaggccacctgagccagaaaccggcgagagcgcgggaacttcccgagctgctacgcctttgccctcactccgtgtggaggcagaggctggcggttcaggggctagaactccaccgctgtctcggcgtaaggctgtcgatatgcgtttaagaatggagctgggtgcaccggaggagatggggcaggtgcccccactggactccaggcctagcagtcctgcactgtactttacacacgatgctagtctggtgcataagtctccagatccttttggtgccgtagctgcacagaagtttagtcttgcccactcaatgttagccataagcgggcacctggattcagatgacgatagtggatccggctctctggtggggatagacaacaagatcgagcaggcaatggacctggtaaaatcccatcttatgttcgcagtgagggaagaggttgaggttctgaaagaacagatccgggagctcgcggaacgaaatgctgcattagaacaggagaatggtctcctgcgcgcacttgcctctcctgagcagctggcccagctgccgtcgtccggagtcccaagacttggtcctcctgctccaaacggaccaagcgtatag

SEQ ID NO: 114893 - DNA, 2383 bp, Artificial Sequence
  derived and/or modified sequence
ggaggaggaggaggaggagaggagcagtcagcaggcccgaggaggcaggacttcctggtgtgggggttgtcaacagcccagaaagagaaagacggagaggcagagacccaggggagccgaggagcggagacacggacccagcagggtcacgcgggaggagactcgggacacccactcgctggctgccaccgggagcagaggggggctcggccgccccctcccacatcagtctccagacccttggggcttcagaggccgctcctaggctcctcggaggaggcgcgggtttcttcttttccggagagcaaactttcctcggagatgcctggcaggatgagccgcggcccccggagaggacgggacagcctctgatcgccgcctgcgtgccccgccactgcccatggccaggaggccccagggaacggacagcccgacctcttaggcgccgggaccctcaggctcagatcagtggccgaggccccagagtttgcaaactcagctctggagttcagcagcaacagcagcaggaaaaacctgcccctgctcccccctcccgccacctcccctctcctcttctcccctcacccagcaggcacccccggttcccgccaggccctcctgccatgtcggacccagacgtccccaggggctcggatgtccccgccatgtggcccccttgttccaggggtgcctgagccccttcaaggagccccaacccacccccaaccttggcccagccctgagccccagggaccatgagcgggggcaagaagaagagtagtttccaaatcaccagcgtcaccacggactatgagggccctgggagcccaggggcttcggatccccctaccccacagcccccaaccgggcccccgccccgcctgcccaatggggagcccagccccgatccggggggcaagggcaccccccggaatggctccccaccacctggggccccttcctcccgtttccgggtggtgaagctgccccacggcctgggagagccttatcgccgcggtcgctggacgtgtgtggatgtttatgagcgagacctggagccccacagcttcggcggactcctggagggaattcgaggggcctcagggggcgccgggggcagatctttggattccaggttggagctggccagcctcggcctgggcgcccccaccccaccgtcaggcctgtctcagggccccacctcctggctccgtccaccccccacctctcctggacctcaggcccgctccttcactgggggactgggccagctggtggtgcccagcaaagccaaggcagagaaacccccactgtcggcctcctcaccccagcagcgccccccagagcctgagaccggtgagagtgcgggcacatcccgggctgccacgcccctgccctctctgagggtggaagcggaggctgggggctcaggggccaggacccctccactgtcccggaggaaagctgtagacatgcggctgcggatggagttgggtgctccagaagagatggggcaggtgcccccacttgactctcgccccagctccccagccctctacttcacccacgatgccagcctggttcacaaatctccagaccccttcggagcagtagcagctcagaagttcagcctggcccactccatgttggccatcagtggtcacctagacagcgacgatgatagtggctccggaagcctggttggcattgacaacaaaatcgagcaagccatggacttggtgaagtcccacctcatgtttgcggtccgggaggaggtggaggtgctgaaggagcagatccgggaattggcggagcggaacgctgcgctggagcaggagaatgggctgctgcgcgccctggccagcccggagcagctggctcagctgccctcctcgggggtcccacggcttgggccccctgcgcccaatgggccctccgtctgagcctcccttcccttacaatgtgcctttggggctgcccggccttgcgtcagccgcctgccccctcttcctatgcagctttaatgtccccgtgtccccggggtgggagttcaaggctcagtaatggcctggtcccccggcccctgccccatctcctcatcatccccagccttgatggaggagggagggcttcaggacggggcgtcagagggagccccctctgggagggaaccaacccccaccctccctcctgggaccccccagcagtagacggcttgggggagtcggaggctccccggcagacaccccacccccatcttgttcccttgaggtgcctcctctcctctgcccaggggagggagtgtggacagtatctggaagttctgggattcaggttgttattaaaataataataataattaaaaactctgaagaaacttgaa

SEQ ID NO: 114894 - DNA, 516 bp, Artificial Sequence
  derived and/or modified sequence
atgagcagcaagagaaccaagaccaagaccaagaagagaccccagagagccaccagcaacgtgttcgccatgttcgaccagagccagatccaggagttcaaggaggccttcaacatgatcgaccagaacagagacggcttcatcgacaaggaggacctgcacgacatgctggccagcctgggcaagaaccccaccgacgagtacctggacgccatgatgaacgaggcccccggccccatcaacttcaccatgttcctgaccatgttcggcgagaagctgaacggcaccgaccccgaggacgtgatcagaaacgccttcgcctgcttcgacgaggaggccaccggcaccatccaggaggactacctgagagagctgctgaccaccatgggcgacagattcaccgacgaggaggtggacgagctgtacagagaggcccccatcgacaagaagggcaacttcaactacatcgagttcaccagaatcctgaagcacggcgccaaggacaaggacgactag

SEQ ID NO: 114895 - DNA, 516 bp, Artificial Sequence
  derived and/or modified sequence
atgtcctcaaagaggacaaaaaccaagactaagaaacgcccacagcgcgccacttcaaacgttttcgccatgtttgaccagtcccaaattcaggagtttaaagaggcatttaacatgattgatcagaaccgggacggatttatcgacaaggaagacttgcatgacatgcttgccagcctaggcaagaatccaaccgacgagtaccttgatgcgatgatgaatgaagcacctgggcccatcaactttaccatgttccttaccatgtttggggagaaattgaacggcaccgatcctgaggacgttattaggaatgcatttgcctgcttcgatgaggaggccactgggacgatccaggaggactatctccgtgaactgcttacaactatgggagaccggttcaccgacgaagaggttgacgagctttatagggaagcccctattgacaagaaaggaaatttcaattatattgagttcacacgcatcctgaaacatggtgccaaggataaagacgactag

SEQ ID NO: 114896 - DNA, 1229 bp, Artificial Sequence
  derived and/or modified sequence
ggacgcaaccatctgcggaaaggataggggggaggaagacttaacactgcaacaacaggtacaaaaaagaaggaaactcagtaacaggacccagaggaccattatatattgctctatattctaggtcgcccactttacacttccttctcatgcacttggtcaataccacgcccgctgaccacactggcgacttccctctctgtcgcccctccgtgaagtcagacccactctgcgggccaagaaaggtgaccgggcttccttccggcttgctaagcagaggccggaagcggtggtttttagcggctctctgggtagcagggtggtgtgatagcggcagcgaggggctcggagaggtgctcggattctcgtagctgtgccgggacttaaccaccaccatgtcgagcaaaagaacaaagaccaagaccaagaagcgccctcagcgtgcaacatccaatgtgtttgctatgtttgaccagtcacagattcaggagttcaaagaggccttcaacatgattgatcagaacagagatggtttcatcgacaaggaagatttgcatgatatgcttgcttcattggggaagaatccaactgatgagtatctagatgccatgatgaatgaggctccaggccccatcaatttcaccatgttcctcaccatgtttggtgagaagttaaatggcacagatcctgaagatgtcatcagaaatgcctttgcttgctttgatgaagaagcaactggcaccatacaggaagattacttgagagagctgctgacaaccatgggggatcggtttacagatgaggaagtggatgagctgtacagagaagcacctattgataaaaaggggaatttcaattacatcgagttcacacgcatcctgaaacatggagccaaagacaaagatgactgaaataacttcaaattccagccaaacgttccttgttgccactttgggtattctgagattttctcttgcatgcccttagctttacagcttttgcatttcctgttgtatttattctcagccattttgggcatatgtatctttataatcagactggaaacgggactttctattaatatcattttcagaataaaaaataggataatttaacctaccagcccttctcccccaataactgtggtctatacagagtcaatatattttttcagagaaagttattcgctcgattttttctgaatcataattaaactttatgataaaata

SEQ ID NO: 114897 - DNA, 516 bp, Artificial Sequence
  derived and/or modified sequence
atgagcagcaagaggaccaagaccaagaccaagaagaggccccagagggccaccagcaatgtgtttgccatgtttgaccagagccagatccaggagttcaaggaggccttcaacatgattgaccagaacagagatggcttcatcgacaaggaggacctgcatgacatgctggccagcctgggcaagaaccccacagatgagtacctggatgccatgatgaatgaggcccctggccccatcaacttcaccatgttcctgaccatgtttggagagaagctgaatggaacagatcctgaagatgtgatcagaaatgcctttgcctgctttgatgaggaggccaccggcaccatccaggaggactacctgcgggagctgctgaccaccatgggagaccgcttcacagatgaggaggtggatgagctgtaccgggaggcccccatcgacaagaagggcaacttcaactacatcgagttcacccgcatcctgaagcacggggccaaggacaaggatgactag

SEQ ID NO: 114898 - DNA, 516 bp, Artificial Sequence
  derived and/or modified sequence
atgagcagcaagcggaccaagaccaagaccaagaagcggccccagagagccacttcaaacgttttcgccatgttcgatcagagccagattcaggagttcaaggaggctttcaacatgatagatcagaaccgagatggctttattgacaaggaggacctgcatgatatgctggcctctcttgggaaaaacccgactgatgagtacctcgatgccatgatgaatgaggcaccaggacctatcaactttaccatgttcctgacaatgttcggcgagaagctgaacgggacagaccccgaggacgttattagaaatgcattcgcctgctttgacgaagaggccactggcaccattcaggaggattatctgcgagagctgttgacgaccatgggagaccgatttactgacgaggaagttgacgaactctatagagaggctcctattgataaaaaagggaatttcaattacattgagttcacacgtatcttaaagcacggggccaaggataaggatgactag

SEQ ID NO: 114899 - DNA, 516 bp, Artificial Sequence
  derived and/or modified sequence
atgtcctcaaaaaggacaaaaactaaaactaaaaaaaggccacagcgggctacctccaacgtgttcgccatgttcgaccagtcccagattcaggaattcaaagaggcgttcaacatgatcgaccagaatcgggatggcttcatagataaagaggatctccacgatatgcttgcctccctcggcaagaacccaaccgatgaatacctagatgccatgatgaatgaagcccctgggccaatcaattttaccatgtttctcacgatgtttggtgagaaactgaatgggacagacccggaagatgtaattagaaacgcatttgcctgctttgacgaggaagcgacaggcactatacaggaggactatctgcgagaattgttgacaacaatgggtgatcgatttacagacgaggaagtggacgagctttaccgtgaggcccctatcgacaaaaaaggtaattttaactacattgagtttacccgtatattgaagcatggagcaaaggataaagatgattag

SEQ ID NO: 114900 - DNA, 899 bp, Artificial Sequence
  derived and/or modified sequence
gctgctgagcggttttgcagactaccatcttccctgcaactctgaaggatggacttaaccaccaccatgtcgagcaaaagaacaaagaccaagaccaagaagcgccctcagcgtgcaacatccaatgtgtttgctatgtttgaccagtcacagattcaggagttcaaagaggccttcaacatgattgatcagaacagagatggtttcatcgacaaggaagatttgcatgatatgcttgcttcattggggaagaatccaactgatgagtatctagatgccatgatgaatgaggctccaggccccatcaatttcaccatgttcctcaccatgtttggtgagaagttaaatggcacagatcctgaagatgtcatcagaaatgcctttgcttgctttgatgaagaagcaactggcaccatacaggaagattacttgagagagctgctgacaaccatgggggatcggtttacagatgaggaagtggatgagctgtacagagaagcacctattgataaaaaggggaatttcaattacatcgagttcacacgcatcctgaaacatggagccaaagacaaagatgactgaaataacttcaaattccagccaaacgttccttgttgccactttgggtattctgagattttctcttgcatgcccttagctttacagcttttgcatttcctgttgtatttattctcagccattttgggcatatgtatctttataatcagactggaaacgggactttctattaatatcattttcagaataaaaaataggataatttaacctaccagcccttctcccccaataactgtggtctatacagagtcaatatattttttcagagaaagttattcgctcgattttttctgaatcataattaaactttatgataaaat

SEQ ID NO: 114901 - DNA, 516 bp, Artificial Sequence
  derived and/or modified sequence
atgtcatctaagcgaacaaaaaccaagacaaagaagcgcccacaacgcgccacctctaacgtttttgctatgttcgatcagtctcagatccaggaatttaaagaagccttcaacatgatcgaccagaacagagatggcttcattgataaagaagatctccacgatatgctcgcttccctggggaaaaatcccactgacgaatacctggacgccatgatgaatgaggccccaggacccataaactttaccatgtttctcacaatgttcggtgagaagttgaacggtacagacccagaggacgtaatcagaaacgcgttcgcatgctttgacgaagaggctaccggaactatccaggaagattaccttcgtgaactactgaccaccatgggcgataggtttacggatgaagaagtggacgaattgtacagggaggcaccaattgacaaaaagggtaattttaattatattgagtttacccgcattttaaagcatggtgccaaggacaaagacgattag

SEQ ID NO: 114902 - DNA, 516 bp, Artificial Sequence
  derived and/or modified sequence
atgagcagcaagcggaccaagaccaagaccaagaagcggccccagagagctacctcaaatgtgtttgcgatgttcgatcagtctcagatacaggagttcaaggaagccttcaatatgattgaccagaaccgggacggattcattgacaaggaagacttgcacgatatgctcgcatcactgggtaaaaatcctactgatgaatacttggacgcaatgatgaatgaagcgcctggtcccatcaacttcacaatgtttttaaccatgtttggggagaagctcaatggaaccgatcctgaggatgtgattcgtaatgccttcgcatgctttgacgaagaagccacagggacgattcaagaggattatctgagggaacttttaacaacgatgggagaccggtttacagatgaggaagtcgatgagctgtatcgagaggcccccattgacaagaaagggaattttaactatattgaattcaccaggatcctcaaacatggcgccaaggacaaggatgactag

SEQ ID NO: 114903 - DNA, 516 bp, Artificial Sequence
  derived and/or modified sequence
atgtccagcaaacgcacaaaaaccaagaccaagaaaaggccacagcgggcaacaagcaatgttttcgctatgtttgaccagtctcaaatccaggaattcaaagaggctttcaacatgatagaccagaatcgcgacgggttcatcgataaggaggacttacacgacatgctggctagccttggcaaaaatcccacagacgaataccttgacgcaatgatgaacgaagctcccggtcccatcaacttcacgatgtttttaactatgtttggggaaaagctcaatggaacagatccggaagatgtcatcagaaatgcttttgcgtgcttcgatgaagaggccaccggaaccattcaagaagattatttgcgggaattgcttacaaccatgggtgaccgtttcaccgatgaagaggtagatgagttgtacagagaggctccaattgacaaaaagggcaatttcaactacattgaatttactcgcatccttaagcacggcgcaaaagataaggacgattag

SEQ ID NO: 114904 - protein, 171 aa, Artificial Sequence
  derived and/or modified sequence
MSSKRTKTKTKKRPQRATSNVFAMFDQSQIQEFKEAFNMIDQNRDGFIDKEDLHDMLASLGKNPTDEYLDAMMNEAPGPINFTMFLTMFGEKLNGTDPEDVIRNAFACFDEEATGTIQEDYLRELLTTMGDRFTDEEVDELYREAPIDKKGNFNYIEFTRILKHGAKDKDD

SEQ ID NO: 114905 - protein, 281 aa, Artificial Sequence
  derived and/or modified sequence
MAVNVYSTSVTSENLSRHDMLAWVNDSLHLNYTKIEQLCSGAAYCQFMDMLFPGCVHLRKVKFQAKLEHEYIHNFKVLQAAFKKMGVDKIIPVEKLVKGKFQDNFEFIQWFKKFFDANYDGKDYNPLLARQGQDVAPPPNPGDQIFNKSKKLIGTAVPQRTSPTGPKNMQTSGRLSNVAPPCILRKNPPSARNGGHETDAQILELNQQLVDLKLTVDGLEKERDFYFSKLRDIELICQEHESENSPVISGIIGILYATEEGFAPPEDDEIEEHQQEDQDEY

SEQ ID NO: 114906 - protein, 218 aa, Artificial Sequence
  derived and/or modified sequence
MAVNVYSTSVTSENLSRHDMLAWVNDSLHLNYTKIEQLCSGAAYCQFMDMLFPGCVHLRKVKFQAKLEHEYIHNFKVLQAAFKKMGVDKIIPVEKLVKGKFQDNFEFIQWFKKFFDANYDGKDYNPLLARQGQDVAPPPNPGDQIFNKSKKLIGTAVPQRTSPTGPKNMQTSGRLSNVAPPCILRKNPPSARNGGHETDAQILELNQQLVDLKLTVDG

SEQ ID NO: 114907 - DNA, 846 bp, Artificial Sequence
  derived and/or modified sequence
atggcagtaaatgtttactccacatcagtgacttccgagaacctgtcgaggcatgatatgttagcttgggtgaatgatagtctccacctaaactacactaaaatcgagcaactctgcagtggagccgcctattgccaattcatggacatgctttttcccggatgtgttcatctgcgtaaggtcaagttccaagcgaaactcgagcacgagtatattcataacttcaaggtcctgcaagccgccttcaagaaaatgggggtggataaaattattccggtagagaagctggttaaaggcaagtttcaggataattttgagttcatccagtggttcaaaaaattctttgacgctaattacgatggtaaagattacaatcccctcctcgcgcgtcagggtcaagacgtggccccaccccccaatccaggcgatcagatcttcaataagagcaagaagctgatcggaaccgctgtgccacagcgaacatccccaaccggacccaagaatatgcagacgtctggcagattgagcaacgttgcacccccttgcatcctaagaaaaaacccgcctagtgcccggaacggcgggcacgagaccgacgctcagatactggagctcaatcaacaactagtggatctgaaattaactgtggacgggctggagaaggaacgggacttttactttagcaagctcagggacatcgaacttatttgtcaagagcatgagtctgaaaattcaccggtgatctccggaataattgggattctatacgcaaccgaggaaggatttgctcccccagaagacgacgagatcgaggaacaccagcaggaggatcaggatgaatactag

SEQ ID NO: 114908 - DNA, 846 bp, Artificial Sequence
  derived and/or modified sequence
atggctgtgaatgtgtacagcacctctgtgaccagcgagaacctgagcagacatgacatgctggcctgggtgaatgacagcctgcacctgaactacaccaagattgagcagctgtgcagcggggccgcctactgccagttcatggacatgctgtttcctggctgtgtgcacctgaggaaggtgaagttccaggccaagctggagcacgagtacatccacaacttcaaggtgctgcaggccgccttcaagaagatgggcgtggacaagatcatccctgtggagaagctggtgaagggcaagttccaggacaactttgagttcatccagtggttcaagaagttctttgatgccaactatgatggcaaggactacaaccccctgctggcccggcagggccaggatgtggcccccccacccaaccctggggaccagatcttcaacaagagcaagaagctgattggaacagctgtgccccagaggaccagccccaccggccccaagaacatgcagaccagcggccgcctgagcaatgtggccccaccctgcatcctgaggaagaacccccccagcgccagaaatggaggccacgagacagatgcccagatcctggagctgaaccagcagctggtggacctgaagctgactgtggatggcctggagaaggagcgggacttctacttcagcaagctgcgggacatcgagctgatctgccaggagcacgagagcgagaacagccctgtgatcagcggcatcatcggcatcctgtatgccacagaggagggctttgcccccccagaagatgatgaaattgaggagcaccagcaggaggaccaggatgagtactag

SEQ ID NO: 114909 - DNA, 846 bp, Artificial Sequence
  derived and/or modified sequence
atggccgtgaacgtgtacagcaccagcgtgaccagcgagaacctgtcgcgccatgacatgctggcatgggtgaatgactcactacacctgaactatactaagatcgaacaactgtgttcaggggccgcatactgccagttcatggatatgctgtttcccggttgtgtccatctcaggaaagttaaatttcaggccaaactggagcacgagtacatccataatttcaaagtcctccaagctgcttttaaaaaaatgggtgtggataagatcattcccgtggagaagcttgtgaaaggaaagttccaggataatttcgagtttatccagtggttcaagaagttttttgatgccaactacgacggcaaagattacaacccactcttagctcgccaggggcaggatgtcgctccccctccaaacccaggcgatcagattttcaacaaatcaaagaaattgatcggcaccgccgtgccccagaggacgagtcctactggtcccaagaatatgcagacttctgggcgcctcagcaacgtggccccaccatgcatcttgaggaaaaaccctccttcggctcgcaacgggggacacgaaacagacgctcaaatcttagaattgaaccaacagctagtggatcttaaactcactgtcgacggtcttgagaaggaacgcgacttttacttttccaaacttcgggatatcgaattgatttgccaggagcatgaaagcgagaatagtcccgtcatctcaggtatcattgggatcctttacgcaaccgaggaaggcttcgccccccccgaggatgacgagattgaggagcatcaacaggaggaccaggatgagtactag

SEQ ID NO: 114910 - DNA, 846 bp, Artificial Sequence
  derived and/or modified sequence
atggcagtgaacgtctattccacctccgtcacaagcgagaacctgtccagacacgacatgttggcttgggtcaacgattccctgcatctgaactacacgaagattgagcagctctgttctggagcggcttattgccaattcatggatatgttgttccctgggtgtgtgcatttgaggaaagtcaagttccaggctaaactcgaacatgaatatatacataacttcaaagtgcttcaggccgcattcaaaaaaatgggcgtggacaagataatccctgtggagaagcttgtcaagggaaagttccaggacaattttgaatttattcagtggtttaaaaagtttttcgacgcaaactacgatggcaaagactacaatccgctactagctcgtcaggggcaagacgtagcgccacccccaaacccaggggaccagatcttcaataagagtaagaaactcatcggcacggcagtgccgcagcgaacatcgccaacagggccaaaaaacatgcaaacatctggcagattgtctaatgtagctccaccctgtattttgcgaaaaaaccctcccagcgcccgtaatggaggacatgagacagatgcccagatcctagagctgaatcagcagctcgtggatctgaagctcacagttgatggcctggagaaggaaagagatttttatttttccaagttgcgcgacatagagctgatttgtcaagagcatgagtctgagaactctcccgttattagtgggattattggcattctgtatgctacagaggagggatttgcgccaccagaggacgatgaaatagaggagcaccagcaggaggaccaggacgagtactag

SEQ ID NO: 114911 - DNA, 846 bp, Artificial Sequence
  derived and/or modified sequence
atggccgtgaacgtgtacagcaccagcgtgaccagcgagaacctgagcagacacgacatgctggcctgggtgaacgacagcctgcacctgaactacaccaagatcgagcagctgtgcagcggcgccgcctactgccagttcatggacatgctgttccccggctgcgtgcacctgagaaaggtgaagttccaggccaagctggagcacgagtacatccacaacttcaaggtgctgcaggccgccttcaagaagatgggcgtggacaagatcatccccgtggagaagctggtgaagggcaagttccaggacaacttcgagttcatccagtggttcaagaagttcttcgacgccaactacgacggcaaggactacaaccccctgctggccagacagggccaggacgtggcccccccccccaaccccggcgaccagatcttcaacaagagcaagaagctgatcggcaccgccgtgccccagagaaccagccccaccggccccaagaacatgcagaccagcggcagactgagcaacgtggcccccccctgcatcctgagaaagaacccccccagcgccagaaacggcggccacgagaccgacgcccagatcctggagctgaaccagcagctggtggacctgaagctgaccgtggacggcctggagaaggagagagacttctacttcagcaagctgagagacatcgagctgatctgccaggagcacgagagcgagaacagccccgtgatcagcggcatcatcggcatcctgtacgccaccgaggagggcttcgccccccccgaggacgacgagatcgaggagcaccagcaggaggaccaggacgagtactag

SEQ ID NO: 114912 - DNA, 657 bp, Artificial Sequence
  derived and/or modified sequence
atggctgtcaatgtttactcgacctccgtcaccagtgagaacctatcacgacacgacatgcttgcctgggtcaacgatagccttcaccttaactataccaagatcgaacagctgtgtagcggagcagcatattgccagttcatggacatgttgtttccaggctgtgtacacctgcggaaagtcaagtttcaggctaagttagagcacgagtacatccacaactttaaggtgttgcaggctgcttttaagaagatgggcgtagacaagattatccctgttgagaagttggttaagggtaagtttcaggacaattttgagttcatccagtggtttaaaaaattctttgatgctaactacgatggaaaggactacaatcctcttctggcacgccagggtcaggacgtcgctcctccgccaaaccccggagaccagatcttcaataaaagcaagaaactgattggaacagcagttccccagcggactagtccaacaggcccgaagaatatgcagacatcaggtaggctaagcaatgttgcaccaccctgcatccttagaaagaatcccccatcggccagaaatggcggtcatgagactgacgctcaaattcttgagctgaatcagcagctggtggatctaaagctgactgtggatggctag

SEQ ID NO: 114913 - DNA, 657 bp, Artificial Sequence
  derived and/or modified sequence
atggctgtgaatgtgtacagcacctctgtgaccagcgagaacctgagcagacatgacatgctggcctgggtgaatgacagcctgcacctgaactacaccaagattgagcagctgtgcagcggggccgcctactgccagttcatggacatgctgtttcctggctgtgtgcacctgaggaaggtgaagttccaggccaagctggagcacgagtacatccacaacttcaaggtgctgcaggccgccttcaagaagatgggcgtggacaagatcatccctgtggagaagctggtgaagggcaagttccaggacaactttgagttcatccagtggttcaagaagttctttgatgccaactatgatggcaaggactacaaccccctgctggcccggcagggccaggatgtggcccccccacccaaccctggggaccagatcttcaacaagagcaagaagctgattggaacagctgtgccccagaggaccagccccaccggccccaagaacatgcagaccagcggccgcctgagcaatgtggccccaccctgcatcctgaggaagaacccccccagcgccagaaatggaggccacgagacagatgcccagatcctggagctgaaccagcagctggtggacctgaagctgactgtggatggatag

SEQ ID NO: 114914 - DNA, 1892 bp, Artificial Sequence
  derived and/or modified sequence
agcggcggccgcatcgcgcctgcgcagtgccctcgtcccccgcagtctctgtgcgttgaagccggagaccgcggcggcctcagcgaggaccctccgccccggagccgccggccggagccgcagcctctgccgcagcgcccccgccacctgtcccctccccctccgcctccgccggagccgcctcgtgcactctggggtatggccgtcaatgtgtactccacatctgtgaccagtgaaaatctgagtcgccatgatatgcttgcatgggtcaacgactccctgcacctcaactataccaagatagaacagctttgttcaggggcagcctactgccagttcatggacatgctcttccccggctgtgtgcacttgaggaaagtgaagttccaggccaaactagagcacgaatacatccacaacttcaaggtgctgcaagcagctttcaagaagatgggtgttgacaaaatcattcctgtagagaaattagtgaaaggaaaattccaagataattttgagtttattcagtggtttaagaaattctttgacgcaaactatgatggaaaggattacaaccctctgctggcgcggcagggccaggacgtagcgccacctcctaacccaggtgatcagatcttcaacaaatccaagaaactcattggcacagcagttccacagaggacgtcccccacaggcccaaaaaacatgcagacctctggccggctgagcaatgtggcccccccctgcattctccggaagaatcctccatcagcccgaaatggcggccatgagactgatgcccaaattcttgaactcaaccaacagctggtggacttgaagctgacagtggatgggctggagaaggaacgtgacttctacttcagcaaacttcgtgacatcgagctcatctgccaggagcatgaaagtgaaaacagccctgttatctcaggcatcattggcatcctctatgccacagaggaaggattcgcaccccctgaggacgatgagattgaagagcatcaacaagaagaccaggacgagtactgagggcggccgcagccctggctgactgcacagcttccccgtgcctccctccctgctccactcccacattatagtcctttcctaacacggtcggccgggtgctttgtgtcagtgctgcagcactggggagccaggcgaggggggcttgggggcatggggccggaaagcaggcagaagcccgtcctgggtggtgctggcccagttggtgggacccctgtccacacccaccctatttatttccgttgtctctctgctgtgtcgcccaacacttcccagggtgctgctgccacccgccccagccagccacctgctcctgacagccagcagctgtgtatttgacaaagtcattggtatatttttacttactggattctccttgcactttacctgttcttttccagagctgacagcacgggctccggcgcagtgtgcctggcttggcttcccttccccatggctgggggctggggtaggactcacccattctaatttattttgtcttttggcttctcagtagctaaggggaaggctgatgtcaggagagggagagggggctgaggaggtagtgctgtaggcccagggggtcagggaaagggaggggggcatgtgagggatggaaatgacctcctggcaccaggctcacccacccaaggccccctgccccagcactgaatcccagcgctgccctgaggcccccagccactccctccagcagcctggttcaccacacaaactctgcctggaccccattgtctgtctgcttcccacctgccctccccaccccctgcccctcgggcaccagcctgcatatgtgttcacttttatttaaataaacttgtgtggtaaaagta

SEQ ID NO: 114915 - DNA, 878 bp, Artificial Sequence
  derived and/or modified sequence
caagcccagaataacctggatgtgtgactcacaggggtaggggtagcaattttgcagattttccaaacaggtgacttcagcccccgggcctgggcaggaaggggtagcccagtgacaatgggcatagtcccacttcaggaacgggaaacgtgttggctggctctgtggagttctctctcttctgatcccacagcatctgttccagttgtcttggccgctggggtatggccgtcaatgtgtactccacatctgtgaccagtgaaaatctgagtcgccatgatatgcttgcatgggtcaacgactccctgcacctcaactataccaagatagaacagctttgttcaggggcagcctactgccagttcatggacatgctcttccccggctgtgtgcacttgaggaaagtgaagttccaggccaaactagagcacgaatacatccacaacttcaaggtgctgcaagcagctttcaagaagatgggtgttgacaaaatcattcctgtagagaaattagtgaaaggaaaattccaagataattttgagtttattcagtggtttaagaaattctttgacgcaaactatgatggaaaggattacaaccctctgctggcgcggcagggccaggacgtagcgccacctcctaacccaggtgatcagatcttcaacaaatccaagaaactcattggcacagcagttccacagaggacgtcccccacaggcccaaaaaacatgcagacctctggccggctgagcaatgtggcccccccctgcattctccggaagaatcctccatcagcccgaaatggcggccatgagactgatgcccaaattcttgaactcaaccaacagctggtggacttgaagctgacagtggatggg

SEQ ID NO: 114916 - DNA, 657 bp, Artificial Sequence
  derived and/or modified sequence
atggccgtgaacgtgtacagcaccagcgtgaccagcgagaacctgagcaggcacgatatgctggcatgggttaatgatagtctccatcttaactatactaagattgaacagctttgctctggagccgcgtactgtcagtttatggatatgctgttcccagggtgcgttcaccttcggaaggtaaagtttcaggccaaacttgagcacgagtatattcataactttaaggtattacaggcagcatttaagaagatgggcgtcgataaaattatacccgtggaaaagctggtgaagggtaaattccaggacaacttcgaattcattcagtggtttaaaaagttctttgatgccaattacgatgggaaggactataacccacttctcgcccgccaaggccaggatgttgcacccccccccaaccctggcgatcagatttttaataaatcaaagaaactgatcggcacagccgtgccacagcggaccagccctaccggccccaagaatatgcaaacatccggccgcctgagcaatgtggcgcccccctgtatactccggaagaacccccctagcgctagaaatggcggtcatgaaaccgacgctcaaatattggagcttaaccagcagctggtcgatctcaagttgaccgtggacggctag

SEQ ID NO: 114917 - DNA, 657 bp, Artificial Sequence
  derived and/or modified sequence
atggccgtcaacgtttatagcactagtgtgacctcagaaaacctctcccgccacgatatgctggcctgggtgaacgactcccttcatttaaattacactaagattgagcagctgtgctccggagcggcatattgccagttcatggacatgttatttcccggatgtgtgcacttacgaaaagtcaaattccaagccaaattagagcacgagtacattcacaattttaaggtgctccaggcagccttcaagaagatgggcgtagataaaataatcccagtcgagaagcttgtgaaggggaagtttcaggacaattttgagtttatccagtggtttaagaagttttttgacgccaattacgacggaaaggactataaccccctcctagcacggcaggggcaggatgtggcaccccctcccaaccccggagaccaaatttttaacaagtccaagaagctgattggcaccgctgtgccacagcgcaccagccctaccggtccaaagaacatgcagacaagcggtaggttgtccaatgttgcccctccctgtatcttacgaaagaatccccctagcgctaggaacggcggacatgagacagacgcacagatattggaactaaatcagcaactggtcgatctgaagctgaccgttgacggatag

SEQ ID NO: 114918 - DNA, 657 bp, Artificial Sequence
  derived and/or modified sequence
atggccgtgaacgtgtacagcaccagcgtgaccagcgagaacctgagcagacacgacatgctggcctgggtgaacgacagcctgcacctgaactacaccaagatcgagcagctgtgcagcggcgccgcctactgccagttcatggacatgctgttccccggctgcgtgcacctgagaaaggtgaagttccaggccaagctggagcacgagtacatccacaacttcaaggtgctgcaggccgccttcaagaagatgggcgtggacaagatcatccccgtggagaagctggtgaagggcaagttccaggacaacttcgagttcatccagtggttcaagaagttcttcgacgccaactacgacggcaaggactacaaccccctgctggccagacagggccaggacgtggcccccccccccaaccccggcgaccagatcttcaacaagagcaagaagctgatcggcaccgccgtgccccagagaaccagccccaccggccccaagaacatgcagaccagcggcagactgagcaacgtggcccccccctgcatcctgagaaagaacccccccagcgccagaaacggcggccacgagaccgacgcccagatcctggagctgaaccagcagctggtggacctgaagctgaccgtggacggctag

SEQ ID NO: 114919 - protein, 315 aa, Artificial Sequence
  derived and/or modified sequence
MDVNKFEASVGFLDVKKFLSTWKLQNPRTHFVLSPHCFMGGIMAPKDIMTNTHAKSILNSMNSLRKSNTLCDVTLRVEQKDFPAHRIVLAACSDYFCAMFTSELSEKGKPYVDIQGLTASTMEILLDFVYTETVHVTVENVQELLPAACLLQLKGVKQACCEFLESQLDPSNCLGIRDFAETHNCVDLMQAAEVFSQKHFPEVVQHEEFILLSQGEVEKLIKCDEIQVDSEEPVFEAVINWVKHAKKEREESLPNLLQYVRMPLLTPRYITDVIDAEPFIRCSLQCRDLVDEAKKFHLRPELRSQMQGPRTRARL

SEQ ID NO: 114920 - protein, 606 aa, Artificial Sequence
  derived and/or modified sequence
MDVNKFEASVGFLDVKKFLSTWKLQNPRTHFVLSPHCFMGGIMAPKDIMTNTHAKSILNSMNSLRKSNTLCDVTLRVEQKDFPAHRIVLAACSDYFCAMFTSELSEKGKPYVDIQGLTASTMEILLDFVYTETVHVTVENVQELLPAACLLQLKGVKQACCEFLESQLDPSNCLGIRDFAETHNCVDLMQAAEVFSQKHFPEVVQHEEFILLSQGEVEKLIKCDEIQVDSEEPVFEAVINWVKHAKKEREESLPNLLQYVRMPLLTPRYITDVIDAEPFIRCSLQCRDLVDEAKKFHLRPELRSQMQGPRTRARLGANEVLLVVGGFGSQQSPIDVVEKYDPKTQEWSFLPSITRKRRYVASVSLHDRIYVIGGYDGRSRLSSVECLDYTADEDGVWYSVAPMNVRRGLAGATTLGDMIYVSGGFDGSRRHTSMERYDPNIDQWSMLGDMQTAREGAGLVVASGVIYCLGGYDGLNILNSVEKYDPHTGHWTNVTPMATKRSGAGVALLNDHIYVVGGFDGTAHLSSVEAYNIRTDSWTTVTSMTTPRCYVGATVLRGRLYAIAGYDGNSLLSSIECYDPIIDSWEVVTSMGTQRCDAGVCVLREK

SEQ ID NO: 114921 - DNA, 948 bp, Artificial Sequence
  derived and/or modified sequence
atggacgtgaacaagttcgaggccagcgtgggcttcctggacgtgaagaagttcctgagcacctggaagctgcagaaccccagaacccacttcgtgctgagcccccactgcttcatgggcggcatcatggcccccaaggacatcatgaccaacacccacgccaagagcatcctgaacagcatgaacagcctgagaaagagcaacaccctgtgcgacgtgaccctgagagtggagcagaaggacttccccgcccacagaatcgtgctggccgcctgcagcgactacttctgcgccatgttcaccagcgagctgagcgagaagggcaagccctacgtggacatccagggcctgaccgccagcaccatggagatcctgctggacttcgtgtacaccgagaccgtgcacgtgaccgtggagaacgtgcaggagctgctgcccgccgcctgcctgctgcagctgaagggcgtgaagcaggcctgctgcgagttcctggagagccagctggaccccagcaactgcctgggcatcagagacttcgccgagacccacaactgcgtggacctgatgcaggccgccgaggtgttcagccagaagcacttccccgaggtggtgcagcacgaggagttcatcctgctgagccagggcgaggtggagaagctgatcaagtgcgacgagatccaggtggacagcgaggagcccgtgttcgaggccgtgatcaactgggtgaagcacgccaagaaggagagagaggagagcctgcccaacctgctgcagtacgtgagaatgcccctgctgacccccagatacatcaccgacgtgatcgacgccgagcccttcatcagatgcagcctgcagtgcagagacctggtggacgaggccaagaagttccacctgagacccgagctgagaagccagatgcagggccccagaaccagagccagactgtag

SEQ ID NO: 114922 - DNA, 1821 bp, Artificial Sequence
  derived and/or modified sequence
atggacgtgaacaagttcgaggccagcgtgggcttcctggacgtgaagaagttcctgagcacctggaagctgcagaaccccagaacccacttcgtgctgagcccccactgcttcatgggcggcatcatggcccccaaggacatcatgaccaacacccacgccaagagcatcctgaacagcatgaacagcctgagaaagagcaacaccctgtgcgacgtgaccctgagagtggagcagaaggacttccccgcccacagaatcgtgctggccgcctgcagcgactacttctgcgccatgttcaccagcgagctgagcgagaagggcaagccctacgtggacatccagggcctgaccgccagcaccatggagatcctgctggacttcgtgtacaccgagaccgtgcacgtgaccgtggagaacgtgcaggagctgctgcccgccgcctgcctgctgcagctgaagggcgtgaagcaggcctgctgcgagttcctggagagccagctggaccccagcaactgcctgggcatcagagacttcgccgagacccacaactgcgtggacctgatgcaggccgccgaggtgttcagccagaagcacttccccgaggtggtgcagcacgaggagttcatcctgctgagccagggcgaggtggagaagctgatcaagtgcgacgagatccaggtggacagcgaggagcccgtgttcgaggccgtgatcaactgggtgaagcacgccaagaaggagagagaggagagcctgcccaacctgctgcagtacgtgagaatgcccctgctgacccccagatacatcaccgacgtgatcgacgccgagcccttcatcagatgcagcctgcagtgcagagacctggtggacgaggccaagaagttccacctgagacccgagctgagaagccagatgcagggccccagaaccagagccagactgggcgccaacgaggtgctgctggtggtgggcggcttcggcagccagcagagccccatcgacgtggtggagaagtacgaccccaagacccaggagtggagcttcctgcccagcatcaccagaaagagaagatacgtggccagcgtgagcctgcacgacagaatctacgtgatcggcggctacgacggcagaagcagactgagcagcgtggagtgcctggactacaccgccgacgaggacggcgtgtggtacagcgtggcccccatgaacgtgagaagaggcctggccggcgccaccaccctgggcgacatgatctacgtgagcggcggcttcgacggcagcagaagacacaccagcatggagagatacgaccccaacatcgaccagtggagcatgctgggcgacatgcagaccgccagagagggcgccggcctggtggtggccagcggcgtgatctactgcctgggcggctacgacggcctgaacatcctgaacagcgtggagaagtacgacccccacaccggccactggaccaacgtgacccccatggccaccaagagaagcggcgccggcgtggccctgctgaacgaccacatctacgtggtgggcggcttcgacggcaccgcccacctgagcagcgtggaggcctacaacatcagaaccgacagctggaccaccgtgaccagcatgaccacccccagatgctacgtgggcgccaccgtgctgagaggcagactgtacgccatcgccggctacgacggcaacagcctgctgagcagcatcgagtgctacgaccccatcatcgacagctgggaggtggtgaccagcatgggcacccagagatgcgacgccggcgtgtgcgtgctgagagagaagtag

SEQ ID NO: 114923 - DNA, 948 bp, Artificial Sequence
  derived and/or modified sequence
atggatgtgaacaagtttgaggcatccgtagggtttctagacgtgaagaagtttctctcgacttggaagcttcagaatcctcgaacccattttgtgctgtcaccgcattgctttatgggaggaattatggctcccaaggatataatgacgaacacccatgccaagtcaatattgaactccatgaactcgcttcgcaagtccaacacgctttgtgacgtgaccctgcgagtggagcaaaaagatttcccagcgcacagaatcgtgctggccgcctgctcagattatttctgtgcgatgttcacaagcgaactgagcgagaaggggaaaccgtatgtcgatatccaaggactgaccgcctcaactatggaaatcttattggacttcgtctacacagaaacagtgcacgtgaccgtcgaaaatgtccaagagctgttgcccgctgcatgtttattgcaattaaagggtgttaagcaggcctgctgtgaattcttggagtcccaattggacccctccaattgtctcggtatacgagatttcgctgaaacccacaattgtgtggatctgatgcaagccgcagaggtgttcagccaaaagcacttcccagaggtggtccaacatgaagaattcattcttttgtcccagggtgaagtcgagaagcttattaagtgcgatgagatacaggttgattccgaggagcccgtgttcgaggccgtgatcaattgggtgaaacacgccaagaaggagcgtgaagaaagcctgcctaacctgctccagtatgtgaggatgcccctgctcactcctagatacatcaccgatgttattgacgcagaaccattcatccggtgcagcttgcaatgtcgtgatttggtcgacgaggccaagaagtttcacctgcgcccagagctgcggagccaaatgcagggccctaggactagggcaagactttag

SEQ ID NO: 114924 - DNA, 1821 bp, Artificial Sequence
  derived and/or modified sequence
atggacgttaataaatttgaggcaagcgtagggtttctggatgttaaaaagtttctgtcaacttggaagctgcagaatccgcggacgcattttgtcctaagtccacattgtttcatgggtgggataatggcaccaaaagacatcatgactaacactcatgcgaaatctatcctcaattctatgaattccttgcgcaagtctaacacgttgtgcgatgtgactctgcgtgttgaacagaaggattttcccgctcatagaattgtgctcgccgcttgttctgactatttctgcgctatgtttacttctgagttgagtgagaagggaaagccgtacgtcgacatccagggtcttactgccagcaccatggagatattgctggattttgtgtacactgagacagtacatgtgactgtggagaatgtacaggaactcttgccagctgcttgcctgctgcaacttaaaggtgtaaagcaggcctgctgtgagtttctggaaagtcagctggaccctagtaattgcctagggattagggatttcgctgagacccacaactgcgtagatcttatgcaggccgccgaggtgttctcccagaagcattttccggaggtcgttcagcacgaagaatttatcttgttgtcccagggagaagtggagaaactgatcaagtgcgatgagatccaggtcgacagcgaagagcccgtctttgaagcagtaatcaattgggtaaagcatgcaaagaaggaaagagaggaaagcctaccgaatctgctgcagtatgtgcggatgccactcctgactcctaggtatataacggacgtcattgacgccgagccgtttatccgatgttccttacagtgtagggacctcgtcgatgaagctaagaaatttcatttgcggccagagctgcggagtcaaatgcagggtccacggactagagcaagactcggcgccaatgaagtgctacttgttgttggaggctttggcagtcagcagtctccaatcgatgtggtggaaaaatacgacccgaaaacccaagaatggtccttcctaccttctatcacgcggaagcggcgctacgtcgccagtgtgtctctccacgataggatctacgtgatcggtggctacgacgggcgttcaaggcttagctctgttgaatgcctggactacaccgcagatgaagacggagtatggtactctgtcgcgcctatgaacgtgagacgtgggctggccggagctacaacacttggcgacatgatatatgtgagtggcggattcgatggatccaggcgccacacctcaatggagagatatgatccgaacatcgaccaatggtcgatgctcggcgacatgcagaccgcacgagagggcgcgggcctggtggtggcttcaggagttatatattgcctgggaggatacgacggtctcaatattttgaattctgtggaaaaatacgaccctcacactggccactggaccaatgtcacgcccatggccactaagcgttccggagccggcgtggcattgctcaacgaccacatctacgtggtcggtggatttgacggtacagctcacctgtcttctgttgaggcctacaacatccgtacagacagctggaccaccgtgacttctatgactacaccgcgctgctatgtgggtgctactgtacttcggggacgcctctacgccattgcaggctacgatggcaatagcttactctcaagcatcgaatgctatgaccccattatcgatagttgggaggtggtcacaagcatgggaacccaaagatgtgatgccggggtgtgcgttcttcgtgaaaagtag

SEQ ID NO: 114925 - DNA, 948 bp, Artificial Sequence
  derived and/or modified sequence
atggatgtgaacaagtttgaggcctctgtgggcttcctggatgtgaagaagttcctgagcacctggaagctgcagaaccccaggacccactttgtgctgagcccccactgcttcatgggcggcatcatggcccccaaggacatcatgaccaacacccacgccaagagcatcctgaacagcatgaacagcctgaggaagagcaacaccctgtgtgatgtgaccctgcgggtggagcagaaggacttccctgcccacagaattgtgctggccgcctgcagcgactacttctgtgccatgttcaccagcgagctgtctgagaagggcaagccctacgtggacatccagggcctgacagccagcaccatggagatcctgctggactttgtgtacacagaaacagtgcacgtgacagtggagaatgtgcaggagctgctgcctgctgcctgcctgctgcagctgaagggcgtgaagcaggcctgctgtgagttcctggagagccagctggaccccagcaactgcctgggcatccgggactttgctgagacccacaactgtgtggacctgatgcaggccgctgaggtgttcagccagaagcacttccctgaggtggtgcagcacgaggagttcatcctgctgagccagggcgaggtggagaagctgatcaagtgtgatgagatccaggtggacagcgaggagcctgtgtttgaagctgtgatcaactgggtgaagcacgccaagaaggagcgggaggagagcctgcccaacctgctgcagtatgtgaggatgcccctgctgaccccccgctacatcacagatgtgattgatgctgagcccttcatccgctgcagcctgcagtgccgggacctggtggatgaggccaagaagttccacctgcggcctgagctgcggagccagatgcagggccccaggacccgggcccggctgtag

SEQ ID NO: 114926 - DNA, 1821 bp, Artificial Sequence
  derived and/or modified sequence
atggatgtgaacaagtttgaggcctctgtgggcttcctggatgtgaagaagttcctgagcacctggaagctgcagaaccccaggacccactttgtgctgagcccccactgcttcatgggcggcatcatggcccccaaggacatcatgaccaacacccacgccaagagcatcctgaacagcatgaacagcctgaggaagagcaacaccctgtgtgatgtgaccctgcgggtggagcagaaggacttccctgcccacagaattgtgctggccgcctgcagcgactacttctgtgccatgttcaccagcgagctgtctgagaagggcaagccctacgtggacatccagggcctgacagccagcaccatggagatcctgctggactttgtgtacacagaaacagtgcacgtgacagtggagaatgtgcaggagctgctgcctgctgcctgcctgctgcagctgaagggcgtgaagcaggcctgctgtgagttcctggagagccagctggaccccagcaactgcctgggcatccgggactttgctgagacccacaactgtgtggacctgatgcaggccgctgaggtgttcagccagaagcacttccctgaggtggtgcagcacgaggagttcatcctgctgagccagggcgaggtggagaagctgatcaagtgtgatgagatccaggtggacagcgaggagcctgtgtttgaagctgtgatcaactgggtgaagcacgccaagaaggagcgggaggagagcctgcccaacctgctgcagtatgtgaggatgcccctgctgaccccccgctacatcacagatgtgattgatgctgagcccttcatccgctgcagcctgcagtgccgggacctggtggatgaggccaagaagttccacctgcggcctgagctgcggagccagatgcagggccccaggacccgggcccggctgggcgccaatgaggtgctgctggtggtgggcggcttcggcagccagcagagccccattgatgtggtggagaagtatgaccccaagacccaggagtggagcttcctgcccagcatcaccaggaagagaagatatgtggcctctgtgtccctgcatgaccgcatctacgtgattggaggctatgatggccgcagccggctgagctctgtggagtgcctggactacacagcagatgaagatggagtgtggtacagcgtggcccccatgaatgtgcggcggggcctggccggggccaccaccctgggggacatgatctacgtgtctgggggctttgatggcagcagaagacacacctccatggagagatatgaccccaacatcgaccagtggagcatgctgggggacatgcagacagcccgggagggcgccggcctggtggtggccagcggggtcatctactgcctgggcggctatgatggcctgaacatcctgaacagcgtggagaagtatgacccccacacaggccactggaccaacgtgacccccatggccaccaagaggtctggggccggcgtggccctgctgaatgaccacatctacgtggtgggcggctttgatggaacagcccacctgagctctgtggaggcctacaacatcagaacagacagctggaccaccgtgacctccatgaccaccccccgctgctacgtgggcgccaccgtgctgcggggccgcctgtatgccatcgccggctatgatggcaacagcctgctgagcagcattgagtgctatgaccccatcatcgacagctgggaggtggtgacctccatgggcacccagagatgtgatgctggggtgtgtgtgctgcgggagaagtag

SEQ ID NO: 114927 - DNA, 1033 bp, Artificial Sequence
  derived and/or modified sequence
gcagagtatatactgaggtctgtggatcctaaggctcagaggattctcgccgcagcgttgttcggcccgaaaaggccattgtggacaatggacgtgaataaatttgaggcctctgtgggttttctcgatgtcaaaaagttcctcagtacctggaagttgcagaatccaaggacccattttgttctttctccgcactgctttatgggaggcattatggcccccaaagacataatgacaaatactcatgctaaatccatcctcaattcaatgaactccctcaggaagagcaataccctctgtgatgtgacattgagagtagagcagaaagacttccctgcccatcggattgtgctggctgcctgtagtgattacttctgtgccatgttcactagtgagctctcagagaaggggaaaccttatgttgacatccaaggtttgactgcctctaccatggaaattttattggactttgtgtacacagaaacagtacatgtgacagtggagaatgtacaagaactgcttcctgcagcctgtctgcttcagttgaaaggtgtgaaacaagcctgctgtgagttcttagaaagtcagttggacccttctaattgcctgggtattagggattttgctgaaacccacaattgtgttgacctgatgcaagcagctgaggtttttagccagaagcattttcctgaagtggtacagcatgaagagttcattcttctgagtcaaggagaggtggaaaagctaatcaagtgcgacgaaattcaggtggattctgaagagccagtctttgaggctgtcatcaactgggtgaagcatgccaagaaagagcgggaagaatccttgcctaacctgctacagtatgtgcggatgcccctactaacccccaggtatatcacagatgtaatagatgctgagcctttcatccgctgtagtttacaatgcagggatctggttgatgaagcaaagaagtttcatctgaggcctgaacttcggagtcagatgcagggacccaggacaagggctcgcctag

SEQ ID NO: 114928 - DNA, 1999 bp, Artificial Sequence
  derived and/or modified sequence
agaggattctcgccgcagcgttgttcggcccgaaaaggccattgtggacaatggacgtgaataaatttgaggcctctgtgggttttctcgatgtcaaaaagttcctcagtacctggaagttgcagaatccaaggacccattttgttctttctccgcactgctttatgggaggcattatggcccccaaagacataatgacaaatactcatgctaaatccatcctcaattcaatgaactccctcaggaagagcaataccctctgtgatgtgacattgagagtagagcagaaagacttccctgcccatcggattgtgctggctgcctgtagtgattacttctgtgccatgttcactagtgagctctcagagaaggggaaaccttatgttgacatccaaggtttgactgcctctaccatggaaattttattggactttgtgtacacagaaacagtacatgtgacagtggagaatgtacaagaactgcttcctgcagcctgtctgcttcagttgaaaggtgtgaaacaagcctgctgtgagttcttagaaagtcagttggacccttctaattgcctgggtattagggattttgctgaaacccacaattgtgttgacctgatgcaagcagctgaggtttttagccagaagcattttcctgaagtggtacagcatgaagagttcattcttctgagtcaaggagaggtggaaaagctaatcaagtgcgacgaaattcaggtggattctgaagagccagtctttgaggctgtcatcaactgggtgaagcatgccaagaaagagcgggaagaatccttgcctaacctgctacagtatgtgcggatgcccctactaacccccaggtatatcacagatgtaatagatgctgagcctttcatccgctgtagtttacaatgcagggatctggttgatgaagcaaagaagtttcatctgaggcctgaacttcggagtcagatgcagggacccaggacaagggctcgcctaggagccaatgaagtgcttttggtggttgggggctttggaagccagcagtctcccattgatgtggtagagaaatatgaccccaagactcaggagtggagctttttgccaagcatcactcgtaagagacgttatgtggcctcagtgtcccttcatgaccggatctacgtcattggtggctatgatggccgttcccgccttagttcagtggaatgtctagactacacagcagatgaggatggggtctggtattctgtggcccctatgaatgtccgacgaggtcttgctggagccaccaccctgggagatatgatctatgtctctggaggctttgatggaagcaggcgtcacaccagtatggagcgctatgatccaaacattgaccagtggagcatgctgggagatatgcagacagcccgggaaggtgccggactcgtagtggccagtggagtgatctactgtctaggaggatatgacggcttgaatatcttaaattcagttgagaaatacgaccctcatacaggacattggactaatgttacaccaatggccaccaagcgttctggtgcaggagtagccctgctgaatgaccatatttatgtggtggggggatttgatggtacagcccacctttcttccgttgaagcatacaacattcgcactgattcctggacaactgtcaccagtatgaccactccacgatgctatgtaggggccacagtgcttcgggggagactctatgcaattgcaggatatgatggtaattccctgctaagtagcattgaatgttatgaccctatcatcgacagctgggaagtcgtgacatccatgggaacccagcgctgtgatgctggtgtttgtgttctccgcgagaagtgaccattgttggagcaccatccagagctagtgaccagtccagtggacagttagtgggagaatcaaaaatcctttccagaatgtctgtttctcactatgtgcaccgggtgattacaggcaccagtgcagtg

SEQ ID NO: 114929 - DNA, 948 bp, Artificial Sequence
  derived and/or modified sequence
atggacgtgaacaagttcgaggccagcgtgggcttcctggacgtgaagaaatttttgtctacctggaagttacagaatcctcgaacacatttcgtactgtcacctcattgttttatgggcggaataatggctccaaaagacatcatgacaaatactcacgccaaatctatcctgaacagtatgaactccctcaggaagtctaacactctctgcgatgtgacactgcgtgtggagcagaaggactttcccgcccataggattgtgcttgccgcttgtagtgattacttctgtgctatgttcactagtgagctgtctgagaaaggtaaaccctacgtggatattcagggcttgacggcctctacaatggagattctgttggattttgtttacactgagaccgtacacgtcaccgttgaaaacgtgcaagaactgctgcccgcagcctgtctactgcagcttaaaggcgtcaagcaagcctgttgtgagtttttagagagccagcttgatccatctaattgtctgggtatccgcgactttgccgagacccataattgtgttgacctgatgcaggccgccgaagtttttagccagaagcactttcccgaagtggtgcagcacgaggaattcattctcctttcacagggggaggtggaaaaactgataaagtgcgacgaaattcaagtggatagcgaggaaccggtttttgaagctgtaatcaattgggtgaagcacgcgaagaaggagcgagaggagtcactgcctaacctgctgcaatacgtgaggatgcctttgctgacgcctcgatacattaccgatgtcatcgatgccgaacccttcatcagatgttctttacagtgtcgggacttggttgacgaagccaaaaagttccacctccgcccagaattacgctcccagatgcagggcccacggacccgcgctagactttag

SEQ ID NO: 114930 - DNA, 1821 bp, Artificial Sequence
  derived and/or modified sequence
atggacgtgaacaagttcgaggccagcgtgggcttcctggacgtgaaaaagttcctctccacatggaagttacagaatccacggacacacttcgtcctttctccccactgtttcatggggggaatcatggcacccaaggatattatgacaaacacacatgcaaaatcaatacttaatagcatgaacagtctgcggaagagtaataccctctgcgacgttacccttagagtagaacagaaggactttccggcccatagaattgttttggctgcctgctctgattacttttgcgcgatgtttacatccgaactgtccgagaagggtaaaccatacgtggacatccagggacttacggcctctaccatggaaatcttactcgactttgtctacacagagacagtgcatgtgaccgtagaaaacgtgcaggaattacttcctgcggcatgtctactgcaacttaagggagtcaagcaggcctgctgcgagtttctagaaagccagctcgacccctctaactgcctgggtatacgggattttgcggagactcataattgtgttgatctgatgcaggccgctgaggttttcagtcagaaacatttcccggaggtggtccagcacgaggagttcattctcttatcccagggagaggtcgaaaaactcatcaaatgtgatgagattcaggtggacagcgaagaacccgtgtttgaagccgtgattaactgggtgaaacatgctaagaaagagagagaagaaagcttaccaaatctgttacagtatgtgcggatgccgctgctcactccccgctatattacggacgtgattgacgccgagccttttatacgttgttccctgcagtgtagggatctggtggacgaagctaagaagttccatctgaggccggaactgcgttctcagatgcaaggcccgcggactcgagccagattaggagctaacgaggttctgctcgtggtcggcggtttcgggtcccagcagtcccccatcgacgtggttgagaagtatgatcccaagacccaggagtggtcctttcttccttccatcaccagaaaaaggcggtacgtagcctccgtgtctctacatgataggatttatgtcatcggcggttatgacggccgctccaggctgagttccgtcgagtgcctggactataccgctgacgaggacggcgtttggtacagtgtggcccctatgaatgtgagacggggcctggctggtgccaccactttgggtgatatgatctacgtttcaggaggattcgatggtagccggcggcacactagcatggaaagatacgatcccaatatcgatcagtggagcatgctgggagacatgcagactgcaagagagggcgcgggtctggtggtcgcatccggggttatctattgcctgggcgggtacgacggtttgaatatcctgaactcagtggagaagtacgacccccatactgggcactggacaaatgtgactcctatggctacgaaaagatcaggggccggagtggcacttctgaacgaccacatctatgtcgtgggagggttcgacggaacagcccaccttagctctgtcgaagcatacaacatccggaccgactcttggacaaccgtaacttcgatgacgactccacggtgctacgtgggagccacggttttgcgcggaagattatatgctattgctgggtatgatggcaacagcttgctgtcctccattgagtgttatgacccaattattgacagctgggaggtggtgacctccatgggcacgcagcgctgcgacgctggcgtctgtgtcctgagagaaaagtag

SEQ ID NO: 114931 - DNA, 948 bp, Artificial Sequence
  derived and/or modified sequence
atggacgtgaacaagtttgaagcgtcggtcggatttctggacgttaaaaagttcctttccacttggaagctgcagaatcccaggacacactttgttttgtccccccattgtttcatggggggtatcatggccccaaaggatatcatgactaacacgcacgccaagagtattctgaatagcatgaactcgctgaggaagagcaatactttgtgtgacgtaacgttgagagtagagcaaaaggacttccccgcacacagaatagttctcgctgcctgttctgactatttctgtgccatgttcacttcagaactgtctgagaagggaaagccatacgtcgatatccaaggtctaactgcgagtaccatggaaatattgctggactttgtctataccgaaaccgttcacgttacggtggagaatgtgcaggaattgctgccagcagcctgcctgctacagctgaaaggcgtaaagcaggcatgttgtgaattcctggagtcccaacttgacccctctaactgtctgggtatcagagatttcgctgaaactcacaattgcgttgatctcatgcaggccgcagaggtgttcagtcagaaacatttccccgaagtcgtgcagcatgaggagtttattctcctctctcagggagaggtggagaaactcatcaagtgtgacgaaattcaggtagactcagaagagcctgtatttgaggcagttatcaattgggtgaagcacgctaagaaggaaagagaagagtcattgccaaacctgcttcagtacgttcggatgccactcctgacaccgcgttacatcactgacgtcatcgacgctgaaccgttcattcgctgtagcctgcagtgccgcgaccttgttgatgaagctaaaaaattccacctccgcccagaactccgcagccagatgcagggccctaggactagggcacggttgtag

SEQ ID NO: 114932 - DNA, 1821 bp, Artificial Sequence
  derived and/or modified sequence
atggacgtgaataaatttgaggcttctgttggattcctcgacgtaaagaagtttctgtccacctggaagctgcaaaacccccgaacacactttgtgctgtccccgcactgtttcatgggaggaattatggcccctaaagatataatgacaaacacccacgccaaaagtattctcaactctatgaactcgctccgaaaatccaacaccctgtgcgacgtgacacttcgggtagaacaaaaggattttccagcccacaggatcgtccttgccgcttgttctgactatttctgcgcgatgttcacatctgaattatcagagaagggcaagccctatgtcgatatccaaggactgactgcatctacaatggaaatacttcttgattttgtatatacggaaactgtacacgtgaccgtggaaaacgtccaggaattgctgccagccgcatgtctgctccagctgaaaggagtgaagcaggcatgttgcgaattcctggagtctcaactcgatccttctaattgtctgggcatccgggatttcgcggaaacccacaactgcgtggatctcatgcaggctgcagaagtcttctcccaaaaacattttcccgaggtggtccagcacgaagaattcattctgctgtctcagggagaggttgaaaagttaattaagtgcgatgaaatccaggtcgactctgaggaacccgtttttgaagctgttatcaactgggtcaaacacgccaagaaggaaagagaggaatctctgcccaatctgttgcagtacgtgaggatgcctttgctgacaccaagatatatcaccgatgtgatcgacgccgagcctttcattaggtgttctttgcagtgcagagatttagtcgatgaagcaaaaaagtttcatctccgccctgaactgcggagtcagatgcaggggcctcgtactcgcgctagactgggagctaatgaagttctgcttgtcgtcgggggttttggctcacagcagtcccccatcgacgttgtcgagaagtacgaccctaagacacaagaatggagcttcctgccatccattactcggaagaggagatacgtcgcctctgtctcgctgcatgatcggatctatgtgattggcggatacgacggccgatcaaggctgtcgtccgtggagtgtctggactacactgctgacgaggacggcgtgtggtacagcgtggctcctatgaacgtaagaagaggcctggctggggctacaactttgggcgatatgatttacgtttccgggggtttcgatgggtcgaggaggcatacatccatggaaaggtacgatcctaacattgaccaatggagcatgctgggggatatgcagaccgctagagagggagcgggtttggtggtcgcctctggggtcatatactgcctgggcggatatgacggtttaaatatccttaattccgtcgagaagtatgacccacatacaggacattggacaaacgttactcctatggctacaaagcgatctggggctggagtagctctgcttaatgaccacatttatgtggtgggcggattcgacggcactgcccatttgtcaagcgtcgaagcctacaatatcaggaccgactcttggaccacagtcacgagcatgactacacctagatgctatgttggcgcaaccgttcttcgaggaagactttacgctatcgctggatatgacgggaacagtcttctgtcttccattgaatgctacgatccaatcatagacagctgggaggttgtgaccagcatgggcacacaacggtgtgacgcaggagtatgcgtgttgcgcgagaagtag

SEQ ID NO: 114933 - protein, 1186 aa, Artificial Sequence
  derived and/or modified sequence
MEVDTEEKRHRTRSKGVRVPVEPAIQELFSCPTPGCDGSGHVSGKYARHRSVYGCPLAKKRKTQDKQPQEPAPKRKPFAVKADSSSVDECDDSDGTEDMDEKEEDEGEEYSEDNDEPGDEDEEDEEGDREEEEEIEEEDEDDDEDGEDVEDEEEEEEEEEEEEEEEENEDHQMNCHNTRIMQDTEKDDNNNDEYDNYDELVAKSLLNLGKIAEDAAYRARTESEMNSNTSNSLEDDSDKNENLGRKSELSLDLDSDVVRETVDSLKLLAQGHGVVLSENMNDRNYADSMSQQDSRNMNYVMLGKPMNNGLMEKMVEESDEEVCLSSLECLRNQCFDLARKLSETNPQERNPQQNMNIRQHVRPEEDFPGRTPDRNYSDMLNLMRLEEQLSPRSRVFASCAKEDGCHERDDDTTSVNSDRSEEVFDMTKGNLTLLEKAIALETERAKAMREKMAMEAGRRDNMRSYEDQSPRQLPGEDRKPKSSDSHVKKPYYGKDPSRTEKKESKCPTPGCDGTGHVTGLYPHHRSLSGCPHKDRVPPEILAMHESVLKCPTPGCTGRGHVNSNRNSHRSLSGCPIAAAEKLAKAQEKHQSCDVSKSSQASDRVLRPMCFVKQLEIPQYGYRNNVPTTTPRSNLAKELEKYSKTSFEYNSYDNHTYGKRAIAPKVQTRDISPKGYDDAKRYCKDPSPSSSSTSSYAPSSSSNLSCGGGSSASSTCSKSSFDYTHDMEAAHMAATAILNLSTRCREMPQNLSTKPQDLCATRNPDMEVDENGTLDLSMNKQRPRDSCCPILTPLEPMSPQQQAVMNNRCFQLGEGDCWDLPVDYTKMKPRRIDEDESKDITPEDLDPFQEALEERRYPGEVTIPSPKPKYPQCKESKKDLITLSGCPLADKSIRSMLATSSQELKCPTPGCDGSGHITGNYASHRSLSGCPRAKKSGIRIAQSKEDKEDQEPIRCPVPGCDGQGHITGKYASHRSASGCPLAAKRQKDGYLNGSQFSWKSVKTEGMSCPTPGCDGSGHVSGSFLTHRSLSGCPRATSAMKKAKLSGEQMLTIKQRASNGIENDEEIKQLDEEIKELNESNSQMEADMIKLRTQITTMESNLKTIEEENKVIEQQNESLLHELANLSQSLIHSLANIQLPHMDPINEQNFDAYVTTLTEMYTNQDRYQSPENKALLENIKQAVRGIQV

SEQ ID NO: 114934 - DNA, 4662 bp, Artificial Sequence
  derived and/or modified sequence
ctgttgccgcgccgggtgggtgcattttaattttttcattccctgaactatgggttatgatatccatactcactgaagacaaaaagccaccttttctgcgtcttggtggcatgcatgtgtctcatcatcctttcaaacttgtggtggaacagggttttcttccctgtctgtgtattttgagccagcacagttaccaaaattgaacttgtctttcgcttgtgaacggttgtggtcattgtgagggcgggtcatgaggaggctgtagccaaggacgaggtgtgtgcggctgttgcctggacgtttgtccaatccacgttgacatttgagggatcacagcgtgtgaaaatgaactcagaggagaattggtgaattcctatccagtgggcattttcaaaccctggtcgacggcggaagaatatcaggtcctgagatcacccacccggcgcggcaacagtgcagagtggccacatctggtggaagaagaaaaaaatgtagttattgaattcaatcaagtgtttgcatctttcaagctatcaacaaaattccatcaagaaaggttccagttggtctcacagacgtatggatatccgaggagccacctaaagatggagaaatcaaggcatagagagattaagtgactttgccacagtcacaagctggagaggaccaggagtagagcttagagcgagcccctgactctgggcctgcgtcctgccaggagtcacgctgcctccgttcctaggagagaagacttcctgtaagatggaggtggacaccgaggagaagcggcatcgcacgcggtccaaaggggttcgagttcccgtggaaccagccatacaagagctgttcagctgtcccacccctggctgtgacggcagtggtcatgtcagtggcaaatatgcaagacacagaagtgtatatggttgtcccttggcgaaaaaaagaaaaacacaagataaacagccccaggaacctgctcctaaacgaaagccatttgccgtgaaagcagacagctcctcagtggatgagtgtgacgacagtgatgggactgaggacatggatgagaaggaggaggatgagggggaggagtactccgaggacaatgacgagccaggggatgaggacgaggaggacgaggagggggaccgggaggaggaggaggagatcgaggaggaggatgaggacgatgacgaggatggagaagatgtggaggatgaagaagaggaagaggaggaggaggaggaggaggaagaggaagaagaaaacgaagaccatcaaatgaattgtcacaatactcgaataatgcaagacacagaaaaggatgataacaatagtgacgaatatgacaattacgatgaactggtggccaagtcattgttaaacctcggcaaaatcgctgaggatgcagcctaccgggccaggactgagtcagaaatgaacagcaatacctccaatagtctggaagacgatagtgacaaaaacgaaaacctgggtcggaaaagtgagttgagtttagacttagacagtgatgttgttagagaaacagtggactcccttaaactattagcccaaggacacggtgttgtgctctcagaaaacatgaatgacagaaattatgcagacagcatgtcgcagcaagacagtagaaatatgaattacgtcatgttggggaagcccatgaacaacggactcatggaaaagatggtggaggagagcgatgaggaggtgtgtctgagcagtctggagtgtttgaggaatcagtgcttcgacctggccaggaagctcagtgagaccaacccgcaggagaggaatccgcagcagaacatgaacatccgtcagcatgtccggccagaagaggacttcccaggaaggacgccggacagaaactactcggacatgctgaacctcatgcggctggaggagcagttgagcccccggtcgagagtgtttgccagctgtgcgaaggaggatgggtgtcatgagcgggacgacgataccacctctgtgaactcggacaggtctgaagaggtgttcgacatgaccaaggggaacctgaccctgctggagaaagccatcgctttggaaacggaaagagcaaaggccatgagggagaagatggccatggaagctgggaggagggacaatatgaggtcatatgaggaccagtctccgagacaacttcccggggaggacagaaagcctaaatccagtgacagccatgtcaaaaagccatactatggtaaagatccctcaagaacagaaaagaaagagagcaagtgtccaacccccgggtgtgatggaaccggccacgtaactgggctgtacccacatcaccgcagcctgtccggatgcccgcacaaagatagggtccctccagaaatccttgccatgcatgaaagtgtcctcaagtgccccactccgggctgcacggggcgcgggcatgtcaacagcaacaggaactcccaccgaagcctctccggatgcccgatcgctgcagcagagaaactggccaaggcacaggaaaagcaccagagctgcgacgtgtccaagtccagccaggcctcggaccgcgtgctcaggccaatgtgctttgtgaagcagctggagattcctcagtatggctacagaaacaatgtccccacaactacgccgcgttccaacctggccaaggagctcgagaaatattccaagacctcgtttgaatacaacagttacgacaaccatacttatggcaagcgagccatagctcccaaggtgcaaaccagggatatatcccccaaaggatatgatgatgcgaagcggtactgcaaggaccccagccccagcagcagcagcaccagcagctacgcgcccagcagcagcagcaacctgagctgcggcgggggcagcagcgccagcagcacgtgcagcaagagcagcttcgactacacgcacgacatggaggcggcccacatggcggccaccgccatcctcaacctgtccacgcgctgccgcgagatgccgcagaacctgagcaccaagccgcaggacctgtgcgccacgcggaaccctgacatggaagtggatgagaacgggaccctggacctcagcatgaacaagcagaggccgcgggacagctgctgccccatcctgacccctctggagcccatgtccccccagcagcaggcagtgatgaacaaccggtgtttccagctgggcgagggcgactgctgggacttgcccgtagactacaccaaaatgaaaccccggaggatagacgaggacgagtccaaagacattactccagaagacttggacccattccaggaggctctagaagaaagacggtatcccggggaggtgaccatcccaagtcccaaacccaagtaccctcagtgcaaggagagcaaaaaggacttaataactctgtctggctgccccctggcggacaaaagcattcgaagtatgctggccaccagctcccaagaactcaagtgccccacgcctggctgtgatggttctggacatatcaccggcaattatgcttctcatcggagcctttcaggttgcccaagagcaaagaaaagaggtatcaggatagcacagagcaaagaagataaagaagatcaagaacccatcaggtgtccggtccccgggtgcgacggccagggccacatcactgggaagtacgcgtcccatcgcagcgcctccgggtgccccttggcggccaagaggcagaaagaggggtacctgaatggctcccagttctcctggaagtcggtcaagacggaaggcatgtcctgccccacgccaggttgcgacggctcaggccacgtcagcggcagcttcctcacacaccgcagcttgtcaggatgcccgagagccacgtcagcgatgaagaaggcaaagctttctggagagcagatgctgaccatcaaacagcgggccagcaacggtatagaaaatgatgaagaaatcaaacagttagatgaagaaatcaaggagctaaatgaatccaattcccagatggaagccgatatgattaaactcagaactcagattaccacgatggagagcaacctgaagaccatcgaagaggagaacaaagtagttgagcagcagaacgagtctctcctccacgagctggcgaacctgagccagtctctgatccacagcctggctaacatccagctgccgcacatggatccaatcaatgaacaaaattttgatgcttacgtgactactttgacggaaatgtatacaaatcaagatcgttatcagagtccagaaaataaagccctactggaaaatataaagcaggctgtgagaggaattcaattcaggtctgaacagctgctgtagtgatgaaactcttgcttaaaaaggatgcctcttgttttttgctgctgtaacttaccagaaagtgttctatatttatttctgtttgaatttgaaacagtgttatgcttacaagacttcataatgattttatgtcttgctttaaagatagtacctgcagaatagtttttgaatacacccacattttgtacgtttccatgtaagctgacatagtgttctgccatgtaatgtttatagctgctgatgtatgcacatttgggggtatatctatttctgaagaggtaagctgatcaaaataaatagagtgtaaattctttttaatgc

SEQ ID NO: 114935 - DNA, 3561 bp, Artificial Sequence
  derived and/or modified sequence
atggaggtggacacggaagagaaacggcatcgcacccggtcaaaaggggttagggtgccggtagaacctgccatacaggaactgttttcatgtcctacacctggatgtgatggctctggccacgtctctggcaagtacgcccggcacaggtccgtgtatggatgtccactggccaaaaagaggaaaactcaggacaagcagccgcaagagccggccccaaaaaggaagccttttgccgtgaaggctgactcgagctccgttgacgaatgcgatgactccgatggtaccgaggacatggatgagaaggaagaagatgagggcgaggagtactccgaggacaatgacgaaccaggggatgaggatgaggaagacgaggaaggagatcgagaggaagaggaggaaatagaagaggaagatgaggacgatgatgaggacggcgaagacgtggaggatgaggaggaagaggaagaagaggaagaagaggaggaagaggaggaggagaatgaagaccaccagatgaactgccacaatactagaataatgcaggacacggagaaggatgataacaataatgatgaatatgacaattacgacgagctcgtcgcgaaatccctgctcaatctgggcaagattgccgaggacgccgcctacagggcgcggactgagtctgaaatgaactctaacacaagcaattccctcgaggacgattccgacaaaaatgagaacttgggaaggaagagcgagctgtctctcgacctggacagcgacgtggtgcgggagaccgtggattctctgaaactgctggcacagggacatggggttgttctcagcgagaacatgaatgacaggaactacgccgactccatgagccaacaagattcccgaaatatgaattatgtaatgctgggaaaacccatgaataatgggttgatggaaaagatggtagaggaaagcgatgaagaggtgtgcctcagtagtctcgagtgcctgcgcaatcagtgtttcgaccttgcccgcaaactgtcggaaacaaatccccaagaaaggaacccgcaacagaacatgaatatccgtcagcatgtgcggcccgaagaagacttccccggacgcacaccggataggaactactctgatatgcttaaccttatgagactggaggagcagctgtcgcctcgctctcgagtctttgccagctgtgcaaaggaagatggctgtcatgaaagggacgacgataccaccagcgtgaattccgacaggtccgaggaggtattcgatatgaccaaaggaaatcttaccttgcttgagaaagctatcgctctggaaactgaacgggctaaggccatgcgcgagaagatggccatggaggccggacgccgggataatatgcgttcttacgaggaccagtcacctagacagctcccaggagaagatagaaaacctaagtccagcgattcccacgttaaaaagccgtattatggtaaagacccttccagaacagaaaaaaaagaatctaagtgtcctacgcccgggtgtgacggcaccggccacgtgactggcctgtacccgcaccatcgctccctctctggctgtccgcacaaggatcgtgtcccacctgaaattctcgctatgcatgagtccgtgctgaagtgtcctaccccaggatgtactgggaggggccacgtgaattccaaccgcaatagtcatcgtagtctcagtggttgtccaatcgccgcagccgagaaactggccaaggctcaagagaagcatcagtcgtgtgatgtttcaaaaagctctcaggcttcagatcgcgtactgaggcccatgtgctttgtcaaacaactggaaattccgcaatatggatatagaaacaatgtgcctaccacaactcccagaagcaacttagcaaaggagctcgagaagtactctaagacatcattcgagtacaattcgtacgataatcacacatatggcaaaagggccatcgcaccaaaggttcaaacccgagacatcagccctaagggctatgatgatgcgaaaaggtactgcaaagatcctagcccttcatcctccagtacatccagctatgccccctcttccagctcaaacctgagctgtgggggcggaagctctgcttcctctacgtgttcgaaatccagttttgattatactcacgatatggaggccgctcacatggccgctacagcgatattgaacttgagcaccagatgcagagaaatgcctcaaaatctgtctacaaagccgcaagacctttgcgctacccgaaatcccgacatggaggtggacgaaaacggcaccctggacctgagtatgaacaagcagagaccccgggattcatgctgccccattctcaccccacttgagccaatgagcccccaacagcaggcagtcatgaacaaccgatgttttcagctgggggagggcgattgctgggatctgcctgtcgactacactaagatgaaacccaggaggatcgacgaggacgagagtaaagacattactcctgaggatttggaccccttccaggaagctctcgaagagcggcggtaccccggcgaagtcaccatcccgagccccaaacctaagtatccacaatgtaaggagtcgaagaaggatttaatcacactcagtggatgtcctcttgcagataaatcaattcggtcaatgctcgctacctcgtcccaggaattgaagtgtcctacaccgggatgtgatggatctggccatatcactggcaactacgcctcacacaggtccctcagcggttgtccccgcgccaaaaagagcggaattagaatcgcacagtccaaggaggataaggaggatcaggaacccatccggtgccctgtccccggctgtgatggtcaggggcacatcaccggcaagtacgcatcacacaggtcagcctcgggatgcccattggcagccaaacgtcagaaagacgggtaccttaacggttcccagttcagctggaagtccgtgaagaccgaagggatgtcatgtcccacccccggctgtgatggttctggccatgtgtctggtagctttctgacgcacaggtccctatcaggctgcccaagagcaacgagcgcaatgaagaaagctaagctaagcggcgagcagatgttgactattaagcagcgggcctccaacgggatcgaaaacgatgaagagattaagcagcttgacgaggaaattaaggagctgaacgagtcgaattcacagatggaggctgacatgatcaagctgagaacccagattaccacgatggaatccaatctgaagaccatagaggaagaaaataaagtgatagaacagcaaaacgaatccctgctccacgaactggccaatctttcccaatccctgatacactctctggccaacattcagcttcctcatatggatcccatcaacgagcagaacttcgatgcctatgtgactactctgacagagatgtacaccaaccaggaccggtaccaaagccccgagaacaaggcgttactggaaaatataaaacaggcagtgcgcggaattcaggtttag

SEQ ID NO: 114936 - DNA, 3561 bp, Artificial Sequence
  derived and/or modified sequence
atggaggtggacacagaggagaagaggcacaggaccaggagcaaaggagtgcgggtgcctgtggagcccgccatccaggagctgttcagctgccccaccccaggctgtgatggcagcggccacgtgtctgggaagtatgcccggcacaggtctgtgtatggctgccccctggccaagaagaggaagacccaggacaagcagccccaggagcccgcccccaagaggaagccctttgctgtgaaggctgacagcagctctgtggatgaatgtgatgacagtgatggaacagaggacatggatgagaaggaggaggatgaaggagaggagtacagcgaggacaatgatgagcctggagatgaagatgaagaagatgaggagggggaccgggaggaggaggaggagattgaggaggaggatgaagatgatgatgaagatggagaagatgtggaggatgaggaggaggaggaggaggaggaggaggaggaggaggaggaggaggagaatgaagaccaccagatgaactgccacaacacccgcatcatgcaggacacagagaaggatgacaacaacaatgatgaatatgacaactatgatgagctggtggccaagagcctgctgaacctgggcaagattgctgaagatgctgcctaccgggccaggacagaaagtgagatgaacagcaacaccagcaacagcctggaggatgacagcgacaagaatgaaaacctgggcaggaagtctgagctgagcctggacctggacagtgatgtggtgcgggagaccgtggacagcctgaagctgctggcccagggccacggcgtggtgctgtctgagaacatgaatgacagaaattatgctgacagcatgagccagcaggacagcaggaacatgaactacgtgatgctgggcaagcccatgaacaacggcctgatggagaagatggtggaggagagtgatgaggaggtgtgcctgagcagcctggagtgcctgaggaaccagtgctttgacctggccaggaagctgtctgagaccaacccccaggagaggaacccccagcagaacatgaacatccggcagcacgtgcggcctgaggaggacttccctggccgcaccccagacaggaactacagcgacatgctgaacctgatgaggctggaggagcagctgagccccaggagccgggtgtttgccagctgtgccaaggaggatggctgccacgagagagatgatgacaccacctctgtgaacagcgacagaagtgaggaggtgtttgacatgaccaagggcaacctgaccctgctggagaaggccatcgccctggagacagagcgggccaaggccatgagggagaagatggccatggaggccggccggcgggacaacatgaggagctatgaggaccagagcccccggcagctgcccggggaggacaggaagcccaagagcagtgacagccacgtgaagaagccctactacggcaaggaccccagcaggacagagaagaaggagagcaaatgtcccaccccaggctgtgatggcaccggccacgtgacaggcctgtacccccaccacaggagcctgagcggctgcccccacaaggacagagtgcccccagagatcctggccatgcatgagagcgtgctgaagtgccccaccccaggctgcaccggccggggccacgtgaacagcaacagaaacagccacaggagcctgagcggctgccccatcgctgctgctgagaagctggccaaggcccaggagaagcaccagagctgtgatgtgtccaagagcagccaggccagtgacagagtgctgcggcccatgtgctttgtgaagcagctggagatcccccagtatggctacagaaacaacgtgcccaccaccacccccaggagcaacctggccaaggagctggagaagtacagcaagaccagctttgagtacaacagctatgacaaccacacctacggcaagagggccatcgcccccaaggtgcagacccgggacatcagccccaagggctatgatgatgccaagcgctactgcaaggaccccagccccagcagcagcagcaccagcagctatgcccccagcagcagcagcaacctgagctgtggcggcggcagcagcgccagcagcacctgcagcaagagcagctttgactacacccatgacatggaggccgcccacatggccgccacagccatcctgaacctgagcacccgctgccgggagatgccccagaacctgagcaccaagccccaggacctgtgtgccaccagaaatccagacatggaggtggatgaaaatggcaccctggacctgtccatgaacaagcagaggccccgggacagctgctgccccatcctgacccccctggagcccatgagcccccagcagcaggccgtgatgaacaaccgctgcttccagctgggggagggggactgctgggacctgcctgtggactacaccaagatgaagcccaggagaattgatgaagatgagagcaaggacatcaccccagaggacctggaccccttccaggaggccctggaggagcggcgctacccaggagaggtgaccatccccagccccaagcccaagtacccccagtgcaaggagagcaagaaggacctgatcaccctgagcggctgccccctggccgacaagagcatccgctccatgctggccaccagcagccaggagctgaagtgccccaccccaggctgtgatggcagcggccacatcactggaaattatgccagccacaggagcctgagcggctgcccccgggccaagaagagcggcatcagaattgcccagagcaaggaggacaaggaggaccaggagcccatccgctgccctgtgcccggctgtgatggccagggccacatcaccgggaagtatgccagccacaggtctgccagcggctgccccctggccgccaagaggcagaaggatggctacctgaatggcagccagttctcctggaagtctgtgaagacagagggcatgagctgccccaccccaggctgtgatggcagcggccacgtgtctggcagcttcctgacccacaggagcctgagcggctgcccccgggccaccagcgccatgaagaaggccaagctgagcggggagcagatgctgaccatcaagcagagggccagcaatggaattgaaaatgatgaggagatcaagcagctggatgaggagatcaaggagctgaatgaaagcaacagccagatggaggccgacatgatcaagctgcggacccagatcaccaccatggagagcaacctgaagaccatcgaggaggagaacaaggtgattgagcagcagaatgaaagcctgctgcacgagctggccaacctgagccagagcctcatccacagcctggccaacatccagctgccccacatggaccccatcaatgagcagaactttgatgcctacgtgaccaccctgacagagatgtacaccaaccaggaccgctaccagagccctgagaacaaggccctgctggagaacatcaagcaggccgtgcggggcatccaggtgtag

SEQ ID NO: 114937 - DNA, 7063 bp, Artificial Sequence
  derived and/or modified sequence
ggtgggtgcattttaattttttcattccctggactatgggttatgatatccatactcactgaagacaaaaagccaccttttctgcgtcttggtggcatgcatgtgtctcatcatcctttcaaacttgtggtggaacagggttttcttccctgtctgtgtattttgagccagcacagttaccaaaattgaacttgtctttcgcttgtgagcggttgtggtcattgtgagggcgggtcatgaggaggctgtagccaaggacgaggtgtgtgcggctgttgcctggacgtttgtccaatccacgttgacatttgagggatcacagcgtgtgaaaatgaactcagaggagaattggtgaattcctatccagtgggcatcttcaaaccctggtcgacggcggaagaatatcaggtcctgagatcacccacccggcgcggcaacagtgcagagtggccacatctggtggaagaagaaaaaaatgtagttattgaattcaatcaagtgtttgcatctttcaagctatcaacaaaattccatcaagaaaggttccagttggtctcacagacgtatggatatccgaggagccacctaaagatggagaaatcaaggcatagagagattaagtgactttgccacagtcacaagctggagaggaccaggagtagagcttagagcgagcccctgactctgggcctgcgtcctgccaggagtcacgctgcctccgttcctaggagagaagacttcctgtaagatggaggtggacaccgaggagaagcggcatcgcacgcggtccaaaggggttcgagttcccgtggaaccagccatacaagagctgttcagctgtcccacccctggctgtgacggcagtggtcatgtcagtggcaaatatgcaagacacagaagtgtatatggttgtcccttggcgaaaaaaagaaaaacacaagataaacagccccaggaacctgctcctaaacgaaagccatttgccgtgaaagcagacagctcctcagtggatgagtgtgacgacagtgatgggactgaggacatggatgagaaggaggaggatgagggggaggagtactccgaggacaatgatgagccaggggatgaggacgaggaggacgaggagggggaccgggaggaggaggaggagatcgaggaggaggatgaggacgatgacgaggatggagaagatgtggaggatgaagaagaggaagaggaggaggaggaggaggaggaagaggaagaagaaaacgaagaccatcaaatgaattgtcacaatactcgaataatgcaagacacagaaaaggatgataacaataatgacgaatatgacaattacgatgaactggtggccaagtcattgttaaacctcggcaaaatcgctgaggatgcagcctaccgggccaggactgagtcagaaatgaacagcaatacctccaatagtctggaagacgatagtgacaaaaacgaaaacctgggtcggaaaagtgagttgagtttagacttagacagtgatgttgttagagaaacagtggactcccttaaactattagcccaaggacacggtgttgtgctctcagaaaacatgaatgacagaaattatgcagacagcatgtcgcagcaagacagtagaaatatgaattacgtcatgttggggaagcccatgaacaacggactcatggaaaagatggtggaggagagcgatgaggaggtgtgtctgagcagtctggagtgtttgaggaatcagtgcttcgacctggccaggaagctcagtgagaccaacccgcaggagaggaatccgcagcagaacatgaacatccgtcagcatgtccggccagaagaggacttccccggaaggacgccggacagaaactactcggacatgctgaacctcatgcggctggaggagcagttgagcccccggtcgagagtgtttgccagctgtgcgaaggaggatgggtgtcatgagcgggacgacgataccacctctgtgaactcggacaggtctgaagaggtgttcgacatgaccaaggggaacctgaccctgctggagaaagccatcgctttggaaacggaaagagcaaaggccatgagggagaagatggccatggaagctgggaggagggacaatatgaggtcatatgaggaccagtctccgagacaacttcccggggaggacagaaagcctaaatccagtgacagccatgtcaaaaagccatactatggtaaagatccctcaagaacagaaaagaaagagagcaagtgtccaacccccgggtgtgatggaaccggccacgtaactgggctgtacccacatcaccgcagcctgtccggatgcccgcacaaagatagggtccctccagaaatccttgccatgcatgaaagtgtcctcaagtgccccactccgggctgcacggggcgcgggcatgtcaacagcaacaggaactcccaccgaagcctctccggatgcccgatcgctgcagcagagaaactggccaaggcacaggaaaagcaccagagctgcgacgtgtccaagtccagccaggcctcggaccgcgtgctcaggccaatgtgctttgtgaagcagctggagattcctcagtatggctacagaaacaatgtccccacaactacgccgcgttccaacctggccaaggagctcgagaaatattccaagacctcgtttgaatacaacagttacgacaaccatacttatggcaagcgagccatagctcccaaggtgcaaaccagggatatatcccccaaaggatatgatgatgcgaagcggtactgcaaggaccccagccccagcagcagcagcaccagcagctacgcgcccagcagcagcagcaacctgagctgcggcgggggcagcagcgccagcagcacgtgcagcaagagcagcttcgactacacgcacgacatggaggcggcccacatggcggccaccgccatcctcaacctgtccacgcgctgccgcgagatgccgcagaacctgagcaccaagccgcaggacctgtgcgccacgcggaaccctgacatggaggtggatgagaacgggaccctggacctcagcatgaacaagcagaggccgcgggacagctgctgccccatcctgacccctctggagcccatgtccccccagcagcaggcagtgatgaacaaccggtgtttccagctgggcgagggcgactgctgggacttgcccgtagactacaccaaaatgaaaccccggaggatagacgaggacgagtccaaagacattactccagaagacttggacccattccaggaggctctagaagaaagacggtatcccggggaggtgaccatcccaagtcccaaacccaagtaccctcagtgcaaggagagcaaaaaggacttaataactctgtctggctgccccctggcggacaaaagcattcgaagtatgctggccaccagctcccaagaactcaagtgccccacgcctggctgtgatggttctggacatatcaccggcaattatgcttctcatcggagcctttcaggttgcccaagagcaaagaaaagtggtatcaggatagcacagagcaaagaagataaagaagatcaagaacccatcaggtgtccggtccccgggtgcgacggccagggccacatcactgggaagtacgcgtcccatcgcagcgcctccgggtgccccttggcggccaagaggcagaaagacgggtacctgaatggctcccagttctcctggaagtcggtcaagacggaaggcatgtcctgccccacgccaggatgcgacggctcaggccacgtcagcggcagcttcctcacacaccgcagcttgtcaggatgcccgagagccacgtcagcgatgaagaaggcaaagctttctggagagcagatgctgaccatcaaacagcgggccagcaacggtatagaaaatgatgaagaaatcaaacagttagatgaagaaatcaaggagctaaatgaatccaattcccagatggaagccgatatgattaaactcagaactcagattaccacgatggagagcaacctgaagaccatcgaagaggagaacaaagtgattgagcagcagaacgagtctctcctccacgagctggcgaacctgagccagtctctgatccacagcctggctaacatccagctgccgcacatggatccaatcaatgaacaaaattttgatgcttacgtgactactttgacggaaatgtatacaaatcaagatcgttatcagagtccagaaaataaagccctactggaaaatataaagcaggctgtgagaggaattcaggtctgaacagctgctgtagtgatgaaactcttgcttaaaaaggatgcctcttgttttttgctgctgtaacttaccagaaagtgttctatatttatttctgtttgaatttgaaacagtgttatgcttacaagacttcataatgattttatgtcttgctttaaagatagtacctgcagaatagtttttgaatacacccacattttgtacgtttccatgtaagctgacatagtgttctgccatgtaatgtttatagctgctgatgtatgcacatttgggggtatatctatttctgaagaggtaagctgatcaaaataaatagagtgtaaattctttttaatgctttagtgattaaatgttttagtattttgaactgaaatggacacacaaacacacacacgcacacacagacccacagctttgaatgatcatgttgtggctgagcagccgctttttagacgttatcattttgcctcatgttggaggactttatggaatttaagaaatacattttgtgtgcatattgtttcatagcaagaattcgttgcaaaaatgctttatttttgaacaatgcttggaaatattatgtgacttttttgtttgtttgttttaggaggatggtgtatggtgggggcaataaatgaggttttttgcattccaaggaaatggcatatggattaactgtaagaaatgaaataagtaatttattgtaagacaacatcaagccatggaaacttggcagaagattcaaagcagcttaaacagcacttttaaattaactcctaagcgttacatggttgtgactatggaaactccagttaagacaggatcttatcagaggtggacaacgtgaagatttccttttccattttcaataaactttggaacaaccttctcgtatctcccctagagtttcgtgcccctctgaactgtctgttattgcaatgtagtttatcaacagaatttgtgtgttttcgatttaagctaaaagataatttaagaacatttatttccccttttcactttaaaaaattatgattattcctattattgttatgaaccttcttattttacatttgagggataaaggcaaatgatttgtgagtcttctagttactggaccgagttttctgctggatctggtgggaaggcagctcggtaaagtttccctcctgctccccccgcccgactttgactctgaatcagcatttggtcctattcagaggactcttaccacgacgtttctgttctacacttgggtggagaccagttgaccatagagcatttgcagagcctcattgtttgatttcttgtgactattctaagaatgaatgcaatcagattttaaaagtaactaaatatacttcagcacttttttgctttaaactagatcatcttagacttgtttataccttccagatttgattgttttactcccaatgactgcactatatgtatgcataagaccacttttgagcgctgtgttcccccttctgagtagtcctttgacgacgtgttgtgttttctgatgttgacttgagttccatttagtagcatctcttccttccatgtcttgatgttatgcaggaagtacagacgtactttaaatttttgttatgaaataaaaaaaagatgggttttgtaaaaataaaaaaaaaatatttttagcagaacaggacttacagggtcattgtccccacaatgtgccagtcgactatttgcacttaccttgtcctatatatccgtacggaggtgtgcaattcctcgtgtcagtagccttgtgacactgaacctggatggattatagaggagccctcacggctgatcaataatgttgcaaagggagactacagggatctcacgacgaatattctgatacaatactcaacctcggtatatatatatgtgtataaatatatgtatatcccagcggcactttatactgttcactgtacaaaagcttacagttttccacaaggactttaataactagctgggaaaagacgatgtaattatttcggggctctgcggaaccttctctgtacagcgccccctttctgttgtgctattggttgcagctgccatgctcagaatgcgttttgagagctgaagcaaggtgcttgcagtcacctgaggccgtccgtgtggcccagggccccagctgcctttagggcccccattgttcataacagcatatgcatttccccaccgcgttgtgtctgcagcttctttgccaatatagtaatgcttttagtagagtactagatagtatcagttttggattcttattgttatcacctatgtacaatggaaagggattttaagcacaaacctgctgctcatctaacgttggtacataatctcaaatcaaaagttatctgtgactattatatagggatcacaaaagtgtcacatattagaatgctgacctttcatatggattattgtgagtcatcagagtttattataacttattgttcatattcatttctaagttaatttaagtaatcatttattaagacagaattttgtataaactatttattgtgctctctgtggaactgaagtttgatttatttttgtactacacggcatgggtttgttgacactttaattttgctataaatgtgtggaatcacaagttgctgtgatacttcatttttaaattgtgaactttgtacaaattttgtcatgctggatgttaacacatcttactctaaataaacaaggtgttgccacatttgtagcacgaaggatctctaa

SEQ ID NO: 114938 - DNA, 3561 bp, Artificial Sequence
  derived and/or modified sequence
atggaggtggacaccgaggagaagcggcaccggacccggagcaagggagttagggtgcccgtcgagcctgcaattcaggagctattttcctgccctacccccggatgtgacggctctggccacgtgagcggaaaatacgctcgtcataggtctgtgtacggctgccccctggccaagaagcgcaaaacccaggataaacagccacaggagcctgcaccaaagcgcaagccctttgccgtgaaggctgatagtagctccgtcgacgaatgcgacgactccgatggtactgaagacatggacgagaaggaagaggatgagggagaggagtatagtgaagacaatgatgagccaggagatgaggacgaagaagacgaggagggcgatagagaagaggaggaggagatcgaagaggaagacgaagacgacgatgaggatggcgaagacgtggaggatgaggaggaggaggaggaagaggaagaagaagaggaggaggaagaggaaaatgaagaccaccagatgaactgccacaataccaggatcatgcaggacactgaaaaggatgataataataacgacgagtacgataactacgacgagcttgtcgcaaagtccctgttaaatttgggtaaaatcgccgaagacgccgcttatcgggcccggaccgagagcgagatgaactctaatacctcaaatagcctggaagatgacagcgacaagaatgagaatttggggagaaaaagcgagctgtccctggatcttgatagtgacgtcgtgcgagaaacagtggactccctgaagcttctggcacaaggccatggcgtggttctcagcgaaaatatgaatgaccgcaactatgccgatagcatgtcgcagcaggactctcggaacatgaattacgtgatgctggggaagcccatgaacaacggcctgatggagaaaatggttgaggaaagcgatgaggaagtgtgcctgtcgagcctcgagtgcctcaggaatcagtgtttcgatctggccaggaagctgagcgaaaccaacccccaggagcgaaacccacagcagaacatgaatattcggcagcacgtccggcccgaggaagatttccctgggaggacaccagaccgaaattattccgatatgctgaacctcatgcggctggaagagcagctgagccccagatcaagggtttttgcttcttgcgccaaggaggatggctgtcacgagagggatgacgacaccacctcagttaacagcgacaggtcagaagaagtgtttgacatgacgaaggggaacctcaccctgctcgagaaggccatcgccctcgagaccgaaagagcgaaagcgatgcgcgagaaaatggccatggaagctggccggcgcgataacatgcgatcctacgaagaccagagtccccgtcagctgccaggcgaggatcgtaaacccaaatcctccgacagccatgtcaaaaaaccatattacggaaaagacccgagtcgtaccgaaaagaaggagagcaagtgtccaaccccagggtgtgacggcaccgggcacgtcactggtctctatcctcatcatcgaagtctaagcggttgcccccacaaagaccgtgttcccccagagatacttgctatgcacgagagtgtgctcaagtgccctactcctgggtgtaccgggaggggtcatgtcaattctaaccgcaatagtcacagatccctgtctgggtgtcctatcgccgcggctgagaaactggcaaaggctcaggaaaagcaccaatcatgtgacgtgagtaagtcttcacaggcaagcgaccgggtactgagacccatgtgctttgtcaaacagctggagatacctcagtatgggtaccggaacaatgtgcctacaacgacacctcgcagtaatctcgccaaggagttagaaaagtatagtaagacctcctttgaatacaactcatatgataatcacacatatggcaagagagccattgcaccaaaggtacagacgagagacatatcccccaagggctatgatgacgcgaaacgatactgtaaggatccttctccttcctcaagttccacaagctcctatgcgccctcatcatcatcaaatctgagctgtgggggcgggtcaagcgcatcctctacctgtagcaaatcaagcttcgattacacacacgacatggaggcagcgcatatggccgcgaccgccattttgaatttgtccactcgctgtagagaaatgccccagaatttgagtacaaagccacaggacctttgcgcaactcgcaaccccgacatggaagtggatgagaacggaacactggacctgtccatgaacaagcaacggccccgcgactcgtgctgccccattttaactcctttggagccaatgtctccacagcagcaggccgtgatgaataacagatgcttccagctgggggagggggattgctgggacttacccgtggactacacaaaaatgaagccccgaagaattgatgaagacgagagtaaagatatcaccccagaagacttggatccctttcaggaagccctagaagagcggcgctaccccggcgaggtgacaatcccctccccgaaaccaaagtacccccaatgcaaggagagtaaaaaagaccttataacactctctgggtgtcccttagctgataagagcatacgcagtatgctcgctacatcttcccaggagctcaagtgtccaactccagggtgtgacggttccggacacattaccgggaactatgcatcacatcgcagcctcagcggctgcccccgcgctaagaagtccgggattaggatcgcccagagtaaggaggataaggaagaccaggagccaattcggtgtcctgtgccaggatgcgacggccaaggccacatcacagggaagtatgccagccataggtcagcctcaggctgccccctggccgctaaaaggcaaaaggatggctatctgaacggcagccagttttcctggaagtcagtcaaaacggaaggaatgtcatgtcccacacccgggtgtgacgggtccggccacgtgtctgggagttttctgacccaccgatccctcagtggatgtcctcgcgctacttcagccatgaagaaggccaagcttagcggagagcaaatgctgactataaaacagagggcctccaacggaattgaaaatgacgaggaaattaaacagctagacgaagagataaaggagctcaatgagtccaactcccaaatggaggccgacatgataaagttgagaacccaaataacaactatggaatctaacctcaagaccatcgaagaggaaaataaggtgattgaacagcagaacgagtctcttttacacgaactggctaatctctcgcagtctcttatccatagcctggctaatatccaactcccccacatggacccaataaacgagcagaactttgatgcctacgtcacgacattgaccgagatgtatacaaaccaagataggtaccagtcgcctgaaaataaggcactgctagaaaacatcaaacaggccgtaagaggcatccaagtgtag

SEQ ID NO: 114939 - DNA, 3561 bp, Artificial Sequence
  derived and/or modified sequence
atggaagttgacactgaagagaagagacataggacacggtctaaaggggtacgagtgcccgtcgagcccgcaatccaggagctcttctcctgcccgacgcctggctgtgacggatccggtcacgtttctggaaagtacgctagacatagatcagtctacggttgtcccctcgccaagaagagaaaaacccaggataagcaacctcaggaaccggctcccaaacgcaagccgttcgcagttaaggccgattcctctagcgtggacgagtgcgacgattccgacggcaccgaggatatggacgagaaggaagaggatgagggggaagaatatagtgaggataacgacgaaccaggggatgaggacgaagaggatgaagagggtgaccgcgaagaggaagaggaaattgaagaggaggatgaggacgacgacgaggatggagaggacgtcgaagacgaggaggaagaggaggaggaagaggaagaagaggaggaggaagaagagaacgaggatcatcagatgaattgccataacactcggataatgcaggacacagaaaaggatgacaacaacaacgacgaatatgacaattatgacgaactcgttgcaaaatccttgttgaatttaggtaaaatcgccgaagatgctgcctaccgcgcaagaaccgaatctgagatgaatagcaacaccagtaatagcctggaggatgattccgataagaatgaaaatctgggaaggaaatctgagttatcgctggacttagatagcgacgtggtgagagaaaccgttgattccttgaagttattagcccaggggcacggagtggtgctcagcgagaacatgaatgataggaattacgctgacagcatgtcacagcaggattcaaggaacatgaactacgtgatgcttggtaagcctatgaacaatggacttatggaaaagatggttgaggagtcagatgaagaggtctgcttatcctcactcgagtgcctgcggaaccagtgttttgatctggctaggaagctgtctgagacaaaccctcaggaaaggaacccgcagcagaacatgaacatccgacagcatgtccggccagaagaagacttcccagggagaacccctgatcgcaattattcggacatgctcaacttgatgcgactcgaggagcaattatcacctcgcagtagggtgtttgcatcttgcgcaaaggaggacggttgccacgaaagggatgatgatactaccagtgtcaactccgaccgatcagaagaggtgttcgacatgacaaagggaaacttgaccctgcttgaaaaggctattgccctggagaccgagcgggctaaggccatgcgcgagaaaatggctatggaggctggcaggagggacaatatgaggagctacgaggatcaatcaccccgtcagctgccaggcgaagatcgcaagccaaagtccagcgactcacacgtgaaaaaaccatattacggcaaagatccgagccgtaccgagaagaaggagtccaagtgccctacgcctggttgtgacggcaccggccacgttaccggcctgtatccacatcacagatccctctccgggtgccctcacaaagatagagtgccccctgagatcctggctatgcacgaaagtgtcctaaaatgtccgacacctggatgtacggggagaggtcacgtgaactcaaacaggaattctcataggtcgttgagcggatgccctatcgcagccgcagagaaacttgcgaaagcccaggaaaaacatcagagctgcgacgtgtctaaatctagccaagcgtcagatagggtcttaagaccaatgtgcttcgtgaaacaactggagattccacaatatgggtaccgcaacaatgtcccgacaacaaccccaaggagcaatctggcaaaagagctcgagaaatatagtaagacctcgttcgagtataactcttacgacaatcacacttatgggaaacgagctattgcgccaaaggtgcaaacccgggatatatctcctaaaggatacgatgatgcgaaaagatactgcaaggatccttctccctcctcttcatcgacctctagctacgcaccatcatccagctctaacctgagttgtgggggtggctcctccgcatccagcacctgctcgaaaagcagctttgactacacccacgatatggaagccgctcatatggcagccacggccatcctgaacctgtctaccagatgtcgcgagatgccccagaacttgagcacaaagcctcaggacctgtgtgctaccaggaatcccgatatggaagtggacgaaaacggaacacttgacctttctatgaataagcagaggccgagggattcttgttgtcccattctgaccccactagaacctatgtctcctcagcaacaggccgtgatgaataataggtgctttcagctgggagagggggactgctgggacttaccggtcgactacacaaagatgaaaccccgaagaatcgacgaggatgaaagcaaagacatcacacccgaagatctggacccgtttcaagaggcccttgaggagcgccgataccccggagaggtgaccatcccttctccgaaacccaagtaccctcagtgtaaagagagcaagaaggatctcatcacactgagtgggtgcccgctcgccgataaatctatcagatccatgctcgctactagctctcaggagctcaagtgtccaacccccggttgcgatggatccggacatatcaccggcaactatgcaagtcacaggagcttgtcaggttgcccccgagcgaaaaaatccggaatccgtatagcacagtccaaggaggacaaggaagaccaagagcctataaggtgtccagtcccaggatgtgacgggcagggccatatcaccgggaagtacgcgtctcaccggagcgcatctggctgccccctggcagccaaacgacagaaagacggctatctgaatgggtctcagttctcatggaagtccgtgaaaactgagggtatgtcttgccctacacctggatgcgatggttcaggtcatgtgtccgggagcttcctgactcatcgaagcctgagcggctgtcctagagctacctctgccatgaaaaaagccaaacttagcggcgaacagatgcttaccattaaacagcgcgcttctaacgggattgagaacgatgaagaaatcaagcagctggatgaggagattaaagagctcaatgagtccaactctcaaatggaagccgatatgatcaaactacgcacccaaatcaccactatggagtcaaacttgaagactattgaagaggaaaataaggtgatcgaacaacagaatgagtccctgctgcacgaactggcgaatctgtctcagtctctgatccacagcctagccaacatacaactgccacatatggatccgatcaacgagcaaaactttgatgcatacgtaaccacccttacagagatgtacacaaaccaagatagataccagagtcctgagaataaagcactcctggagaacatcaagcaagccgtgcggggtatccaggtgtag

SEQ ID NO: 114940 - DNA, 3561 bp, Artificial Sequence
  derived and/or modified sequence
atggaggtggacaccgaggagaagagacacagaaccagaagcaagggcgtgagagtgcccgtggagcccgccatccaggagctgttcagctgccccacccccggctgcgacggcagcggccacgtgagcggcaagtacgccagacacagaagcgtgtacggctgccccctggccaagaagagaaagacccaggacaagcagccccaggagcccgcccccaagagaaagcccttcgccgtgaaggccgacagcagcagcgtggacgagtgcgacgacagcgacggcaccgaggacatggacgagaaggaggaggacgagggcgaggagtacagcgaggacaacgacgagcccggcgacgaggacgaggaggacgaggagggcgacagagaggaggaggaggagatcgaggaggaggacgaggacgacgacgaggacggcgaggacgtggaggacgaggaggaggaggaggaggaggaggaggaggaggaggaggaggaggagaacgaggaccaccagatgaactgccacaacaccagaatcatgcaggacaccgagaaggacgacaacaacaacgacgagtacgacaactacgacgagctggtggccaagagcctgctgaacctgggcaagatcgccgaggacgccgcctacagagccagaaccgagagcgagatgaacagcaacaccagcaacagcctggaggacgacagcgacaagaacgagaacctgggcagaaagagcgagctgagcctggacctggacagcgacgtggtgagagagaccgtggacagcctgaagctgctggcccagggccacggcgtggtgctgagcgagaacatgaacgacagaaactacgccgacagcatgagccagcaggacagcagaaacatgaactacgtgatgctgggcaagcccatgaacaacggcctgatggagaagatggtggaggagagcgacgaggaggtgtgcctgagcagcctggagtgcctgagaaaccagtgcttcgacctggccagaaagctgagcgagaccaacccccaggagagaaacccccagcagaacatgaacatcagacagcacgtgagacccgaggaggacttccccggcagaacccccgacagaaactacagcgacatgctgaacctgatgagactggaggagcagctgagccccagaagcagagtgttcgccagctgcgccaaggaggacggctgccacgagagagacgacgacaccaccagcgtgaacagcgacagaagcgaggaggtgttcgacatgaccaagggcaacctgaccctgctggagaaggccatcgccctggagaccgagagagccaaggccatgagagagaagatggccatggaggccggcagaagagacaacatgagaagctacgaggaccagagccccagacagctgcccggcgaggacagaaagcccaagagcagcgacagccacgtgaagaagccctactacggcaaggaccccagcagaaccgagaagaaggagagcaagtgccccacccccggctgcgacggcaccggccacgtgaccggcctgtacccccaccacagaagcctgagcggctgcccccacaaggacagagtgccccccgagatcctggccatgcacgagagcgtgctgaagtgccccacccccggctgcaccggcagaggccacgtgaacagcaacagaaacagccacagaagcctgagcggctgccccatcgccgccgccgagaagctggccaaggcccaggagaagcaccagagctgcgacgtgagcaagagcagccaggccagcgacagagtgctgagacccatgtgcttcgtgaagcagctggagatcccccagtacggctacagaaacaacgtgcccaccaccacccccagaagcaacctggccaaggagctggagaagtacagcaagaccagcttcgagtacaacagctacgacaaccacacctacggcaagagagccatcgcccccaaggtgcagaccagagacatcagccccaagggctacgacgacgccaagagatactgcaaggaccccagccccagcagcagcagcaccagcagctacgcccccagcagcagcagcaacctgagctgcggcggcggcagcagcgccagcagcacctgcagcaagagcagcttcgactacacccacgacatggaggccgcccacatggccgccaccgccatcctgaacctgagcaccagatgcagagagatgccccagaacctgagcaccaagccccaggacctgtgcgccaccagaaaccccgacatggaggtggacgagaacggcaccctggacctgagcatgaacaagcagagacccagagacagctgctgccccatcctgacccccctggagcccatgagcccccagcagcaggccgtgatgaacaacagatgcttccagctgggcgagggcgactgctgggacctgcccgtggactacaccaagatgaagcccagaagaatcgacgaggacgagagcaaggacatcacccccgaggacctggaccccttccaggaggccctggaggagagaagataccccggcgaggtgaccatccccagccccaagcccaagtacccccagtgcaaggagagcaagaaggacctgatcaccctgagcggctgccccctggccgacaagagcatcagaagcatgctggccaccagcagccaggagctgaagtgccccacccccggctgcgacggcagcggccacatcaccggcaactacgccagccacagaagcctgagcggctgccccagagccaagaagagcggcatcagaatcgcccagagcaaggaggacaaggaggaccaggagcccatcagatgccccgtgcccggctgcgacggccagggccacatcaccggcaagtacgccagccacagaagcgccagcggctgccccctggccgccaagagacagaaggacggctacctgaacggcagccagttcagctggaagagcgtgaagaccgagggcatgagctgccccacccccggctgcgacggcagcggccacgtgagcggcagcttcctgacccacagaagcctgagcggctgccccagagccaccagcgccatgaagaaggccaagctgagcggcgagcagatgctgaccatcaagcagagagccagcaacggcatcgagaacgacgaggagatcaagcagctggacgaggagatcaaggagctgaacgagagcaacagccagatggaggccgacatgatcaagctgagaacccagatcaccaccatggagagcaacctgaagaccatcgaggaggagaacaaggtgatcgagcagcagaacgagagcctgctgcacgagctggccaacctgagccagagcctgatccacagcctggccaacatccagctgccccacatggaccccatcaacgagcagaacttcgacgcctacgtgaccaccctgaccgagatgtacaccaaccaggacagataccagagccccgagaacaaggccctgctggagaacatcaagcaggccgtgagaggcatccaggtgtag

SEQ ID NO: 114941 - DNA, 3294 bp, Artificial Sequence
  derived and/or modified sequence
aggagaagagcaaagaaaagcagtccgtctggatttgtttgcccaggactggcgccgcgcacgcggatcgccgaggggagtgcggtcggagtcaccgcgcccccgcctccccgcccgggcagctgaggccgggggttggagcgctgcccccgcgcacagtccccgagcgcccgacgtctccgcgcaggttcttgaagcagctgggcctggggcgcccactaatgtggccctgagggccggagcccgcaccgacgggagcgggagccggagcagctgcgggcgccgagtggccggtgcgcccggcggagcgcgcgtgcgtggccagcgcgctccccgcttctgcttggctttccggcttaattttcctcggcgggattaaagttggaaattgaccggagaattgagttgccggggaacagagccccggccgccgccagagcgatgttcccgcagagccggcacccgacgccgcaccaggctgcaggccagcccttcaagttcactatcccggagtccctggaccggattaaagaggaattccagttcctgcaggcgcagtatcacagccttaaattggaatgtgagaaactggcaagtgaaaagacagaaatgcagaggcactatgtgatgtattatgaaatgtcatatggattaaacattgaaatgcacaaacagactgaaatcgccaagagattgaatacgatttgtgcacaagtcatcccatttctgtctcaggaacatcaacaacaggtggcccaggctgttgaacgtgccaaacaggtgaccatggcagaattgaatgccatcatcggggtacgtggcctaccaggtctacctcctacacagcagcagttgcaagctcagcatctttctcatggccacggacccccagttccccttacgcctcacccttcgggacttcagcctcctggaatcccgcccctcgggggcagtgccggccttcttgcgctgtctagtgctctgagtgggcagtctcacttggcaataaaagatgacaagaagcaccacgatgcagagcaccacagaggtgagaggccgggcaagagtaattccctcctggtcccagacagtctaagaggcacagataaacgcagaaatggacctgaattttccaatgacatcaagaaaaggaaggtggatgataaggactccagccactatgacagtgatggtgacaaaagcgatgacaacttagttgtggatgtgtctaatgaggacccttcttctccgcgagcaagccctgcccactcgccccgggaaaatggaatcgacaaaaatcgcctgctaaagaaggatgcttctagcagtccagcttccacggcctcctcggcaagttccacttctttgaaatccaaagaaatgagcttgcatgaaaaagccagcacgcctgttctgaaatccagcacaccaacgcctcggagcgacatgccaacgccgggcaccagcgccactccaggcctccgtccaggtctcggcaagcctccagccatagaccccctcgttaaccaagcggcagctggcttgaggacacccctggcagtgcccggcccatatcctgctccttttgggatggtcccccacgctggcatgaacggcgagctgaccagcccaggcgctgcctacgccagtttacacaacatgtcgccccagatgagcgccgcagccgccgcggccgccgtggtggcctacgggcgctcccccatggtggggtttgatcctccccctcacatgagagtacctaccattcctccaaacctggcaggaatccctggggggaaacctgcatactccttccacgttactgcagacggtcagatgcagcctgtcccttttccccccgacgccctcatcggacccggaatcccccggcatgctcgccagatcaacaccctcaaccacggggaggtggtgtgcgctgtgaccatcagcaaccccacgagacacgtgtacacaggcgggaagggctgcgtcaaggtctgggacatcagccaccctggcaataagagccctgtctcccagctcgactgtctgaacagagacaattatatccgttcctgtaaattgctacccgatggctgcactctcatagtgggaggggaagccagtactttgtccatttgggacctggcggctccaaccccgcgcatcaaggcggagctgacgtcctcggcccccgcctgctacgccctggccatcagccccgattccaaggtctgcttctcatgctgcagcgacggcaacatcgctgtgtgggatctgcacaaccagacactagtgaggcaattccagggccacacagacggagccagctgtattgacatttctaatgatggcaccaagctctggacgggtggtttggacaacacagtcaggtcctgggacctgcgcgaggggcggcagctgcagcagcacgacttcacctcccagatcttctccctggggtactgccccaccggggagtggctggcagtgggcatggagagcagcaatgtggaggtgctgcacgtgaacaagcctgacaagtaccagctgcacctgcatgagagctgcgtgctgtccctgaaatttgcttactgtggtaaatggtttgtgagtactggaaaagataacctcctcaatgcttggcggaccccctatggagccagcatattccagtccaaagagtcctcgtcagtgcttagctgtgacatctctgtggatgataagtacatagtcactggctcgggggacaagaaggctacagtctatgaagtcatctactgaaaacattatgtggtttaacgtttatagttgaattgggccaaaatgtttcgaatttatagaaatagaaaagttgtaactttaaaagagaaaaaaaattacaaacacctgtttccaaaccttgacagaaaactactttgagtctacaaagaggaggcgacaagtccatcagcagaaagtcacctgtctacatagaccaaatggagcaccaaggccaagcggacagaggggccatgggttgtaggattgaggaacggaatctgccgactcacatgacagcccattctttctttctgggtgatctggggatcacgccttgcccaagtgtgagattacctttctgttccttgcagttcacctcactttccgtcctttgtagagcagtggtgtctccaatgaacttgtttcctggttttgcatcttgtgaaatgtttttttgtatttttgttgaaggttaaacatttgtataaattgtaaatatatttggtttattacagtaaaggctttagtacc

SEQ ID NO: 114942 - DNA, 435 bp, Artificial Sequence
  derived and/or modified sequence
atgcagagacactacgtgatgtactacgagatgagctacggcctgaacatcgagatgcacaagcagaccgagatcgccaagagactgaacaccatctgcgcccaggtgatccccttcctgagccaggagcaccagcagcaggtggcccaggccgtggagagagccaagcaggtgaccatggccgagctgaacgccatcatcggccagcagcagctgcaggcccagcacctgagccacggccacggcccccccgtgcccctgaccccccaccccagcggcctgcagccccccggcatcccccccctgggcggcagcgccggcctgctggccctgagcagcgccctgagcggccagagccacctggccatcaaggacgacaagaagcaccacgacgccgagcaccacagaggcgagagacccggcaagcccgactag

SEQ ID NO: 114943 - DNA, 435 bp, Artificial Sequence
  derived and/or modified sequence
atgcagagacactacgtcatgtactatgaaatgagttacgggttgaacatcgagatgcataagcagactgagatcgccaaaaggcttaatacaatctgcgcacaggttatcccattcctcagtcaggaacaccaacaacaggtagcccaggccgtggaacgtgccaagcaagtcaccatggcggaattgaatgctatcatcgggcagcagcaactgcaagctcagcatctgtcccatgggcatgggccaccggtgcctttaacaccgcacccttctggtctgcagccccctggaattcctcctctggggggatccgcgggactgctggctctcagttcagctctgagtggccagtcacacctggccattaaggatgataagaaacaccatgatgctgagcaccaccggggggagcgccccggaaaacctgattag

SEQ ID NO: 114944 - DNA, 435 bp, Artificial Sequence
  derived and/or modified sequence
atgcagaggcactacgtgatgtactatgagatgtcctatggcctgaacatcgagatgcacaagcagacagaaattgccaagaggctgaacaccatctgtgcccaggtgatccccttcctgagccaggagcaccagcagcaggtggcccaggccgtggagcgggccaagcaggtgaccatggccgagctgaatgccatcatcggccagcagcagctgcaggcccagcacctgagccacggccacggcccccctgtgcccctgaccccccaccccagcggcctgcagcccccaggcatcccccccctgggcggcagcgctggcctgctggccctgagcagcgccctgagcggccagagccacctggccatcaaggatgacaagaagcaccatgatgctgagcaccacagaggagagaggcctgggaagccagactag

SEQ ID NO: 114945 - DNA, 435 bp, Artificial Sequence
  derived and/or modified sequence
atgcagcggcactacgtgatgtactacgagatgagctacggcctgaatatcgagatgcataagcagacggagattgccaagagactgaacactatatgcgcacaggtgatcccattcctgtctcaggaacaccagcaacaggtggcccaggctgttgagcgggccaagcaagtaacaatggctgaactgaacgccataataggccagcaacagttacaagcccagcacctaagccacgggcacggcccaccggttcctcttaccccccacccctcaggcctccagccacctggaataccccccctgggggggagcgcaggacttttagccctgtcttccgcgttgtctggccagtcacatcttgccatcaaagacgataagaagcaccatgacgccgagcaccatcggggggagcgacctggcaagcctgattag

SEQ ID NO: 114946 - DNA, 435 bp, Artificial Sequence
  derived and/or modified sequence
atgcaacgacactacgtgatgtattacgagatgagttacggccttaatattgagatgcacaagcaaaccgaaattgcgaaaaggctgaacaccatttgtgctcaggttatcccctttctgtctcaggagcatcagcagcaggtcgctcaagcagttgaacgtgctaagcaggtcacaatggctgaactaaacgcaattatcggacagcaacagctccaggcacagcatctctcacacggacacgggcctccggtgcctttaactccccatccgtctggcctgcagcctcccggaattcccccattagggggatccgctggcttgctggccctctcttcagccttatcaggacaatctcatctcgctattaaggatgacaagaaacaccacgatgctgagcaccaccggggagaaagacctggaaaacccgattag

SEQ ID NO: 114947 - DNA, 1115 bp, Artificial Sequence
  derived and/or modified sequence
gaggaattccagttcctgcaggcgcagtatcacagccttaaattggaatgtgagaaactggcaagtgaaaagacagaaatgcagaggcactatgtgatgtattatgaaatgtcatatggattaaacattgaaatgcacaaacagactgaaatcgccaagagattgaatacgatttgtgcacaagtcatcccatttctgtctcaggaacatcaacaacaggtggcccaggctgttgaacgtgccaaacaggtgaccatggcagaattgaatgccatcatcgggcagcagcagttgcaagctcagcatctttctcatggccacggacccccagttccccttacgcctcacccttcgggacttcagcctcctggaatcccgcccctcgggggcagtgccggccttcttgcgctgtctagtgctctgagtgggcagtctcacttggcaataaaagatgacaagaagcaccacgatgcagagcaccacagaggtgagaggccgggcaagccagattaggactttgtcctcatactcttacagtgctgcaaagttgtgtgcatcgctaaagagagccccaacctatacagagagcaaacaatgagataagaggaactgtcgcaaagctttccactgaaacacaggtcaccctggaagtttgcagggtttgctgtgggcatctgtagatttctcgatctcgttagattgcaggcatcttgacatcttggcaactgcctagttaatgccagtggcctgtaccatattatggaaaactgttaactgcttaattgggtaattttcaaagaaagtaatgttgttaaatggggcgaaataagaagttaaatttgaaagtgaatgtgttcaaatgaaaggtttgataattgcatctgttactacttagtttcataggctttaattctagtatgcattaaatattgggcaaaattgcacttgactaattttttgaagaaaagtaatttattctgtcaagaaataaaaaaataggctttgtgtatggttaaactgtaaatcttatgtttacaaaatactgtaattttcaggaaatcactgtattaggaatgtgcaatgacttatataaataaaagccatttttaaaactg

SEQ ID NO: 114948 - protein, 519 aa, Artificial Sequence
  derived and/or modified sequence
MGPRLSVWLLLLPAALLLHEEHSRAAAKGGCAGSGCGKCDCHGVKGQKGERGLPGLQGVIGFPGMQGPEGPQGPPGQKGDTGEPGLPGTKGTRGPPGASGYPGNPGLPGIPGQDGPPGPPGIPGCNGTKGERGPLGPPGLPGFAGNPGPPGLPGMKGDPGEILGHVPGMLLKGERGFPGIPGTPGPPGLPGLQGPVGPPGFTGPPGPPGPPGPPGEKGQMGLSFQGPKGDKGDQGVSGPPGVPGQAQVQEKGDFATKGEKGQKGEPGFQGMPGVGEKGEPGKPGPRGKPGKDGDKGEKGSPGFPGEPGYPGLIGRQGPQGEKGEAGPPGPPGIVIGTGPLGEKGERGYPGTPGPRGEPGPKGFPGLPGQPGPPGLPVPGQAGAPGFPGERGEKGDRGFPGTSLPGPSGRDGLPGPPGSPGPPGQPGYTNGIVECQPGPPGDQGPPGIPGQPGFIGEIGEKGQKGESCLICDIDGYRGPPGPQGPPGEIGFPGQPGAKGDRGLPGRDGVAGVPLLFQIHK

SEQ ID NO: 114949 - DNA, 554 bp, Artificial Sequence
  derived and/or modified sequence
aggctccgcggctgccggagcgggaggtggagccgagtccgcggcggccgcgcaggagggaaagttcagcgacggcggcagcggccggagccgggccgggcagctagcagggcgcttcggctgccttcctatttcaaggaaagacgccaaggtaattttgacccagaggagcaatgatgtagccacctcctaaccttcccttcttgaacccccaggtcccctcttgctgttggctgcacatcaggaaggctgtgatgggaatgaaggtgaaaacttggagatttcacttcagtcattgcttctgcctgcaagatcatcctttaaaagtagagaagctgctctgtgtggtggttaactccaagaggcagaactcgttctagaaggaaatggatgcaagcagctccgggggccccaaacgcatgcttcctgtggtctagcccagggaagcccttccgtgggggccccggctttgagggatgccaccggttctggacgcatggctgattcctgaatgatgatggttcgccgggggctgcttgcgtggatttcccggg

SEQ ID NO: 114950 - DNA, 1560 bp, Artificial Sequence
  derived and/or modified sequence
atgggccccagactgagcgtgtggctgctgctgctgcccgccgccctgctgctgcacgaggagcacagcagagccgccgccaagggcggctgcgccggcagcggctgcggcaagtgcgactgccacggcgtgaagggccagaagggcgagagaggcctgcccggcctgcagggcgtgatcggcttccccggcatgcagggccccgagggcccccagggcccccccggccagaagggcgacaccggcgagcccggcctgcccggcaccaagggcaccagaggcccccccggcgccagcggctaccccggcaaccccggcctgcccggcatccccggccaggacggcccccccggcccccccggcatccccggctgcaacggcaccaagggcgagagaggccccctgggcccccccggcctgcccggcttcgccggcaaccccggcccccccggcctgcccggcatgaagggcgaccccggcgagatcctgggccacgtgcccggcatgctgctgaagggcgagagaggcttccccggcatccccggcacccccggcccccccggcctgcccggcctgcagggccccgtgggcccccccggcttcaccggcccccccggcccccccggcccccccggcccccccggcgagaagggccagatgggcctgagcttccagggccccaagggcgacaagggcgaccagggcgtgagcggcccccccggcgtgcccggccaggcccaggtgcaggagaagggcgacttcgccaccaagggcgagaagggccagaagggcgagcccggcttccagggcatgcccggcgtgggcgagaagggcgagcccggcaagcccggccccagaggcaagcccggcaaggacggcgacaagggcgagaagggcagccccggcttccccggcgagcccggctaccccggcctgatcggcagacagggcccccagggcgagaagggcgaggccggcccccccggcccccccggcatcgtgatcggcaccggccccctgggcgagaagggcgagagaggctaccccggcacccccggccccagaggcgagcccggccccaagggcttccccggcctgcccggccagcccggcccccccggcctgcccgtgcccggccaggccggcgcccccggcttccccggcgagagaggcgagaagggcgacagaggcttccccggcaccagcctgcccggccccagcggcagagacggcctgcccggcccccccggcagccccggcccccccggccagcccggctacaccaacggcatcgtggagtgccagcccggcccccccggcgaccagggcccccccggcatccccggccagcccggcttcatcggcgagatcggcgagaagggccagaagggcgagagctgcctgatctgcgacatcgacggctacagaggcccccccggcccccagggcccccccggcgagatcggcttccccggccagcccggcgccaagggcgacagaggcctgcccggcagagacggcgtggccggcgtgcccctgctgttccagatccacaagtag

SEQ ID NO: 114951 - DNA, 1560 bp, Artificial Sequence
  derived and/or modified sequence
atgggacctcgtttatctgtttggctgctgctcctgccagccgctttgctgttgcatgaggagcactcaagggccgccgcgaaaggggggtgtgcagggtctggatgcggcaagtgcgactgtcacggggtcaagggacagaagggagaacgtggcttgcctggtctgcagggtgtcattggattcccaggtatgcagggtccagaaggcccacaaggtccgccaggacagaaaggcgatacaggcgaacctgggttgcctgggacgaaaggcactcgaggacctccaggagcctctggatatcccggaaatcctgggctccctggaataccaggccaggatggaccccctggaccccccggtattccgggctgcaacggtacaaaaggcgagagaggtcctctgggacctcccggcctgcccggcttcgccggaaacccaggtcctcctggtctgcctgggatgaagggggatcctggcgagatcttggggcacgtccctggtatgctcctcaagggggaacgaggatttcctgggatacccggaacacctgggcctccaggcctacctgggctccagggcccagtgggtccccccgggtttactggcccaccgggccccccaggcccaccagggccacctggggaaaaagggcagatgggactcagtttccagggccccaaaggcgataagggtgaccagggagtgagtggtcctcccggtgtccccgggcaggcacaggttcaggaaaagggtgatttcgctaccaaaggagaaaaaggccagaagggcgaacctggtttccaaggtatgcccggtgtgggggagaaaggtgagcccgggaaacctggcccccggggaaaaccagggaaagatggtgacaagggtgagaagggttctccaggcttccctggagaacccgggtaccctgggttaatcgggcgacagggcccacagggcgaaaaaggagaggcggggccccccggaccgcccgggattgtcatcgggaccggcccactcggtgagaagggggaacggggctatccaggtacccctggtccacgcggagaaccaggacctaaaggattcccaggacttccgggccagcccgggcccccaggtttacccgtgcctggacaggctggcgcccccgggtttccaggtgaacgtggggagaaaggcgatcgaggcttccccggcaccagcctcccaggtccgtcgggtcgggatgggctccctggacctcccggttccccgggtccccccggacaacccggatataccaacggcatagtggagtgccaaccaggccctcccggcgatcaggggccaccaggtattcccgggcaaccgggatttattggcgaaattggcgaaaagggccagaagggcgaatcgtgcctgatctgcgacattgatgggtaccgcggccccccagggccccagggtccgcccggtgagatcggctttccggggcagcctggtgcaaagggcgatcgtgggctgcccggcagagatggggttgctggagtcccactgctgttccagatccacaaatag

SEQ ID NO: 114952 - DNA, 2547 bp, Artificial Sequence
  derived and/or modified sequence
cgggacggtgcgtagcgctggaagtccggccttccgagagctagctgtccgccgcggcccccgcacgccgggcagccgtccctcgccgcctcgggcgcgccaccatggggccccggctcagcgtctggctgctgctgctgcccgccgcccttctgctccacgaggagcacagccgggccgctgcgaagggtggctgtgctggctctggctgtggcaaatgtgactgccatggagtgaagggacaaaagggtgaaagaggcctcccggggttacaaggtgtcattgggtttcctggaatgcaaggacctgaggggccacagggaccaccaggacaaaagggtgatactggagaaccaggactacctggaacaaaagggacaagaggacctccgggagcatctggctaccctggaaacccaggacttcccggaattcctggccaagacggcccgccaggccccccaggtattccaggatgcaatggcacaaagggggagagagggccgctcgggcctcctggcttgcctggtttcgctggaaatcccggaccaccaggcttaccagggatgaagggtgatccaggtgagatacttggccatgtgcccgggatgctgttgaaaggtgaaagaggatttcccggaatcccagggactccaggcccaccaggactgccagggcttcaaggtcctgttgggcctccaggatttaccggaccaccaggtcccccaggccctcccggccctccaggtgaaaagggacaaatgggcttaagttttcaaggaccaaaaggtgacaagggtgaccaaggggtcagtgggcctccaggagtaccaggacaagctcaagttcaagaaaaaggagacttcgccaccaagggagaaaagggccaaaaaggtgaacctggatttcaggggatgccaggggtcggagagaaaggtgaacccggaaaaccaggacccagaggcaaacccggaaaagatggtgacaaaggggaaaaagggagtcccggttttcctggtgaacccgggtacccaggactcataggccgccagggcccgcagggagaaaagggtgaagcaggtcctcctggcccacctggaattgttataggcacaggacctttgggagaaaaaggagagaggggctaccctggaactccggggccaagaggagagccaggcccaaaaggtttcccaggactaccaggccaacccggacctccaggcctccctgtacctgggcaggctggtgcccctggcttccctggtgaaagaggagaaaaaggtgaccgaggatttcctggtacatctctgccaggaccaagtggaagagatgggctcccgggtcctcctggttcccctgggccccctgggcagcctggctacacaaatggaattgtggaatgtcagcccggacctccaggtgaccagggtcctcctggaattccagggcagccaggatttataggcgaaattggagagaaaggtcaaaaaggagagagttgcctcatctgtgatatagacggatatcgggggcctcccgggccacagggacccccgggagaaataggtttcccagggcagccaggggccaagggcgacagaggtttgcctggcagagatggtgttgcaggagtgccattgctttttcaaatccataaatgaaatatccggatcacattgacatgaaacctttcaatggaacaaaataccagcttcttagcttttgtagtttgttttaaaagaatccactaaatagaagagcataataataatcttgaattttgaaggacattattttcttgcatataatgacttctgtttctgaagttttgaaatctcaaggcattgttcctctcgtattttctttgttcttctgagctttgcgagcatggactggtttccacaattcctttcattcctttttttctttttgtaagatattgaaagtcaaatttcagaattattcatttctgatgtagcccttcaaattttttaatttttaaagatattgctggaagcttctacaaaagaaaaccagggcaaaagcgagttgaaatagcaatgacccagctggaattcagcaatcattttctgcttttgaagttagatcttgggcttttgctctccagaacttccctggtgcctggggagctgagttagaagttgcaattgtttaagatatatctaaataaattagaagttcaaataactgggtagccctgactgtagtggggatcaaagacagaagaactttgaaggaagcagaaaaggacgtttttaacctctatgcaccgcttcatctcctgggctttcctggtggacttcctgcctcaactctggctgaaactcagtctagacatatctaataaaagacggaaaaagaggaaagaggtgagaaagaaggaatattgaggaaagatcataatatagaagaaaagaaagaaaacatacaaccccaattctactccttatgccttcatcaggagctcctttctttccggagttggaaaaagtctctaaaaataaatttatgggtaaataattc

SEQ ID NO: 114953 - DNA, 1560 bp, Artificial Sequence
  derived and/or modified sequence
atgggcccccggctgtctgtgtggctgctgctgctgcctgctgccctgctgctgcacgaggagcacagcagagctgctgccaagggcggctgtgccggcagcggctgtgggaaatgtgactgccacggcgtgaagggccagaagggggagcggggcctgcccggcctgcagggcgtcatcggcttccctggcatgcagggccctgagggcccccagggccccccaggccagaagggggacacaggagagcccggcctgcccggcaccaagggcacccggggccccccaggggccagcggctacccaggcaaccctggcctgcccggcatccctggccaggacggccccccaggccccccaggcatccctggctgcaatggcaccaagggggagcggggccccctgggccccccaggcctgcccggctttgctggcaaccctggccccccaggcctgcccggcatgaagggggaccctggagagatcctgggccacgtgcccggcatgctgctgaagggggagcggggcttccctggcatccctggcaccccaggccccccaggcctgcccggcctgcagggccctgtgggccccccaggcttcaccggccccccaggccccccaggccccccaggccccccaggagagaagggccagatgggcctgtccttccagggccccaagggggacaagggggaccagggcgtgtctggccccccaggagtgcccggccaggcccaggtgcaggagaagggggactttgccaccaagggggagaagggccagaagggggagcccggcttccagggcatgcctggggtgggggagaagggggagcccgggaagccaggcccccggggcaagccaggcaaggatggagacaagggggagaagggcagccctggcttccctggagagcccggctacccaggcctgattggccggcagggcccccagggcgagaagggggaggccggccccccaggccccccaggcatcgtgattggaacaggccccctgggggagaagggggagcggggctacccaggcaccccaggccccagaggagagcccggccccaagggcttccctggcctgcccggccagcccggccccccaggcctgcctgtgcccggccaggccggggcccctggcttccctggagagcggggggagaagggggaccggggcttccctggcaccagcctgcccggccccagcggcagagatggcctgcccggccccccaggcagccctggccccccaggccagcccggctacaccaatggaattgtggagtgccagcccggccccccaggggaccagggccccccaggcatccctggccagcccggcttcatcggggagattggagagaagggccagaagggggagagctgcctgatctgtgacattgatggctaccggggccccccaggcccccagggccccccaggagagatcggcttccctggccagcccggggccaagggggaccggggcctgcccggcagagatggagtggccggcgtgcccctgctcttccagatccacaagtag

SEQ ID NO: 114954 - DNA, 1560 bp, Artificial Sequence
  derived and/or modified sequence
atgggcccccggctgagcgtgtggctgctgctgctgcccgccgccttactcctccacgaagaacactctcgcgcagcagctaagggcggctgtgcgggcagtgggtgcggtaaatgcgactgtcatggcgtgaagggccaaaagggggagcggggtcttccaggactgcaaggagttatcggttttcccggcatgcaaggcccggagggtccccaaggcccccccggacagaaaggagacaccggagaaccagggctgccggggaccaaaggcacccggggtcccccaggagccagcggatatcctggcaaccctggcttgcccggcatcccgggtcaagacggtccgcctggcccacccggcataccaggctgcaacggcacaaagggcgaacgggggcccctcgggccgcctgggcttcccggatttgcaggaaaccctggacctccagggctgccaggcatgaagggcgatcctggggagatccttggccacgtacccggaatgctgctcaagggcgaaagaggctttcctggcattccaggtacacctggccctcctgggctgccgggcttgcagggccctgtaggacctcctgggtttacaggaccaccaggtccccccggcccaccggggcctccaggagagaagggtcagatgggactgtcctttcagggccctaagggggataagggggatcaaggtgtttccgggccccccggcgtgccggggcaggcacaggtgcaggagaaaggggattttgcgacaaaaggcgagaaggggcagaaaggcgagcctggctttcaggggatgccaggggtaggcgagaaaggtgaacccggtaagcctgggccccggggcaagccaggcaaagatggagacaaaggtgagaaggggagtcccggttttccgggtgagcctggttatccagggctgatcggccgccaaggaccccagggcgaaaagggagaagccggaccacctggacccccaggaatcgttatcggcactggacccctgggggagaaaggcgaacgcggctacccaggtactcctgggccccgcggagagcccggaccgaagggcttccccggcctgccaggccagcctggacccccagggctgcccgtgccaggtcaggccggtgcacccggatttcctggagaacgcggtgagaagggagaccgaggattcccaggcacctctctgcccggaccaagcggcagggacggactacctgggccccccggttctcctggacccccagggcagcccggatacacgaacggtattgtggagtgccagcctggccctccaggagaccaggggccacccgggattcccggccagcccgggttcattggcgaaataggtgaaaaaggtcaaaagggagaaagttgcttaatctgcgacatcgatggatacaggggaccacctggaccccagggcccccccggcgagattggatttcctggccagccaggcgcaaagggagacagaggtctgccagggcgcgatggagttgccggagtaccactgctcttccagatccacaaatag

SEQ ID NO: 114955 - DNA, 1560 bp, Artificial Sequence
  derived and/or modified sequence
atgggaccgaggttatcagtttggctgctgctgttgccagccgcattgctgctgcacgaagagcactcccgggctgctgcaaaaggaggttgcgcagggtccggctgcggaaaatgcgactgccacggagtcaaaggccagaaaggtgaacgcggactgccaggcctacagggggtcatcgggtttccaggtatgcaggggccagaagggcctcaggggcctcctggccaaaaaggggatacaggtgaacctgggctccccggtacgaagggcacaagggggcctcccggagcttccggctacccaggcaatcccggtctgcctgggatccccggtcaggacggacccccaggaccccctggaattccaggctgtaacgggacaaagggggaaagaggcccattgggccctcccggactgccagggtttgcaggtaacccgggaccgcctggcctccctggcatgaaaggcgatccaggggagatcctgggacatgtgcccggaatgctcctgaagggggagagaggttttcctggtattccagggaccccgggaccacccggtcttcctggattgcagggtcccgttggaccaccaggattcactggtcctcctggcccacccggacccccaggcccacccggtgaaaaggggcagatgggcttatcattccagggtcccaaaggcgataagggggatcagggggtttccggccctcccggagtaccagggcaggctcaggtgcaggagaaaggtgacttcgctacaaagggcgagaaaggacagaagggagagccgggatttcaaggcatgccaggggtgggggagaaaggggagcctggcaaacccggaccaaggggaaagcccggaaaggatggcgataagggcgagaaggggagccctgggtttccgggtgagcccggataccctggactcattgggaggcaaggacctcagggagagaaaggtgaagctggtcccccaggaccccctgggattgtgattggcaccggaccattgggtgagaaaggggaacgaggctatcctgggactcctggcccacgtggagaacccggacccaaaggcttccccggactccctggccagccaggaccacctgggctgcccgtcccaggccaggccggtgcaccaggtttccccggagagcgaggagagaagggagatagaggcttccctgggacatcactacctgggccatccggacgagatggactccctggcccacctggatccccagggcctcccggtcagccgggatatacgaatggcattgtagaatgccaaccgggtccacccggtgatcagggccctcccggaattcccggacagcccggattcatcggcgaaatcggcgagaaagggcaaaagggggaatcttgcctgatttgcgatatagatggctatagggggcctcctggtccccagggcccacccggtgaaatcggattccccggacaaccgggagcaaaaggagatcggggtctccccggacgggacggggtggccggagtgccactgctgttccagattcacaagtag

SEQ ID NO: 114956 - DNA, 1560 bp, Artificial Sequence
  derived and/or modified sequence
atgggtcccaggctgtctgtatggctcttgctgttacccgccgccttgctgctgcacgaggagcattcacgagcagccgccaagggcggttgcgctgggtccggatgcggcaagtgcgattgccacggagtcaaaggacagaaaggagagaggggactcccaggattgcaaggcgtaatcggtttccccggcatgcagggccctgagggaccccaaggccctcccgggcagaagggtgatactggcgagccagggcttccaggtaccaaaggcacaaggggcccaccaggcgccagcgggtaccctggtaatcctgggctaccaggtattcccggtcaagatggacccccaggtccacctggcatccccgggtgtaatggcaccaaaggagagagaggtccactaggtcctcccggcctaccagggttcgccggcaacccaggaccccccggtctccctggaatgaaaggcgatcccggcgagattttgggacatgtgccagggatgctcctgaagggggagaggggtttcccaggcatcccgggcactccaggtccaccaggccttcccggtctgcagggccccgtaggcccacctggtttcaccggcccccccggcccacctggtccaccaggcccacccggggagaaggggcaaatggggcttagcttccagggccctaaaggtgacaagggcgaccaaggagtatcaggcccacctggggtgccaggacaggcccaagtgcaggagaagggcgactttgctactaagggcgaaaagggccaaaaaggagaaccaggtttccaaggcatgccaggcgtgggagagaagggtgagcccggtaagccagggccaagaggcaagccaggaaaagatggtgacaagggagaaaaaggttcacctggcttccctggtgaacccggataccctggactgatcgggagacagggcccacagggtgaaaagggcgaagctggaccacccggcccccccgggatcgtgatagggacagggcccctcggcgaaaagggggagagggggtatccaggcactcctggcccaaggggagaacccggaccaaaggggttccccggtttgcccggacaacctggaccacctgggctccccgtgcccggtcaagcgggtgcgccgggctttccaggcgagcgcggcgaaaaaggggacaggggctttcccggcaccagcctgccaggccctagcggccgcgatggacttcctggtcctccaggaagccccggcccaccgggacagccgggttacaccaacggcattgttgaatgtcaaccaggcccgccaggcgatcaaggacctccgggaattcccggacaacctggattcatcggggagattggggaaaagggccaaaaaggagagagctgcttgatttgtgacatcgatgggtataggggcccacccggccctcagggtcctcccggcgaaatcgggttcccgggacagccaggcgcaaagggcgacaggggcctcccgggtagagatggcgtggcaggcgtcccgctcctgtttcagatccataagtag

SEQ ID NO: 114957 - DNA, 1560 bp, Artificial Sequence
  derived and/or modified sequence
atggggccaaggctgtcagtgtggcttctcctcctacccgccgcactgctactacacgaggagcactctcgcgccgctgcaaaaggaggctgtgctggatctggctgcggaaagtgcgactgccatggagttaagggacagaaaggagaacgggggcttcctggcctacagggcgtgattggctttcctggcatgcaggggccagaaggaccacagggaccacccggacagaaaggggatacaggggagccaggtctacccgggacaaaggggacaagagggcctccaggggcctccggttatcctggtaacccgggcctcccaggaatccccggacaggatggacctccaggaccacccggaattcctggatgtaatggcacaaagggagaacgcggcccactaggcccgccaggtcttccaggatttgcaggaaaccccggaccccctgggcttcccgggatgaagggcgaccctggagagattctggggcatgtaccaggcatgcttctcaagggtgagaggggctttcccggaattcccggaactcccggcccccctggtctcccaggtctgcagggccccgtcggacctccggggttcacagggcccccaggaccccctggccctccaggacctccaggggagaaagggcaaatgggcttgtccttccagggccctaaaggcgacaagggagaccagggcgtaagtggtcctcctggcgttccaggacaggcgcaagtccaggagaaaggggattttgcgacaaagggggagaagggacagaaaggagagcccggatttcaaggcatgcccggggtcggagaaaagggggagcccggtaagccagggccccgaggtaaaccaggtaaagacggggataagggagagaaaggatccccaggatttccaggcgaacctggctatcccggcctgattggacgccaaggaccgcagggagagaaaggtgaggctggcccccccggtccaccaggaatcgttattggcactgggcctttgggagaaaaaggtgagcggggctaccccgggacccctggccccaggggggaacctggtccaaaaggtttcccaggtttacccgggcagccaggccccccgggtctgccagtacccggtcaagcaggcgcacctggcttcccaggcgaaagaggcgaaaagggcgacagaggctttccaggcacatctttgcctgggccaagcggtagagacgggcttcccggacccccaggatcccccggcccacccggccagccaggttacacaaacgggatagtagagtgtcagcccggcccacccggagatcaaggcccccctggcattcccgggcagccaggctttatcggagaaatcggcgaaaaaggccagaagggcgaatcatgtctaatttgtgacattgatgggtacaggggccctccaggaccacaaggtccgcccggcgaaattgggttccctggtcagcccggcgctaaaggtgatagagggctcccaggtagagatggcgtcgcaggggtcccattattgtttcagatacacaaatag

SEQ ID NO: 114958 - RNA, 1560 nt, Artificial Sequence
  derived and/or modified sequence
augggucccaggcugucuguauggcucuugcuguuacccgccgccuugcugcugcacgaggagcauucacgagcagccgccaagggcgguugcgcuggguccggaugcggcaagugcgauugccacggagucaaaggacagaaaggagagaggggacucccaggauugcaaggcguaaucgguuuccccggcaugcagggcccugagggaccccaaggcccucccgggcagaagggugauacuggcgagccagggcuuccagguaccaaaggcacaaggggcccaccaggcgccagcggguacccugguaauccugggcuaccagguauucccggucaagauggacccccagguccaccuggcauccccggguguaauggcaccaaaggagagagagguccacuagguccucccggccuaccaggguucgccggcaacccaggaccccccggucucccuggaaugaaaggcgaucccggcgagauuuugggacaugugccagggaugcuccugaagggggagagggguuucccaggcaucccgggcacuccagguccaccaggccuucccggucugcagggccccguaggcccaccugguuucaccggcccccccggcccaccugguccaccaggcccacccggggagaaggggcaaauggggcuuagcuuccagggcccuaaaggugacaagggcgaccaaggaguaucaggcccaccuggggugccaggacaggcccaagugcaggagaagggcgacuuugcuacuaagggcgaaaagggccaaaaaggagaaccagguuuccaaggcaugccaggcgugggagagaagggugagcccgguaagccagggccaagaggcaagccaggaaaagauggugacaagggagaaaaagguucaccuggcuucccuggugaacccggauacccuggacugaucgggagacagggcccacagggugaaaagggcgaagcuggaccacccggcccccccgggaucgugauagggacagggccccucggcgaaaagggggagaggggguauccaggcacuccuggcccaaggggagaacccggaccaaagggguuccccgguuugcccggacaaccuggaccaccugggcuccccgugcccggucaagcgggugcgccgggcuuuccaggcgagcgcggcgaaaaaggggacaggggcuuucccggcaccagccugccaggcccuagcggccgcgauggacuuccugguccuccaggaagccccggcccaccgggacagccggguuacaccaacggcauuguugaaugucaaccaggcccgccaggcgaucaaggaccuccgggaauucccggacaaccuggauucaucggggagauuggggaaaagggccaaaaaggagagagcugcuugauuugugacaucgauggguauaggggcccacccggcccucaggguccucccggcgaaaucggguucccgggacagccaggcgcaaagggcgacaggggccucccggguagagauggcguggcaggcgucccgcuccuguuucagauccauaaguag

SEQ ID NO: 114959 - RNA, 1560 nt, Artificial Sequence
  derived and/or modified sequence
auggggccaaggcugucaguguggcuucuccuccuacccgccgcacugcuacuacacgaggagcacucucgcgccgcugcaaaaggaggcugugcuggaucuggcugcggaaagugcgacugccauggaguuaagggacagaaaggagaacgggggcuuccuggccuacagggcgugauuggcuuuccuggcaugcaggggccagaaggaccacagggaccacccggacagaaaggggauacaggggagccaggucuacccgggacaaaggggacaagagggccuccaggggccuccgguuauccugguaacccgggccucccaggaauccccggacaggauggaccuccaggaccacccggaauuccuggauguaauggcacaaagggagaacgcggcccacuaggcccgccaggucuuccaggauuugcaggaaaccccggacccccugggcuucccgggaugaagggcgacccuggagagauucuggggcauguaccaggcaugcuucucaagggugagaggggcuuucccggaauucccggaacucccggccccccuggucucccaggucugcagggccccgucggaccuccgggguucacagggcccccaggacccccuggcccuccaggaccuccaggggagaaagggcaaaugggcuuguccuuccagggcccuaaaggcgacaagggagaccagggcguaagugguccuccuggcguuccaggacaggcgcaaguccaggagaaaggggauuuugcgacaaagggggagaagggacagaaaggagagcccggauuucaaggcaugcccggggucggagaaaagggggagcccgguaagccagggccccgagguaaaccagguaaagacggggauaagggagagaaaggauccccaggauuuccaggcgaaccuggcuaucccggccugauuggacgccaaggaccgcagggagagaaaggugaggcuggcccccccgguccaccaggaaucguuauuggcacugggccuuugggagaaaaaggugagcggggcuaccccgggaccccuggccccaggggggaaccugguccaaaagguuucccagguuuacccgggcagccaggccccccgggucugccaguacccggucaagcaggcgcaccuggcuucccaggcgaaagaggcgaaaagggcgacagaggcuuuccaggcacaucuuugccugggccaagcgguagagacgggcuucccggacccccaggaucccccggcccacccggccagccagguuacacaaacgggauaguagagugucagcccggcccacccggagaucaaggccccccuggcauucccgggcagccaggcuuuaucggagaaaucggcgaaaaaggccagaagggcgaaucaugucuaauuugugacauugauggguacaggggcccuccaggaccacaagguccgcccggcgaaauuggguucccuggucagcccggcgcuaaaggugauagagggcucccagguagagauggcgucgcaggggucccauuauuguuucagauacacaaauag

SEQ ID NO: 114960 - protein, 326 aa, Artificial Sequence
  derived and/or modified sequence
MRECISIHVGQAGVQIGNACWELYCLEHGIQPDGQMPSDKTIGGGDDSFNTFFSETGAGKHVPRAVFVDLEPTVIDEVRTGTYRQLFHPEQLITGKEDAANNYARGHYTIGKEIIDLVLDRIRKLKSFFATKPRIHFPLATYAPVISAEKAYHEQLTVAEITNACFEPANQMVKCDPRHGKYMACCLLYRGDVVPKDVNAAIATIKTKRTIQFVDWCPTGFKVGINYQPPTVVPGGDLAKVQRAVCMLSNTTAVAEAWARLDHKFDLMPLRRIMRRLEQIVLTERMRVKSINLCAVLLHSFVLELSYFCSVNVYCRKLLIKLKFPF

SEQ ID NO: 114961 - protein, 182 aa, Artificial Sequence
  derived and/or modified sequence
MRECISIHVGQAGVQIGNACWELYCLEHGIQPDGQMPSDKTIGGGDDSFNTFFSETGAGKHVPRAVFVDLEPTVIDWCPTGFKVGINYQPPTVVPGGDLAKVQRAVCMLSNTTAIAEAWARLDHKFDLMYAKRAFVHWYVGEGMEEGEFSEAREDMAALEKDYEEVGVDSVEGEGEEEGEEY

SEQ ID NO: 114962 - DNA, 981 bp, Artificial Sequence
  derived and/or modified sequence
atgagggagtgtatctctatccatgtcgggcaggcaggcgtacagatcggcaacgcatgttgggagctctactgtcttgaacacggcatccagccggacggacagatgccatcggacaaaactatcggaggtggcgacgacagctttaatacatttttcagcgagacgggcgcaggcaagcatgtccctcgcgcggtttttgtcgacctcgaaccaacggtgatagacgaggtgcgcacaggtacctacaggcagctattccatccagagcaacttatcactggaaaagaggacgctgccaacaactatgccagaggccattacaccatcggcaaggagattattgacctggttctagatcggatccggaaattaaaaagttttttcgcaacgaagccccgcatccattttccattggccacttacgctcctgtgatctccgcagagaaggcctaccatgaacagctgacagtcgctgaaatcaccaatgcatgcttcgagcctgctaaccaaatggtgaagtgtgatccgagacacggaaagtacatggcttgctgcctgctgtacaggggggatgtggttcccaaggacgtgaacgcagcaattgctaccatcaaaacgaaacgaacaattcaattcgtggactggtgccctaccgggtttaaagtcggtattaattaccagccaccaactgtggtgccaggaggtgaccttgctaaggtccagagggcagtttgcatgttgagcaatactacagccgtcgcagaagcttgggcccgacttgatcataagttcgacttgatgcccctgagaagaatcatgaggcgactggaacagatcgtactcaccgagagaatgcgggtgaagagcataaatttgtgcgccgtcctactgcacagcttcgtgcttgagctctcttatttttgtagcgtcaacgtatactgcagaaaactgctgataaagctgaaatttccattctag

SEQ ID NO: 114963 - DNA, 981 bp, Artificial Sequence
  derived and/or modified sequence
atgagggagtgcatcagcatccacgtgggccaggccggcgtgcagattggaaatgcctgctgggagctgtactgcctggagcacggcatccagccagatggccagatgcccagcgacaagaccatcggcggcggagatgacagcttcaacaccttcttcagcgagaccggggccggcaagcacgtgcccagggctgtgtttgtggacctggagcccaccgtgattgatgaggtgaggacaggcacctaccggcagctgttccaccctgagcagctgatcaccgggaaggaggatgctgccaacaactatgcccggggccactacaccatcggcaaggagatcatcgacctggtgctggaccgcatcaggaagctgaagagcttctttgccaccaagccccgcatccacttccccctggccacctacgcccctgtgatctctgctgagaaggcctaccacgagcagctgactgtggccgagatcaccaatgcctgctttgagcccgccaaccagatggtgaagtgtgaccccaggcatggcaagtacatggcctgctgcctgctgtacagaggagatgtggtgcccaaggatgtgaatgctgccatcgccaccatcaagaccaagaggaccatccagtttgtggactggtgccccaccggcttcaaggtgggcatcaactaccagcccccaacagtggtgcctggaggagacctggccaaggtgcagagagctgtgtgcatgctgagcaacaccacagctgtggccgaggcctgggcccggctggaccacaagtttgacctgatgcccctgcggcgcatcatgaggcggctggagcagatcgtgctgacagagaggatgagggtgaagagcatcaacctgtgtgctgtgctgctgcacagctttgtgctggagctgagctacttctgcagcgtgaatgtgtactgcaggaagctgctgatcaagctgaagttccccttctag

SEQ ID NO: 114964 - DNA, 981 bp, Artificial Sequence
  derived and/or modified sequence
atgcgggagtgcatcagcatccacgtgggccaggccggcgtgcagattggaaatgcctgttgggaactgtactgtctggaacatgggatccaacccgacgggcagatgccaagcgataagacgattggcgggggggacgacagctttaacacattttttagcgagactggtgcgggtaagcacgtgcccagggccgtattcgtggacctggagccaaccgtaatagacgaagtgcgaacaggaacctataggcagctgtttcaccctgagcagctgatcactggcaaagaggacgccgccaacaactatgcaagagggcactatacgattggaaaagagattatcgacctggtgctagacaggatcagaaagctgaaaagtttttttgctacaaagcccaggattcattttccactcgccacctacgcaccggtgatatctgccgaaaaagcctaccacgaacagctgactgttgcagagattacaaacgcctgtttcgagcccgcgaatcagatggtgaaatgtgatcctcgtcacggcaagtatatggcttgctgtctgctgtataggggagatgtggtgccgaaggacgtcaatgccgcaatcgcaacaattaagacaaagcgtaccattcaattcgtagattggtgccccaccggctttaaagtcggcatcaattatcagcctcctacagttgttcccggcggggatctggctaaagtgcagagagcagtttgcatgctctctaacaccaccgcggttgcagaagcgtgggcccgtctcgatcataaatttgacctcatgcccctcagaaggatcatgagaaggctggagcagatcgtgctcacagagagaatgcgggttaagtcgatcaatctgtgtgctgtattactgcatagttttgtgctggaactgtcttacttctgcagcgtgaacgtttactgcaggaaattgctgataaagctgaagtttccattctag

SEQ ID NO: 114965 - DNA, 981 bp, Artificial Sequence
  derived and/or modified sequence
atgcgagaatgcatcagtattcacgtgggacaggctggagtgcagattggaaatgcttgttgggaactatattgtctggaacatggcatccagccggatggccaaatgccaagcgacaagactataggcggaggcgacgatagttttaacacattcttcagtgagactggagccggtaagcatgtaccgagagctgtcttcgtggacctggagcctaccgtgatcgatgaagtgaggacaggcacctacagacagctgttccaccctgagcagttgatcacgggaaaagaggatgccgctaataattacgccaggggccattacaccatagggaaagagataatcgatcttgttctggatagaatccgcaaactgaagagctttttcgcaacaaaaccacgcattcacttccccctggctacatatgccccagtgatcagcgctgagaaggcctatcatgagcagctcactgtcgctgagattactaatgcctgctttgagccggctaaccagatggttaaatgcgacccccgacacggcaaatacatggcatgctgcctgctatacaggggtgacgtggtgcctaaggacgtgaacgcggctatcgcgacaattaagaccaaaagaaccatacagtttgtcgactggtgtccaacaggcttcaaagtaggtattaactatcagccccctaccgtggtccccggaggtgatctggccaaggtccagcgggcagtgtgtatgctgagtaacaccactgcagtggctgaagcttgggctcgactagaccacaagttcgatctcatgcctctgagacgcattatgcgaagactcgagcagatcgtgctaacagaacggatgagagtgaaatctatcaatctttgtgcagtgctgttacattcctttgtgctcgagctttcctatttctgttccgtaaacgtttattgtcgcaaactgttaattaaattaaaattccccttttag

SEQ ID NO: 114966 - DNA, 1081 bp, Artificial Sequence
  derived and/or modified sequence
actacttctcccccggactccttggtagtctgttagtgggagatccttgttgccgtcccttcgcctccttcaccgccgcagaccccttcaagttctagtcatgcgtgagtgcatctccatccacgttggccaggctggtgtccagattggcaatgcctgctgggagctctactgcctggaacacggcatccagcccgatggccagatgccaagtgacaagaccattgggggaggagatgattccttcaacaccttcttcagtgaaacgggtgctggcaagcatgtgccccgggcagtgtttgtagacttggaacccacagtcattgatgaagttcgcactggcacttaccgccagctcttccaccctgagcaactcatcacaggcaaggaagatgctgccaataactatgcccgagggcactacaccattggcaaggagatcattgacctcgtgttggaccgaattcgcaagctgaaatcattctttgcaactaaaccccgcatccacttccctctggccacatatgcccctgtcatctctgctgagaaagcctaccacgaacagcttactgtagcagagatcaccaatgcttgctttgagccagccaaccagatggtgaaatgtgaccctcgccatggtaaatacatggcttgctgcctgttataccgtggtgacgtggttcccaaagatgtcaatgctgccattgccaccatcaaaaccaagcgtaccatccagtttgtggattggtgccccactggcttcaaggttggcattaattaccagcctcccactgtggtgcctggcggagacctggccaaggtacagagagctgtgtgcatgctgagcaataccacagctgttgccgaggcctgggctcgcctggaccacaagtttgacctgatgcccttgagaaggattatgaggaggttggagcagatagtgctgacggagaggatgagggtgaagagtattaacctgtgtgctgtacttttacactcctttgtcttggaactgtcttatttttgttctgtaaatgtctattgccgtaaattgttaataaaattgaagtttccattttaa

SEQ ID NO: 114967 - DNA, 981 bp, Artificial Sequence
  derived and/or modified sequence
atgagagagtgcatcagcatccacgtgggccaggccggcgtgcagatcggcaacgcctgctgggagctgtactgcctggagcacggcatccagcccgacggccagatgcccagcgacaagaccatcggcggcggcgacgacagcttcaacaccttcttcagcgagaccggcgccggcaagcacgtgcccagagccgtgttcgtggacctggagcccaccgtgatcgacgaggtgagaaccggcacctacagacagctgttccaccccgagcagctgatcaccggcaaggaggacgccgccaacaactacgccagaggccactacaccatcggcaaggagatcatcgacctggtgctggacagaatcagaaagctgaagagcttcttcgccaccaagcccagaatccacttccccctggccacctacgcccccgtgatcagcgccgagaaggcctaccacgagcagctgaccgtggccgagatcaccaacgcctgcttcgagcccgccaaccagatggtgaagtgcgaccccagacacggcaagtacatggcctgctgcctgctgtacagaggcgacgtggtgcccaaggacgtgaacgccgccatcgccaccatcaagaccaagagaaccatccagttcgtggactggtgccccaccggcttcaaggtgggcatcaactaccagccccccaccgtggtgcccggcggcgacctggccaaggtgcagagagccgtgtgcatgctgagcaacaccaccgccgtggccgaggcctgggccagactggaccacaagttcgacctgatgcccctgagaagaatcatgagaagactggagcagatcgtgctgaccgagagaatgagagtgaagagcatcaacctgtgcgccgtgctgctgcacagcttcgtgctggagctgagctacttctgcagcgtgaacgtgtactgcagaaagctgctgatcaagctgaagttccccttctag

SEQ ID NO: 114968 - protein, 788 aa, Artificial Sequence
  derived and/or modified sequence
MKMEHKRMILLFSKFTLIHKPHGGRWYLVNGRDLSRATHDQAVEAFKTAKEPIVVQVLRRTPRTKMFTPPSESQLVDTGTQTDITFEHIMALTKMSSPSPPVLDPYLLPEEHPSAHEYYDPNDYIGDIHQEMDREELELEEVDLYRMNSQDKLGLTVCYRTDDEDDIGIYISEIDPNSIAAKDGRIREGDRIIQINGIEVQNREEAVALLTSEENKNFSLLIARPELQLDEGWMDDDRNDFLDDLHMDMLEEQHHQAMQFTASVLQQKKHDEDGGTTDTATILSNQHEKDSGVGRTDESTRNDESSEQENNGDDATASSNPLAGQRKLTCSQDTLGSGDLPFSNESFISADCTDADYLGIPVDECERFRELLELKCQVKSATPYGLYYPSGPLDAGKSDPESVDKELELLNEELRSIELECLSIVRAHKMQQLKEQYRESWMLHNSGFRNYNTSIDVRRHELSDITELPEKSDKDSSSAYNTGESCRSTPLTLEISPDNSLRRAAEGISCPSSEGAVGTTEAYGPASKNLLSITEDPEVGTPTYSPSLKELDPNQPLESKERRASDGSRSPTPSQKLGSAYLPSYHHSPYKHAHIPAHAQHYQSYMQLIQQKSAVEYAQSQMSLVSMCKDLSSPTPSEPRMEWKVKIRSDGTRYITKRPVRDRLLRERALKIREERSGMTTDDDAVSEMKMGRYWSKEERKQHLVKAKEQRRRREFMMQSRLDCLKEQQAADDRKEMNILELSHKKMMKKRNKKIFDNWMTIQELLTHGTKSPDGTRVYNSFLSVTTV

SEQ ID NO: 114969 - DNA, 2367 bp, Artificial Sequence
  derived and/or modified sequence
atgaagatggagcataagcgcatgattcttctgttctcaaagtttacgctgattcataagccccacggggggagatggtatctggtgaacgggagagatctgtccagggctactcacgatcaagccgttgaggcatttaaaacggccaaagagccaattgttgtgcaggtcctacgtagaactcccagaactaagatgtttacacctccctctgaatcccaacttgtcgatactggcacgcaaacagatatcacattcgagcacataatggccctgactaaaatgagctcaccgagccccccggtactagatccgtaccttctgcctgaggagcacccgagtgctcacgagtattacgaccccaatgactatattggggatatacatcaggaaatggaccgtgaggaattggagcttgaagaagttgatctgtatcggatgaattcccaagacaagctcggcctcactgtatgctacagaaccgacgatgaagatgacatcggtatctacattagcgagatcgaccccaacagcattgctgctaaagatggtcggatacgggaaggtgacaggatcatacagattaatggtatagaagtccagaatagagaggaagccgtcgcgctcctgacatctgaagaaaacaaaaacttcagtctcctaattgcacgccctgagttacagcttgacgagggttggatggacgatgataggaacgacttcctcgacgacctgcatatggatatgcttgaagagcagcaccatcaggcaatgcagtttacggcctctgtactgcagcagaagaaacatgacgaagatggaggaaccacggacactgccacgatcctcagcaaccagcacgagaaagattctggcgtggggcgtactgatgaaagcactaggaacgacgaatcttccgagcaggagaataatggtgatgatgccactgcttcatccaatccactggcaggccaacggaagctgacatgctcccaggatacactcggcagcggcgatctccccttcagtaacgagtccttcatatcggcagattgtactgatgctgactatctcggtatccccgttgatgagtgtgaacgatttcgagagttactggagctgaaatgtcaagtgaagtcggccactccatatggcctgtactatccgtcaggacctctggatgcaggcaagtctgacccggaatccgtcgataaagagctcgaactgctgaatgaagaattacggtccattgagctggaatgccttagtatcgtgagagcacacaagatgcaacagctgaaggagcagtaccgcgagtcttggatgctgcacaatagcgggtttcgcaattacaacacaagcattgatgtgcggaggcacgaactgagcgatatcacagagctgcccgagaaaagcgacaaggatagctcctctgcttacaacacaggagagtcctgtcgcagtacccctctaacgctcgagatttctccagataattcgctccgtcgtgccgccgaaggaatttcctgtcctagctcagaaggcgcggttggcacaacagaggcctatggccccgcctccaagaatctgctgtcaattactgaagatccagaagttgggactcccacctactccccatctctcaaggaactcgatcccaatcagccacttgaatctaaggaacgccgcgctagtgacggctccagatcccctactccgagccagaagctggggagtgcttacctgccgtcttaccatcattccccttacaagcatgcccatatcccagcccacgcacagcactaccagtcgtacatgcagctcatccaacagaagagcgctgttgaatacgcccaatcgcaaatgtcactggtgagcatgtgtaaggacctgtcatctcctaccccctctgagcctcgcatggagtggaaggtgaagattagatccgacgggacacggtacatcaccaaacgacctgttcgtgacagactgctgagagagagggccctcaaaattagagaagaacggagtggtatgactacggacgacgatgccgtgagcgaaatgaaaatgggccggtactggtcgaaggaagagcgaaagcagcaccttgttaaggctaaggagcaaagaaggcgcagggagttcatgatgcagagccggctagattgtctgaaagagcagcaagccgccgacgatcgaaaggagatgaatattctcgaactcagccataaaaaaatgatgaaaaagagaaataaaaagatcttcgacaattggatgactattcaggaactgctaacgcacggcaccaagtcccctgacggaactagagtctataatagtttcctcagcgtcacgaccgtgtag

SEQ ID NO: 114970 - DNA, 2367 bp, Artificial Sequence
  derived and/or modified sequence
atgaagatggagcacaagaggatgatcctgctcttcagcaagttcaccctcatccacaagccccacggcggccgctggtacctggtgaatggccgggacctgagccgggccacccatgaccaggccgtggaggccttcaagacagccaaggagcccatcgtggtgcaggtgctgcggaggacccccaggaccaagatgttcaccccaccttctgagagccagctggtggacaccggcacccagacagacatcacctttgagcacatcatggccctgaccaagatgagcagccccagcccccctgtgctggacccctacctgctgcctgaggagcaccccagcgcccacgagtactatgaccccaatgactacatcggggacatccaccaggagatggaccgggaggagctggagctggaggaggtggacctgtacaggatgaacagccaggacaagctgggcctgactgtgtgctacagaacagatgatgaagatgacatcggcatctacatcagcgagattgaccccaacagcattgctgccaaggatggccgcatccgggagggggaccgcatcatccagatcaatggcatcgaggtgcagaaccgggaggaggccgtggccctgctgaccagcgaggagaacaagaacttcagcctgctgattgcccggcctgagctgcagctggatgagggctggatggatgatgacagaaatgacttcctggatgacctgcacatggacatgctggaggagcagcaccaccaggccatgcagttcaccgcctctgtgctgcagcagaagaagcatgatgaagatggcggcaccacagacacagccaccatcctgagcaaccagcacgagaaggacagcggcgtgggccgcacagatgagagcaccagaaatgatgagagcagcgagcaggagaacaatggagatgatgccacagccagcagcaaccccctggccggccagaggaagctgacctgcagccaggacaccctgggcagcggggacctgcccttcagcaatgaaagcttcatctctgctgactgcacagatgctgactacctgggcatccctgtggatgaatgtgagcgcttccgggagctgctggagctgaagtgccaggtgaagagcgccaccccctacggcctgtactaccccagcggccccctggatgctgggaagagtgaccctgagagcgtggacaaggagctggagctgctgaatgaggagctgcggagcattgagctggagtgcctgagcatcgtgcgggcccacaagatgcagcagctgaaggagcagtaccgggagagctggatgctgcacaacagcggcttcaggaactacaacaccagcattgatgtgagaagacatgagctgagtgacatcacagagctgcctgagaagagtgacaaggacagcagcagcgcctacaacacaggagagagctgccgcagcacccccctgaccctggagatcagcccagacaacagcctgcggcgggctgctgagggcatcagctgccccagcagcgagggcgctgtgggcaccacagaggcctacggccctgccagcaagaacctgctgagcatcacagaagatcctgaggtgggcacccccacctacagccccagcctgaaggagctggaccccaaccagcccctggagagcaaggagcggcgggccagtgatggcagccgcagccccacccccagccagaagctgggcagcgcctacctgcccagctaccaccacagcccctacaagcacgcccacatcccagcccacgcccagcactaccagagctacatgcagctgatccagcagaagtctgctgtggagtatgcccagagccagatgagcctggtgtccatgtgcaaggacctgagcagccccaccccatctgagcccaggatggagtggaaggtgaagatccgcagtgatggcacccgctacatcaccaagaggcctgtgcgggaccggctgctgcgggagcgggccctgaagatccgggaggagaggagcggcatgaccacagatgatgatgctgtgtctgagatgaagatgggccgctactggagcaaggaggagaggaagcagcacctggtgaaggccaaggagcagaggagaagaagagagttcatgatgcagagccggctggactgcctgaaggagcagcaggccgcagatgacaggaaggagatgaacatcctggagctgagccacaagaagatgatgaagaagaggaacaagaagatctttgacaactggatgaccatccaggagctgctgacccacggcaccaagagcccagatggcaccagggtgtacaacagcttcctgtctgtgaccaccgtgtag

SEQ ID NO: 114971 - DNA, 2367 bp, Artificial Sequence
  derived and/or modified sequence
atgaagatggagcacaagcggatgatcctgctgttcagcaagttcactttgatccacaaacctcatgggggacgctggtatctggtgaatgggcgcgatctctcacgggccacccacgatcaggccgtggaggcttttaaaactgccaaagagccaattgtcgtgcaggtcctgcggcgcactccaagaactaagatgtttacaccgccttctgagagccagctcgtcgatacaggcacacaaactgatatcacttttgagcatatcatggcactgactaaaatgtccagtccaagcccgccagtccttgatccttacctgcttcctgaagaacatccttcagcgcacgagtattatgatcccaacgattatattggggatatccaccaggagatggaccgggaagagctagaactggaagaagtggatctttaccgcatgaacagccaggacaaactgggtctgactgtctgttaccgcacagacgacgaagacgacataggaatctatatctcagaaatcgatcctaactccattgctgcaaaagatgggcgaatcagagagggtgatcgtattatacagataaatggcatcgaggtgcaaaacagagaggaggccgtagcccttcttactagcgaggaaaataagaatttctctcttctaatcgcccgtcctgaactgcagctcgacgaaggctggatggacgatgatagaaatgactttctggacgacctacacatggatatgctcgaagaacagcaccatcaggcaatgcagttcactgcttccgtactacaacagaaaaagcatgacgaggacgggggaacaaccgacactgccactattctctccaatcagcacgagaaagactcaggcgtaggcagaaccgatgagagcaccaggaacgatgagtccagcgagcaagaaaacaatggagacgacgctacggccagtagcaatccactggcggggcaacgaaagttgacgtgcagtcaagacacattggggagcggagacttgccgttcagtaacgaatcatttatctctgccgactgcactgatgccgactacctgggcataccggtcgacgaatgcgagcgatttcgagaactgctcgagctaaagtgccaggtgaaaagtgctaccccctacggtttgtactacccttcaggacctttagacgccgggaaatctgatcccgagtcggtcgacaaagagctagagttgctgaacgaagagttgagatctattgagctggagtgtctgagtatcgtgcgggctcacaagatgcagcaacttaaggagcaatatcgtgaaagctggatgttgcacaatagcgggttcagaaactacaacacttcgatcgatgtgcgcagacatgagctgtccgacatcactgaactacccgaaaagtctgacaaggattcctcctctgcatataacacgggggagtcttgccggtccaccccattgactctggaaatatcaccagataactctctgagacgtgccgccgaaggaataagctgcccttcgtctgagggtgcggtcggaaccaccgaggcatacggcccagcctcaaaaaatttgctttccattaccgaagacccagaagtcggcacgcctacatattccccatccctgaaggaactagatccaaatcaacccttagaatcgaaagagagacgggctagtgacgggagccggtctcctactccctctcagaaactgggctctgcctatctgccatcgtaccatcacagtccatacaaacacgcgcatatccctgcccacgcccagcactatcagagctatatgcagctaattcagcagaaatcggccgtcgaatacgcccaatcccagatgagtcttgtttctatgtgcaaagacctatcctctccgaccccaagcgaaccaaggatggaatggaaagtgaaaattcgcagcgacggcaccaggtatatcactaaaaggccggtgcgggaccgcctcctgagagagcgagccttgaagatcagagaggagaggagtgggatgacgactgacgatgatgccgttagcgaaatgaaaatgggccgctactggtccaaggaggaaagaaaacaacacctcgtcaaagctaaagaacagcggcgcagacgcgagttcatgatgcagtcccgtctagactgcctgaaagaacagcaggcagccgatgataggaaagagatgaatatcctggagttgtcccacaagaagatgatgaaaaaaaggaataagaaaatcttcgataattggatgactattcaggagttattgactcatggcacaaagagtccagatggcacgagagtgtataattcatttctttcggtgaccactgtgtag

SEQ ID NO: 114972 - DNA, 2927 bp, Artificial Sequence
  derived and/or modified sequence
agcatttgctcagtactctcaacataaaccaagcttagatcgcaatgaaactgcggacctgcaggctgccttgcttcactgagtcaatttttaaatgaagatggaacacaagaggatgatcttattgttcagtaaatttactctaatacataaaccccatggtggaagatggtatttggtcaacggcagagacttatccagagcaactcatgaccaggctgtggaagctttcaagacagccaaggagcccatagtggtgcaggtgttgagaagaacaccaaggaccaaaatgttcacgcctccatcagagtctcagctggtggacacgggaacccaaaccgacatcacctttgaacatatcatggccctcactaagatgtcctctcccagcccacccgtgctggatccctatctcttgccagaggagcatccctcagcccatgaatactacgatccaaatgactacattggagacatccatcaggagatggacagggaggagctggagctggaggaagtggacctctacagaatgaacagccaggacaagctgggcctcactgtgtgctaccggacggacgatgaagacgacattgggatttatatcagtgagattgaccctaacagcattgcagccaaggatgggcgcatccgagaaggagaccgcattatccagattaatgggatagaggtgcagaaccgtgaagaggctgtggctcttctaaccagtgaagaaaataaaaacttttcattgctgattgcaaggcctgaactccagctggatgagggctggatggatgatgacaggaacgactttctggatgacctgcacatggacatgctggaggagcagcaccaccaggccatgcaattcacagctagcgtgctgcagcagaagaagcacgacgaagacggtgggaccacagatacagccaccatcttgtccaaccagcacgagaaggacagcggtgtggggcggaccgacgagagcacccgtaatgacgagagctcggagcaagagaacaatggcgacgacgccaccgcatcctccaacccgctggcggggcagaggaagctcacctgcagccaggacaccttgggcagcggcgacctgcccttcagcaacgagtctttcatttcggccgactgcacggacgccgactacctggggatcccggtggacgagtgcgagcgcttccgcgagctcctggagctcaagtgccaggtgaagagcgccaccccttacggcctgtactaccctagcggccccctggacgccggcaagagtgaccctgagagcgtggacaaggagctggagctgctgaacgaagagctgcgcagcatcgagctggagtgcctgagcatcgtgcgcgcccacaagatgcagcagctcaaggagcagtaccgcgagtcctggatgctgcacaacagcggcttccgcaactacaacaccagcatcgacgtgcgcagacacgagctctcagatatcaccgagctcccggagaaatccgacaaggacagctcgagcgcctacaacacaggcgagagctgccgcagcaccccgctcaccctggagatctcccccgacaactccttgaggagagcggcggagggcatcagctgcccgagcagcgaaggggctgtggggaccacggaagcctacgggccagcctccaagaatctgctctccatcacggaagatcccgaagtgggcacccctacctatagcccgtccctgaaggagctggaccccaaccagcccctggaaagcaaagagcggagagccagcgacgggagccggagccccacgcccagccagaagctgggcagcgcctacctgccctcctatcaccactccccatacaagcacgcgcacatcccggcgcacgcccagcactaccagagctacatgcagctgatccagcagaagtcggccgtggagtacgcgcaaagccagatgagcctggtgagcatgtgcaaggacctgagctctcccaccccgtcggagccgcgcatggagtggaaggtgaagatccgcagcgacgggacgcgctacatcaccaagaggcccgtgcgggaccgcctgctgcgggagcgcgccctgaagatccgggaagagcgcagcggcatgaccaccgacgacgacgcggtgagcgagatgaagatggggcgctactggagcaaggaggagaggaagcagcacctggtgaaggccaaggagcagcggcggcggcgcgagttcatgatgcagagcaggttggattgtctcaaggagcagcaagcagccgatgacaggaaggagatgaacattctcgaactgagccacaaaaagatgatgaagaagaggaataagaaaatcttcgataactggatgacgatccaagaactcttaacccacggcacaaaatccccggacggcactagagtatacaattccttcctatcggtgactactgtataattttcacttctgcattatgtacataaaggagaccactaccactggggtagaaattcctgcctcgttcaatgcggcaagtttttgtatataagataagtacggtcttcatgtttatagtccaaatttgcaaaccctacaactctgggtgtcataggtctattttaagggaagagagagaaaaacacccttactatcttggaaggcaatattaacaaacagagcttttttcaaatagcaattgtacttttctacctgtacccttttacataaagtgtttaaatttcagaaagatcttttattaagcatactttcacagaataacttgtttaaactatattcatataaaaaagttaaacacgctttttttcctgcctaaaacacaaatacaactgccagtatgtatttttaatggaaccctattttataatggtacgttactgaatgtgtttcatatgcgtgaccgtta

SEQ ID NO: 114973 - DNA, 2367 bp, Artificial Sequence
  derived and/or modified sequence
atgaaaatggagcataagaggatgatccttctgttttccaaattcaccttgatacacaaaccgcacggtgggagatggtatttggtgaatggacgggacctatcccgcgcaactcatgatcaggcggtagaggcctttaaaactgccaaggagccgatagttgtccaggtgctgagacgcacacctcggaccaaaatgttcacccctccaagcgaatcccagctagtggataccgggactcaaacagatattacttttgagcatattatggctcttaccaaaatgagttccccctccccccctgtactggatccctatctgttgccagaggagcacccctccgcccacgagtactacgatcctaacgactatatcggggatatacaccaagagatggacagggaagaactcgaactggaagaggttgatctttatcggatgaatagccaggacaaactggggctgaccgtctgctatagaactgatgacgaggatgatataggtatttacatctcggaaattgatcccaatagtatcgcggcaaaggacggcaggatcagagagggggacaggatcattcagataaatgggatcgaggtacagaaccgcgaggaggctgtcgccctgctcacctccgaagaaaacaaaaatttctctctgctcatagcccgtcccgagctccagcttgatgagggttggatggacgatgacaggaacgacttcctggatgacttgcacatggacatgttagaagagcaacatcatcaggctatgcagtttaccgcctccgtcctgcagcagaagaaacacgatgaggacggtggtactacagacaccgctactatactgagcaatcaacacgaaaaggattctggggtcggccgaactgatgaaagtacccgaaacgatgagtcatcagagcaggaaaacaatggggacgacgcgacagcctcatccaatccgcttgcgggacagcgtaagctgacatgctcacaagataccctcggctcaggagatttaccattcagcaatgagtcctttatcagcgcagactgcactgatgctgactacctcggcatcccggtggatgaatgcgagaggtttagggaattactcgaacttaagtgccaagtcaaatccgcgactccatacggattatactatccgtctggaccattggacgcagggaagagcgatccagagtctgtcgataaagagctggagctgctcaatgaagagttaaggtccattgaacttgagtgcctctccatcgtcagagcccacaaaatgcagcagcttaaagagcagtaccgcgaaagctggatgttacacaattcgggctttcgcaactacaacacatccattgacgtcagaagacacgagctaagcgacataaccgagttgccagaaaaaagcgacaaggactccagttctgcttataataccggggaatcttgccggtccaccccattgaccctggagatctcccccgataactcactacggagagctgctgaaggaattagctgtccctcctccgagggcgcagtgggcaccacagaggcttacggacctgcctcaaaaaatcttctgagtattacagaggatccagaggtaggtactcccacatacagccctagtttaaaggaattggatcctaaccaacccctagagagcaaagaacgcagagctagcgatgggagtcggtcgcccactccatcccagaagctggggagcgcctacttgccgtcctatcatcactcaccctacaagcacgctcacattcccgctcatgcccagcattatcagtcatatatgcagttgattcagcaaaagagtgcagtggaatacgcgcagtcccagatgagcttggtgagtatgtgcaaagatctctcctcaccaacaccgagcgaaccacgcatggaatggaaggtcaaaatcagatctgacggcaccaggtacatcacaaaaagacctgtacgagatagactactgagggagagagccctcaagatcagggaggagcgttcgggcatgaccactgatgatgacgccgtaagcgagatgaagatgggaagatattggagtaaagaagagcgaaagcagcatttggtcaaagcaaaggagcagcgtcgcagaagagagtttatgatgcagtctaggctcgattgcttgaaagagcagcaggctgctgacgaccgaaaagaaatgaacatactcgagctgagccacaagaagatgatgaagaaacgaaataagaaaatctttgataactggatgactatccaggaacttctgacacatggcacaaagtcacctgacgggacgcgcgtctacaattcctttttaagcgtaaccaccgtttag

SEQ ID NO: 114974 - DNA, 2367 bp, Artificial Sequence
  derived and/or modified sequence
atgaagatggagcacaagagaatgatcctgctgttcagcaagttcaccctgatccacaagccccacggcggcagatggtacctggtgaacggcagagacctgagcagagccacccacgaccaggccgtggaggccttcaagaccgccaaggagcccatcgtggtgcaggtgctgagaagaacccccagaaccaagatgttcaccccccccagcgagagccagctggtggacaccggcacccagaccgacatcaccttcgagcacatcatggccctgaccaagatgagcagccccagcccccccgtgctggacccctacctgctgcccgaggagcaccccagcgcccacgagtactacgaccccaacgactacatcggcgacatccaccaggagatggacagagaggagctggagctggaggaggtggacctgtacagaatgaacagccaggacaagctgggcctgaccgtgtgctacagaaccgacgacgaggacgacatcggcatctacatcagcgagatcgaccccaacagcatcgccgccaaggacggcagaatcagagagggcgacagaatcatccagatcaacggcatcgaggtgcagaacagagaggaggccgtggccctgctgaccagcgaggagaacaagaacttcagcctgctgatcgccagacccgagctgcagctggacgagggctggatggacgacgacagaaacgacttcctggacgacctgcacatggacatgctggaggagcagcaccaccaggccatgcagttcaccgccagcgtgctgcagcagaagaagcacgacgaggacggcggcaccaccgacaccgccaccatcctgagcaaccagcacgagaaggacagcggcgtgggcagaaccgacgagagcaccagaaacgacgagagcagcgagcaggagaacaacggcgacgacgccaccgccagcagcaaccccctggccggccagagaaagctgacctgcagccaggacaccctgggcagcggcgacctgcccttcagcaacgagagcttcatcagcgccgactgcaccgacgccgactacctgggcatccccgtggacgagtgcgagagattcagagagctgctggagctgaagtgccaggtgaagagcgccaccccctacggcctgtactaccccagcggccccctggacgccggcaagagcgaccccgagagcgtggacaaggagctggagctgctgaacgaggagctgagaagcatcgagctggagtgcctgagcatcgtgagagcccacaagatgcagcagctgaaggagcagtacagagagagctggatgctgcacaacagcggcttcagaaactacaacaccagcatcgacgtgagaagacacgagctgagcgacatcaccgagctgcccgagaagagcgacaaggacagcagcagcgcctacaacaccggcgagagctgcagaagcacccccctgaccctggagatcagccccgacaacagcctgagaagagccgccgagggcatcagctgccccagcagcgagggcgccgtgggcaccaccgaggcctacggccccgccagcaagaacctgctgagcatcaccgaggaccccgaggtgggcacccccacctacagccccagcctgaaggagctggaccccaaccagcccctggagagcaaggagagaagagccagcgacggcagcagaagccccacccccagccagaagctgggcagcgcctacctgcccagctaccaccacagcccctacaagcacgcccacatccccgcccacgcccagcactaccagagctacatgcagctgatccagcagaagagcgccgtggagtacgcccagagccagatgagcctggtgagcatgtgcaaggacctgagcagccccacccccagcgagcccagaatggagtggaaggtgaagatcagaagcgacggcaccagatacatcaccaagagacccgtgagagacagactgctgagagagagagccctgaagatcagagaggagagaagcggcatgaccaccgacgacgacgccgtgagcgagatgaagatgggcagatactggagcaaggaggagagaaagcagcacctggtgaaggccaaggagcagagaagaagaagagagttcatgatgcagagcagactggactgcctgaaggagcagcaggccgccgacgacagaaaggagatgaacatcctggagctgagccacaagaagatgatgaagaagagaaacaagaagatcttcgacaactggatgaccatccaggagctgctgacccacggcaccaagagccccgacggcaccagagtgtacaacagcttcctgagcgtgaccaccgtgtag

SEQ ID NO: 114975 - protein, 783 aa, Artificial Sequence
  derived and/or modified sequence
MGCSLCSLQKQEEQYKLLYEVCQVNGRDLSRATHDQAVEAFKTAKEPIVVQVLRRTPRTKMFTPPSESQLVDTGTQTDITFEHIMALTKMSSPSPPVLDPYLLPEEHPSAHEYYDPNDYIGDIHQEMDREELELEEVDLYRMNSQDKLGLTVCYRTDDEDDIGIYISEIDPNSIAAKDGRIREGDRIIQINGIEVQNREEAVALLTSEENKNFSLLIARPELQLDEGWMDDDRNDFLDDLHMDMLEEQHHQAMQFTASVLQQKKHDEDGGTTDTATILSNQHEKDSGVGRTDESTRNDESSEQENNGDDATASSNPLAGQRKLTCSQDTLGSGDLPFSNESFISADCTDADYLGIPVDECERFRELLELKCQVKSATPYGLYYPSGPLDAGKSDPESVDKELELLNEELRSIELECLSIVRAHKMQQLKEQYRESWMLHNSGFRNYNTSIDVRRHELSDITELPEKSDKDSSSAYNTGESCRSTPLTLEISPDNSLRRAAEGISCPSSEGAVGTTEAYGPASKNLLSITEDPEVGTPTYSPSLKELDPNQPLESKERRASDGSRSPTPSQKLGSAYLPSYHHSPYKHAHIPAHAQHYQSYMQLIQQKSAVEYAQSQMSLVSMCKDLSSPTPSEPRMEWKVKIRSDGTRYITKRPVRDRLLRERALKIREERSGMTTDDDAVSEMKMGRYWSKEERKQHLVKAKEQRRRREFMMQSRLDCLKEQQAADDRKEMNILELSHKKMMKKRNKKIFDNWMTIQELLTHGTKSPDGTRVYNSFLSVTTV

SEQ ID NO: 114976 - DNA, 2352 bp, Artificial Sequence
  derived and/or modified sequence
atgggatgcagtttgtgctccttgcagaagcaggaagagcaatacaagctgctgtacgaggtttgccaagtgaacggacgcgacctctcccgcgccacccatgatcaggccgtggaagcttttaaaaccgcgaaggagcctatagtggttcaggtgctgaggaggacgcccaggacaaaaatgtttaccccaccttcggagagccagctggtcgacaccgggacacaaacggatatcacatttgagcacatcatggccctgaccaaaatgtcttcaccgtcccctccagttctggacccctacctgttacctgaggaacatccaagcgcccacgagtattacgacccgaacgactacattggcgatatacatcaagaaatggaccgggaggagttggaactggaagaagtcgacttgtatcgcatgaactctcaggataaactggggctgacagtgtgttataggacggacgacgaagatgatatcgggatctatattagcgagatagatccgaattcgattgcagccaaggacggacgcattcgggagggcgacaggattatccagatcaacggaatcgaagttcagaaccgggaggaggccgtcgccctcctgacatctgaggagaataaaaacttttccttgttgattgcgcgtccagagctacaactcgatgagggatggatggatgacgacaggaatgacttcctggacgacctacacatggacatgttggaagagcaacatcaccaggctatgcagtttacagcaagcgttctacaacagaaaaaacacgatgaagacggaggaacaaccgacaccgctaccatcttgagcaatcaacacgagaaggactctggcgtcggtcgaactgatgaaagtacaagaaacgatgaatcttctgaacaggaaaataacggggacgacgccaccgcttcctccaaccctctggccggccagcgcaaactcacttgcagtcaggatactctaggcagtggagatctacctttcagtaatgagagttttatcagcgccgattgcaccgatgcagattatctgggcataccggttgatgagtgtgagaggtttcgagaactgctcgagctgaaatgccaggtgaagtccgcaactccatatgggctctattatccgtccggccctttggatgccggtaaatctgacccggaatcagttgacaaagagctcgaactcctaaatgaggagctacggagcatagagctggagtgcttgagcatcgttagggctcacaagatgcaacagttgaaggagcagtaccgggagtcttggatgctgcataactccgggttccggaattacaacacatccatcgacgtcaggcggcacgaactcagcgacatcaccgaactaccagaaaagtctgataaagattcctctagcgcgtacaatactggtgagtcctgtaggtccactccactgaccctggaaatctcccccgacaactctctgaggagagccgcggaaggtatctcgtgtcctagttcagaaggagctgtgggcacgacagaggcctacggaccggcctccaaaaacctgctctccataacagaggaccctgaagtcggcacccctacttattcgccctcattgaaagagcttgaccctaaccagcccctggagagtaaggaacgtcgagctagcgacggatcccgatctcccactcccagtcaaaaactgggcagtgcttacttgcccagctatcaccatagcccatataagcacgcacatattccagctcacgcccagcactaccagagctacatgcagctgatccagcaaaagagtgcggttgagtatgctcagtcacaaatgagtctggtttccatgtgcaaagacctatccagccctacgccatccgagcctagaatggaatggaaggtgaagatccggagtgatggtactagatacataacaaagaggccagtgcgcgaccgtctactgcgggagcgggccctgaaaatcagagaagagcggagtgggatgaccacagacgacgatgcggtatcggagatgaagatgggaaggtactggtccaaggaagaacgtaagcaacatttggtaaaggccaaggagcagcggagacgcagagaatttatgatgcagtcccggcttgactgcttgaaagaacagcaggccgccgatgatcgtaaggagatgaacattttagagttaagccacaaaaaaatgatgaaaaagcggaataaaaagattttcgataactggatgaccatccaggaattgctgactcatggcacgaagagtcctgatggtaccagggtctacaactcattcctctccgttaccaccgtttag

SEQ ID NO: 114977 - DNA, 2352 bp, Artificial Sequence
  derived and/or modified sequence
atgggctgcagcctgtgcagcctgcagaagcaggaggagcagtacaagctgctgtatgaggtgtgccaggtgaatggccgggacctgagccgggccacccatgaccaggccgtggaggccttcaagacagccaaggagcccatcgtggtgcaggtgctgcggaggacccccaggaccaagatgttcaccccacccagcgagagccagctggtggacaccggcacccagacagacatcacctttgagcacatcatggccctgaccaagatgagcagccccagcccccctgtgctggacccctacctgctgcctgaggagcaccccagcgcccacgagtactatgaccccaatgactacatcggggacatccaccaggagatggaccgggaggagctggagctggaggaggtggacctgtacaggatgaacagccaggacaagctgggcctgactgtgtgctacagaacagatgatgaagatgacatcggcatctacatcagcgagattgaccccaacagcattgctgccaaggatggccgcatccgggagggggaccgcatcatccagatcaatggaattgaggtgcagaaccgggaggaggccgtggccctgctgaccagcgaggagaacaagaacttcagcctgctgattgcccggcctgagctgcagctggatgagggctggatggatgatgacagaaatgacttcctggatgacctgcacatggacatgctggaggagcagcaccaccaggccatgcagttcaccgcctctgtgctgcagcagaagaagcatgatgaagatggcggcaccacagacacagccaccatcctgagcaaccagcacgagaaggacagcggcgtgggccgcacagatgagagcaccagaaatgatgagagcagcgagcaggagaacaatggagatgatgccacagccagcagcaaccccctggccggccagaggaagctgacctgcagccaggacaccctgggcagcggggacctgcccttcagcaatgaaagcttcatctctgctgactgcacagatgctgactacctgggcatccctgtggatgaatgtgagcgcttccgggagctgctggagctgaagtgccaggtgaagagcgccaccccctacggcctgtactaccccagcggccccctggatgctgggaagagtgaccctgagagcgtggacaaggagctggagctgctgaatgaggagctgcggagcattgagctggagtgcctgagcatcgtgcgggcccacaagatgcagcagctgaaggagcagtaccgggagagctggatgctgcacaacagcggcttcaggaactacaacaccagcattgatgtgagaagacatgagctgagtgacatcacagagctgcctgagaagagtgacaaggacagcagcagcgcctacaacacaggagagagctgccgcagcacccccctgaccctggagatcagcccagacaacagcctgcggcgggctgctgagggcatcagctgccccagcagcgagggcgctgtgggcaccacagaggcctacggccctgccagcaagaacctgctgagcatcacagaggaccctgaggtgggcacccccacctacagccccagcctgaaggagctggaccccaaccagcccctggagagcaaggagcggcgggccagtgatggcagccgcagccccacccccagccagaagctgggcagcgcctacctgcccagctaccaccacagcccctacaagcacgcccacatcccagcccacgcccagcactaccagagctacatgcagctgatccagcagaagtctgctgtggagtatgcccagagccagatgagcctggtgtccatgtgcaaggacctgagcagccccacccccagcgagcccaggatggagtggaaggtgaagatccgcagtgatggcacccgctacatcaccaagaggcctgtgcgggaccggctgctgcgggagcgggccctgaagatccgggaggagaggagcggcatgaccacagatgatgatgctgtgtctgagatgaagatgggccgctactggagcaaggaggagaggaagcagcacctggtgaaggccaaggagcagaggagaagaagagagttcatgatgcagagccggctggactgcctgaaggagcagcaggccgcagatgacaggaaggagatgaacatcctggagctgagccacaagaagatgatgaagaagaggaacaagaagatctttgacaactggatgaccatccaggagctgctgacccacggcaccaagagcccagatggcaccagggtgtacaacagcttcctgtctgtgaccaccgtgtag

SEQ ID NO: 114978 - DNA, 2352 bp, Artificial Sequence
  derived and/or modified sequence
atgggctgcagcctgtgcagcctgcagaagcaggaggagcagtacaagcttctgtatgaggtgtgccaggtcaacgggcgggacctgtctagagccactcatgaccaggctgtggaggcattcaagactgcaaaagaacccatagtggtgcaggtgctgagaagaacacctcgaacgaaaatgttcactcccccatctgagtcccagctagtcgacaccggaacacaaacagacattaccttcgagcacatcatggcactaacgaaaatgtcgagccccagtccacctgtgttggatccatacttactacccgaggaacatccaagtgctcatgagtattatgatccgaatgactatatcggcgatatccaccaggagatggatcgggaggagttggagctcgaagaggtggatctgtataggatgaactcgcaggataagctgggtttgaccgtatgctaccggacagacgatgaagatgacatcggtatatatatttccgagatcgatccgaacagtatagcagcgaaggacgggaggatcagagagggggacagaattatacaaattaacgggatagaggtacaaaatcgggaagaggcagtcgctctgctgacaagcgaggaaaataaaaatttctccctgcttatcgcgaggcccgaactgcagctggacgaggggtggatggatgatgaccgcaacgacttcctcgatgacttacacatggacatgttggaggaacaacaccaccaggcaatgcagtttactgcatctgtgctgcagcaaaaaaaacacgatgaagatggaggcaccaccgatactgcaaccatattatctaaccaacacgagaaggatagcggagtcggccggaccgacgagagcactagaaatgacgagtccagtgagcaagagaataacggtgacgacgctacagccagctcgaaccccctcgccggtcagcggaagctgacctgttcacaagatacactcggctctggcgacttacctttcagtaacgagagtttcatatccgccgattgcaccgatgctgactacctgggcattcccgtggatgagtgtgaacggttcagggagctactcgagctgaaatgccaggttaagtcggcgacaccctatggcctgtactatccctcaggacctctggatgctgggaagtccgaccctgagagtgtcgataaagagctcgaactgttgaatgaggagcttaggtctatcgaattggagtgtctttcaatagtgagggcccataaaatgcagcagttgaaggagcagtaccgggagtcttggatgctccataacagcggctttcgcaactacaatacctccatcgacgtcagaaggcatgaactctctgatatcaccgaactaccagaaaaatccgataaggatagtagtagcgcttacaatacgggggaatcttgtagatcaaccccgcttactctcgagatttctccggacaacagtttgcgcagggccgctgagggcatttcttgtccaagtagcgaaggggccgtgggcacaaccgaagcctatggaccagccagcaaaaatcttctctccataaccgaggacccagaagtgggaacacctacgtacagccccagcctgaaggaacttgatcctaatcagcccctggagtcaaaagaacggcgagcctccgatgggagccgaagcccaactcctagccaaaagctaggaagcgcgtatctgccctcatatcaccacagtccttacaaacatgcccatatccctgctcatgcccagcattaccaatcatacatgcagctgattcagcagaagagcgcagtggagtatgcccagtcccagatgagcctcgtgtcaatgtgtaaagatctctctagtcccacacccagcgaacctagaatggaatggaaggtgaagattcgcagtgatggcacgagatacattacgaaacggcccgttcgcgatcggttgctaagagagagagcattaaaaatacgcgaggaaagaagtggcatgaccacggatgacgatgctgtgagcgaaatgaaaatggggcggtactggtcaaaagaggaaagaaaacagcacctggttaaagctaaggaacaacgccggaggcgtgagtttatgatgcagagcagactggactgcctgaaggagcagcaagcggcagatgacagaaaagagatgaatatcctggagctgtctcacaagaagatgatgaagaagcgtaacaagaagatctttgataactggatgacaatacaggagctactaacacacgggactaagagtccagatggcacccgagtatataactcattcctttccgtcaccaccgtatag

SEQ ID NO: 114979 - DNA, 2778 bp, Artificial Sequence
  derived and/or modified sequence
gcgaggggaggaagggaagcgtggaaggggggagagagttgttgtctagcctctgagagcagcgccaatgtgaagcgttgcagtcgcttgactcacctgaggctctccaaggataccttcaatgcctgcactgtaagggagctgcttttcccgggtgctggcgagaacggaagccttcctttgacgtttttctaaacatgggatgcagtctgtgcagcctgcagaagcaagaggagcagtacaaattactctatgaagtttgtcaggtcaacggcagagacttatccagagcaactcatgaccaggctgtggaagctttcaagacagccaaggagcccatagtggtgcaggtgttgagaagaacaccaaggaccaaaatgttcacgcctccatcagagtctcagctggtggacacgggaacccaaaccgacatcacctttgaacatatcatggccctcactaagatgtcctctcccagcccacccgtgctggatccctatctcttgccagaggagcatccctcagcccatgaatactacgatccaaatgactacattggagacatccatcaggagatggacagggaggagctggagctggaggaagtggacctctacagaatgaacagccaggacaagctgggcctcactgtgtgctaccggacggacgatgaagacgacattgggatttatatcagtgagattgaccctaacagcattgcagccaaggatgggcgcatccgagaaggagaccgcattatccagattaatgggatagaggtgcagaaccgtgaagaggctgtggctcttctaaccagtgaagaaaataaaaacttttcattgctgattgcaaggcctgaactccagctggatgagggctggatggatgatgacaggaacgactttctggatgacctgcacatggacatgctggaggagcagcaccaccaggccatgcaattcacagctagcgtgctgcagcagaagaagcacgacgaagacggtgggaccacagatacagccaccatcttgtccaaccagcacgagaaggacagcggtgtggggcggaccgacgagagcacccgtaatgacgagagctcggagcaagagaacaatggcgacgacgccaccgcatcctccaacccgctggcggggcagaggaagctcacctgcagccaggacaccttgggcagcggcgacctgcccttcagcaacgagtctttcatttcggccgactgcacggacgccgactacctggggatcccggtggacgagtgcgagcgcttccgcgagctcctggagctcaagtgccaggtgaagagcgccaccccttacggcctgtactaccctagcggccccctggacgccggcaagagtgaccctgagagcgtggacaaggagctggagctgctgaacgaagagctgcgcagcatcgagctggagtgcctgagcatcgtgcgcgcccacaagatgcagcagctcaaggagcagtaccgcgagtcctggatgctgcacaacagcggcttccgcaactacaacaccagcatcgacgtgcgcagacacgagctctcagatatcaccgagctcccggagaaatccgacaaggacagctcgagcgcctacaacacaggcgagagctgccgcagcaccccgctcaccctggagatctcccccgacaactccttgaggagagcggcggagggcatcagctgcccgagcagcgaaggggctgtggggaccacggaagcctacgggccagcctccaagaatctgctctccatcacggaagatcccgaagtgggcacccctacctatagcccgtccctgaaggagctggaccccaaccagcccctggaaagcaaagagcggagagccagcgacgggagccggagccccacgcccagccagaagctgggcagcgcctacctgccctcctatcaccactccccatacaagcacgcgcacatcccggcgcacgcccagcactaccagagctacatgcagctgatccagcagaagtcggccgtggagtacgcgcaaagccagatgagcctggtgagcatgtgcaaggacctgagctctcccaccccgtcggagccgcgcatggagtggaaggtgaagatccgcagcgacgggacgcgctacatcaccaagaggcccgtgcgggaccgcctgctgcgggagcgcgccctgaagatccgggaagagcgcagcggcatgaccaccgacgacgacgcggtgagcgagatgaagatggggcgctactggagcaaggaggagaggaagcagcacctggtgaaggccaaggagcagcggcggcggcgcgagttcatgatgcagagcaggttggattgtctcaaggagcagcaagcagccgatgacaggaaggagatgaacattctcgaactgagccacaaaaagatgatgaagaagaggaataagaaaatcttcgataactggatgacgatccaagaactcttaacccacggcacaaaatccccggacggcactagagtatacaattccttcctatcggtgactactgtataattttcacttctgcattatgtacataaaggagaccactaccactggggtagaaattcctgcctcgttcaatgcggcaagtttttgtatataagataagtacggtcttcatgtttatagtccaaatttgcaaaccctacaactctgggtgtcataggtctattttaagggaagagagagaaaaacacccttactatcttggaaggcaatattaacaaacagagcttttttc

SEQ ID NO: 114980 - DNA, 2352 bp, Artificial Sequence
  derived and/or modified sequence
atgggttgttcactttgctctcttcagaagcaggaggagcaatacaagcttttgtatgaagtctgccaagtaaatggaagagacctgtcaagggcaacccacgaccaagccgtggaggcctttaaaactgctaaggagcctattgtagtgcaggtgctcagaagaaccccgagaaccaaaatgtttacaccgccatccgaaagtcaactggtcgacaccggcacccagactgatataacattcgaacatatcatggccctgaccaaaatgtcatccccttcccccccagtcctggatccatatctgctgcctgaagagcatccttcggctcacgaatattacgacccgaatgattacattggggacattcatcaggagatggaccgggaggaactcgaactagaggaggtagacctgtaccgaatgaactcccaggataagctgggtctcacggtgtgttatagaactgacgacgaagacgatatcggaatttatatatcggagattgaccctaattctatcgcagctaaagacggacgcatcagggagggtgatcgtatcatccagatcaatggtatcgaagttcaaaacagagaggaggcggtggccctactgacttctgaggagaataagaactttagcctgttgattgcacgaccggagctacagcttgatgagggatggatggatgatgatagaaatgacttcttagacgacctacatatggacatgctggaagagcagcatcatcaggcaatgcaatttaccgccagtgtcctgcagcagaagaaacatgacgaagacgggggtaccacagacactgccaccatactcagcaaccaacacgaaaaggactccggagtgggcagaactgatgagtctacgagaaatgacgaatcttcagagcaggagaacaacggtgacgacgcgacagcttcctccaaccctctggccggtcagagaaagctcacatgcagccaggacaccctgggctccggcgatttgcccttctcaaacgagtccttcatctctgccgattgtactgatgccgattatctgggcattccagtggatgagtgcgagagattccgggagctgctagaactgaaatgtcaggtgaaaagcgctactccttacggcctttattacccttctgggccactcgacgccggtaaatctgacccagaaagcgttgacaaagaactggagctgctgaatgaggaacttcgatctattgaactggagtgtctttctattgtgagagcgcacaaaatgcagcaattaaaagagcagtatagggagtcctggatgctgcacaattccgggtttagaaactataacacttctattgacgtaaggaggcacgaattgtctgacattacagagttacccgaaaaaagcgacaaggattctagcagtgcctataacaccggcgaaagttgtcgcagcacccctcttaccttggagatttcacctgataattctctgcgccgagctgcagaaggtatctcctgcccttcaagcgagggggcagttggcaccaccgaagcatatgggcctgcaagcaaaaacctactgagtataaccgaggatccggaggtgggtacgcctacttactcaccatccctgaaagagctcgaccctaaccagccgctggaaagtaaggagaggcgggctagcgatggctcacgctcccctactccaagccagaaattgggctccgcgtacctgcccagctaccaccacagcccttataaacacgcccatatcccggcacacgcgcaacactatcagtcttatatgcagctgatccagcaaaaatccgccgttgaatacgcccaatctcagatgtcactggtgagcatgtgtaaggacttgtcttctcctacaccatctgagcctagaatggagtggaaagtgaagatccgcagtgacggaactcgctacatcaccaagcgccctgttcgcgataggctactgcgcgagcgcgcacttaaaattagagaggaacgctcaggaatgacaacggatgacgatgcagtatctgagatgaaaatgggcaggtactggagtaaggaagagcggaagcagcatttggtcaaggcgaaggagcagcgacggcgtagggagtttatgatgcagtcgagactggattgcctgaaggaacagcaagctgctgacgaccggaaagaaatgaacatcctcgaactaagccacaaaaagatgatgaagaagcgaaacaagaaaatttttgacaactggatgactattcaggaactactgacccacggtacaaaatcccctgatgggacccgggtgtataattctttcctcagcgtgaccaccgtgtag

SEQ ID NO: 114981 - DNA, 2352 bp, Artificial Sequence
  derived and/or modified sequence
atgggctgcagcctgtgcagcctgcagaagcaggaggagcagtacaagctgctgtacgaggtgtgccaggtgaacggcagagacctgagcagagccacccacgaccaggccgtggaggccttcaagaccgccaaggagcccatcgtggtgcaggtgctgagaagaacccccagaaccaagatgttcaccccccccagcgagagccagctggtggacaccggcacccagaccgacatcaccttcgagcacatcatggccctgaccaagatgagcagccccagcccccccgtgctggacccctacctgctgcccgaggagcaccccagcgcccacgagtactacgaccccaacgactacatcggcgacatccaccaggagatggacagagaggagctggagctggaggaggtggacctgtacagaatgaacagccaggacaagctgggcctgaccgtgtgctacagaaccgacgacgaggacgacatcggcatctacatcagcgagatcgaccccaacagcatcgccgccaaggacggcagaatcagagagggcgacagaatcatccagatcaacggcatcgaggtgcagaacagagaggaggccgtggccctgctgaccagcgaggagaacaagaacttcagcctgctgatcgccagacccgagctgcagctggacgagggctggatggacgacgacagaaacgacttcctggacgacctgcacatggacatgctggaggagcagcaccaccaggccatgcagttcaccgccagcgtgctgcagcagaagaagcacgacgaggacggcggcaccaccgacaccgccaccatcctgagcaaccagcacgagaaggacagcggcgtgggcagaaccgacgagagcaccagaaacgacgagagcagcgagcaggagaacaacggcgacgacgccaccgccagcagcaaccccctggccggccagagaaagctgacctgcagccaggacaccctgggcagcggcgacctgcccttcagcaacgagagcttcatcagcgccgactgcaccgacgccgactacctgggcatccccgtggacgagtgcgagagattcagagagctgctggagctgaagtgccaggtgaagagcgccaccccctacggcctgtactaccccagcggccccctggacgccggcaagagcgaccccgagagcgtggacaaggagctggagctgctgaacgaggagctgagaagcatcgagctggagtgcctgagcatcgtgagagcccacaagatgcagcagctgaaggagcagtacagagagagctggatgctgcacaacagcggcttcagaaactacaacaccagcatcgacgtgagaagacacgagctgagcgacatcaccgagctgcccgagaagagcgacaaggacagcagcagcgcctacaacaccggcgagagctgcagaagcacccccctgaccctggagatcagccccgacaacagcctgagaagagccgccgagggcatcagctgccccagcagcgagggcgccgtgggcaccaccgaggcctacggccccgccagcaagaacctgctgagcatcaccgaggaccccgaggtgggcacccccacctacagccccagcctgaaggagctggaccccaaccagcccctggagagcaaggagagaagagccagcgacggcagcagaagccccacccccagccagaagctgggcagcgcctacctgcccagctaccaccacagcccctacaagcacgcccacatccccgcccacgcccagcactaccagagctacatgcagctgatccagcagaagagcgccgtggagtacgcccagagccagatgagcctggtgagcatgtgcaaggacctgagcagccccacccccagcgagcccagaatggagtggaaggtgaagatcagaagcgacggcaccagatacatcaccaagagacccgtgagagacagactgctgagagagagagccctgaagatcagagaggagagaagcggcatgaccaccgacgacgacgccgtgagcgagatgaagatgggcagatactggagcaaggaggagagaaagcagcacctggtgaaggccaaggagcagagaagaagaagagagttcatgatgcagagcagactggactgcctgaaggagcagcaggccgccgacgacagaaaggagatgaacatcctggagctgagccacaagaagatgatgaagaagagaaacaagaagatcttcgacaactggatgaccatccaggagctgctgacccacggcaccaagagccccgacggcaccagagtgtacaacagcttcctgagcgtgaccaccgtgtag

SEQ ID NO: 114982 - protein, 140 aa, Artificial Sequence
  derived and/or modified sequence
MDLKIGKATPKDSKYVEKLEALFPDLPKRNDIFDSLQKAKFDVSGLTTEQMLRKDQKTIYRQGVKVAISAIYMDLEAFLQRSNLLADLHAFCQAHSYDVLVAMTIFFNTHNEPVRQLAIFCPHVALQTTICEVLERSHSP

SEQ ID NO: 114983 - DNA, 816 bp, Artificial Sequence
  derived and/or modified sequence
atggacctgaagatcggcaaggccacccccaaggacagcaagtacgtggagaagctggaggccctgttccccgacctgcccaagagaaacgacatcttcgacagcctgcagaaggccaagttcgacgtgagcggcctgaccaccgagcagatgctgagaaaggaccagaagaccatctacagacagggcgtgaaggtggccatcagcgccatctacatggacctggaggccttcctgcagagaagcaacctgctggccgacctgcacgccttctgccaggcccacagctacgacgtgctggtggccatgaccatcttcttcaacacccacaacgagcccgtgagacagctggccatcttctgcccccacgtggccctgcagaccaccatctgcgaggtgctggagagaagccacagcccccccctgaagctgacccccgccagcagcacccaccccaacctgcacgcctacctgcagggcaacacccaggtgagcagaaagaagctgctgcccctgctgcaggaggccctgagcgcctacttcgacagcatgaagatccccagcggccagcccgagaccgccgacgtgagcagagagcaggtggacaaggagctggacagagccagcaacagcctgatcagcggcctgagccaggacgaggaggacccccccctgccccccacccccatgaacagcctggtggacgagtgccccctggaccagggcctgcccaagctgagcgccgaggccgtgttcgagaagtgcagccagatcagcctgagccagagcaccaccgccagcctgagcaagaagtag

SEQ ID NO: 114984 - DNA, 423 bp, Artificial Sequence
  derived and/or modified sequence
atggacctgaagatcggcaaggccacccccaaggacagcaagtacgtggagaagctggaggccctgttccccgacctgcccaagagaaacgacatcttcgacagcctgcagaaggccaagttcgacgtgagcggcctgaccaccgagcagatgctgagaaaggaccagaagaccatctacagacagggcgtgaaggtggccatcagcgccatctacatggacctggaggccttcctgcagagaagcaacctgctggccgacctgcacgccttctgccaggcccacagctacgacgtgctggtggccatgaccatcttcttcaacacccacaacgagcccgtgagacagctggccatcttctgcccccacgtggccctgcagaccaccatctgcgaggtgctggagagaagccacagcccctag

SEQ ID NO: 114985 - DNA, 816 bp, Artificial Sequence
  derived and/or modified sequence
atggatctgaagattggcaaagccactcccaaggattccaagtacgtggagaagctggaggctctcttcccagatctaccgaaacggaacgatatttttgactccctgcaaaaagcaaaatttgacgtgagcggcctgacgaccgaacaaatgttgagaaaggaccaaaaaaccatctaccggcagggagttaaggtcgccatctctgccatctatatggacctcgaggcattcctccagcgctccaatctgctcgcggacctccacgctttctgtcaggctcatagctacgatgtcctagtcgctatgaccatcttcttcaacacccacaacgagccagtgcggcagttggccattttttgtcctcatgtagccctgcaaaccacaatctgcgaggtgctagagagaagtcattccccaccgttaaaactcaccccagcgagtagcacccatccgaacctgcatgcctacctgcagggcaacactcaagtatctaggaagaaactgcttcccctgttgcaggaggctctttcagcctattttgatagtatgaaaatcccctccggccagccagagacggctgacgtttctagagaacaggttgacaaggagctcgacagggcctcgaactcgcttatctcaggtctgtcacaagatgaagaagaccctcctttacctcctactccaatgaattctctggtggacgaatgccctcttgatcaagggctccctaaactctccgctgaggcagtgttcgaaaaatgtagtcagattagcctcagccaaagcacaaccgccagcctgtccaagaagtag

SEQ ID NO: 114986 - DNA, 423 bp, Artificial Sequence
  derived and/or modified sequence
atggatctgaagattggcaaggctactccaaaggactcaaagtacgtggagaaattagaagccctgtttcctgacctgcccaaacgcaacgacatcttcgactccctacagaaggccaaatttgacgtttctgggctgacaactgaacagatgctgcggaaggaccagaagacaatttatagacagggggtaaaggtggccatcagtgccatatacatggacctggaggcgtttctccagaggagcaacctgttagctgaccttcatgccttttgccaggcccactcgtatgatgtcctcgtggcgatgaccattttcttcaatacccataatgagcctgtgcggcaactggctatcttttgcccacatgtggctctgcagaccacaatctgtgaagtgcttgaaaggtcccacagtccatag

SEQ ID NO: 114987 - DNA, 816 bp, Artificial Sequence
  derived and/or modified sequence
atggacctgaagattggcaaggccacccccaaggacagcaaatatgtggagaagctggaggccctcttcccagacctgcccaagagaaatgacatctttgacagcctgcagaaggccaagtttgatgtgtctggcctgaccacagagcagatgctgaggaaggaccagaagaccatctaccggcagggcgtgaaggtggccatcagcgccatctacatggacctggaggccttcctgcagaggagcaacctgctggccgacctgcacgccttctgccaggcccacagctatgatgtgctggtggccatgaccatcttcttcaacacccacaatgaacctgtgcggcagctggccatcttctgcccccacgtggccctgcagaccaccatctgtgaggtgctggagaggagccacagcccccccctgaagctgaccccagccagcagcacccaccccaacctgcacgcctacctgcagggcaacacccaggtgtccaggaagaagctgctgcccctgctgcaggaggccctgagcgcctactttgacagcatgaagatccccagcggccagcctgagacagcagatgtgtcccgggagcaggtggacaaggagctggaccgggccagcaacagcctcatcagcggcctgagccaggatgaagaagatcctcccctgccccccacccccatgaacagcctggtggatgagtgccccctggaccagggcctgcccaagctgtctgctgaggccgtgtttgagaagtgcagccagatcagcctgagccagagcaccacagccagcctgagcaagaagtag

SEQ ID NO: 114988 - DNA, 423 bp, Artificial Sequence
  derived and/or modified sequence
atggacctgaagattggcaaggccacccccaaggacagcaaatatgtggagaagctggaggccctcttcccagacctgcccaagagaaatgacatctttgacagcctgcagaaggccaagtttgatgtgtctggcctgaccacagagcagatgctgaggaaggaccagaagaccatctaccggcagggcgtgaaggtggccatcagcgccatctacatggacctggaggccttcctgcagaggagcaacctgctggccgacctgcacgccttctgccaggcccacagctatgatgtgctggtggccatgaccatcttcttcaacacccacaatgaacctgtgcggcagctggccatcttctgcccccacgtggccctgcagaccaccatctgtgaggtgctggagaggagccacagcccctag

SEQ ID NO: 114989 - DNA, 816 bp, Artificial Sequence
  derived and/or modified sequence
atggacctgaagatcggcaaggccacccccaaggacagcaagtacgtggagaaacttgaggccttgttcccagacttaccgaaacggaacgatattttcgattctctgcaaaaggctaaattcgatgtgtcaggcctgacgacagagcagatgctgagaaaagaccagaaaaccatataccgtcagggcgtaaaggtggccataagtgcgatttacatggatctcgaggcattccttcaaaggtctaacctgttagccgacctgcacgctttttgccaagctcatagctacgacgtgcttgtggcaatgaccatttttttcaatacccacaacgaacctgtaaggcagctggccatcttctgccctcatgtggctttgcagacgacaatctgtgaagtgctcgaacggtctcatagtccacccctcaagctgacaccagcatcctctactcaccccaatctccacgcctacctgcaaggcaacactcaggtttcacggaagaaattgttacctctccttcaggaagctctgtcagcttacttcgactctatgaagatcccatcgggccaacccgagacggccgacgtatccagagaacaggttgacaaggagcttgatcgagcctccaactcactgatctccggtctcagccaagacgaggaggatcctccccttccccctactccaatgaactctcttgtcgacgagtgccctctggaccaggggcttccaaagttgtcggcagaagcggtgttcgagaaatgctcacagatctctctatctcagagtaccacagcgtccttaagtaagaagtag

SEQ ID NO: 114990 - DNA, 423 bp, Artificial Sequence
  derived and/or modified sequence
atggacctgaagatcggcaaggccacccccaaggacagcaagtacgtagaaaaactggaggctctattccccgacttgcctaaaaggaatgacattttcgatagcctgcagaaagccaagttcgacgtgtcagggctaaccaccgaacagatgctccgaaaggaccagaagacaatttaccgtcagggcgtaaaggtcgccatctccgccatctatatggatctcgaggccttcttacagcggagcaaccttctggccgacctgcatgcattctgtcaggcccactcttatgacgtactagtggcaatgactattttctttaatacacataatgagcctgtgcgccagctggcgatcttttgtccgcacgtagccctacaaaccaccatttgtgaggtcctagaaagatctcattcaccgtag

SEQ ID NO: 114991 - DNA, 816 bp, Artificial Sequence
  derived and/or modified sequence
atggacctaaaaattggaaaagccacacctaaggacagtaaatatgtggaaaagctggaggcattgttcccggacttgccaaaaagaaatgatatcttcgacagcctgcagaaggccaagttcgacgtgagcgggttaacgacagaacagatgctgcgaaaggatcagaagacaatatatagacagggggttaaggttgccatttcagccatctacatggatttggaggccttcctgcagcgtagtaatctcctcgcagatttgcacgccttttgccaggcccatagttatgacgtactcgtcgccatgacgatcttttttaacactcacaatgagccagtccgtcaattggccattttctgtccgcacgtggcattgcagaccacaatttgcgaagtcctggagcgctcccactctcctccactgaagctgacccctgccagctctacgcatccaaacttacacgcctacttacaaggcaacacacaggtatcaagaaaaaaactgttgccgctcctccaagaggctctgagtgcctattttgattccatgaagatccctagcggacagcccgaaacagccgacgtttccagagaacaagtcgacaaagagctcgacagagcctctaattccctgatttccggccttagtcaggacgaggaggatcctccgctgccaccaaccccaatgaattctcttgtggacgaatgtcccttagaccagggcctgccaaaattatccgctgaggccgtgtttgaaaagtgtagtcaaatttctctaagtcagtctacaactgcttccctgtctaagaagtag

SEQ ID NO: 114992 - DNA, 423 bp, Artificial Sequence
  derived and/or modified sequence
atggatttgaagattggcaaggccacgcccaaagactctaagtatgtcgaaaaattggaagcgctcttccctgacctccctaaacgaaatgacatctttgattctcttcaaaaggccaagtttgatgtgtcaggcctgaccaccgagcagatgttgcggaaggatcagaaaactatttatcgacagggcgtaaaagtggcaatctcagctatatatatggatctggaagcattccttcagaggtccaacttgctcgccgaccttcacgcattctgtcaggcacactcttatgacgtccttgtcgctatgactatctttttcaacacccataacgaacccgtgcggcagctcgctattttctgcccgcatgtcgcccttcagactactatttgtgaagtgctggaaagatctcatagtccttag

SEQ ID NO: 114993 - protein, 1361 aa, Artificial Sequence
  derived and/or modified sequence
MAWKTLPIYLLLLLSVFVIQQVSSQDLSSCAGRCGEGYSRDATCNCDYNCQHYMECCPDFKRVCTAELSCKGRCFESFERGRECDCDAQCKKYDKCCPDYESFCAEVHNPTSPPSSKKAPPPSGASQTIKSTTKRSPKPPNKKKTKKVIESEEITEVKDNKKNRTKKKPTPKPPVVDEAGSGLDNGDFKVTTPDTSTTQHNKVSTSPKITTAKPINPRPSLPPNSDTSKETSLTVNKETTVETKETTTTNKQTSTDGKEKTTSAKETQSIEKTSAKDLAPTSKVLAKPTPKAETTTKGPALTTPKEPTPTTPKEPASTTPKEPTPTTIKSAPTTPKEPAPTTTKSAPTTPKEPAPTTTKEPAPTTPKEPAPTTTKEPAPTTTKSAPTTPKEPAPTTPKKPAPTTPKEPAPTTPKEPTPTTPKEPAPTTKEPAPTTPKEPAPTAPKKPAPTTPKEPAPTTPKEPAPTTTKEPSPTTPKEPAPTTTKSAPTTTKEPAPTTTKSAPTTPKEPSPTTTKEPAPTTPKEPAPTTPKKPAPTTPKEPAPTTPKEPAPTTTKKPAPTTPKEPAPTTPKETAPTTPKKLTPTTPEKLAPTTPEKPAPTTPEELAPTTPEEPTPTTPEEPAPTTPKAAAPNTPKEPAPTTPKEPAPTTPKEPAPTTPKETAPTTPKGTAPTTLKEPAPTTPKKPAPKELAPTTTKEPTSTTCDKPAPTTPKGTAPTTPKEPAPTTPKEPAPTTPKGTAPTTLKEPAPTTPKKPAPKELAPTTTKGPTSTTSDKPAPTTPKETAPTTPKEPAPTTPKKPAPTTPETPPPTTSEVSTPTTTKEPTTIHKSPDESTPELSAEPTPKALENSPKEPGVPTTKTPAATKPEMTTTAKDKTTERDLRTTPETTTAAPKMTKETATTTEKTTESKITATTTQVTSTTTQDTTPFKITTLKTTTLAPKVTTTKKTITTTEIMNKPEETAKPKDRATNSKATTPKPQKPTKAPKKPTSTKKPKTMPRVRKPKTTPTPRKMTSTMPELNPTSRIAEAMLQTTTRPNQTPNSKLVEVNPKSEDAGGAEGETPHMLLRPHVFMPEVTPDMDYLPRVPNQGIIINPMLSDETNICNGKPVDGLTTLRNGTLVAFRGHYFWMLSPFSPPSPARRITEVWGIPSPIDTVFTRCNCEGKTFFFKDSQYWRFTNDIKDAGYPKPIFKGFGGLTGQIVAALSTAKYKNWPESVYFFKRGGSIQQYIYKQEPVQKCPGRRPALNYPVYGETTQVRRRRFERAIGPSQTHTIRIQYSPARLAYQDKGVLHNEVKVSILWRGLPNVVTSAISLPNIRKPDGYDYYAFSKDQYYNIDVPSRTARAITTRSGQTLSKVWYNCP

SEQ ID NO: 114994 - protein, 181 aa, Artificial Sequence
  derived and/or modified sequence
MAGSREVVAMDCEMVGLGPHRESGLARCSLVNVHGAVLYDKFIRPEGEITDYRTRVSGVTPQHMVGATPFAVARLEILQLLKGKLVVGHDLKHDFQALKEDMSGYTIYDTSTDRLLWREAKLDHCRRVSLRVLSERLLHKSIQNSLLGHSSVEDARATMELYQISQRIRARRGLPRLAVSD

SEQ ID NO: 114995 - DNA, 546 bp, Artificial Sequence
  derived and/or modified sequence
atggctggttctagagaagttgttgctatggactgcgagatggtagggctcgggccccatcgggagtccgggctcgcgcgttgctcactcgttaacgtccatggggctgtgctctacgataaattcatacggccagagggcgaaatcactgactaccggacacgggtttcgggcgtgacacctcagcacatggtcggagctaccccgtttgcggtggcacgcctggaaatcttacagttattgaaggggaaactggtggtgggtcacgacttaaaacacgacttccaggcactgaaggaggatatgagtgggtatacaatttatgacacatcaaccgacaggctgctctggcgagaagctaaattagaccactgtaggcgggtctcattgagagttctcagtgaacggcttctccataaaagtatacagaatagtctgctgggacactcctctgtggaagacgcccgagccactatggagctgtaccagatttcccaacggatcagggctcgtcggggactaccacgtctcgcggtgagcgattag

SEQ ID NO: 114996 - DNA, 546 bp, Artificial Sequence
  derived and/or modified sequence
atggcgggctctagggaagtggtggccatggactgcgagatggtgggcctggggccccaccgcgagtccggacttgcccggtgcagcctggtcaatgtgcatggcgccgtgctgtatgataagtttatcagacctgagggcgaaattaccgattatagaactcgagtgtccggcgtgaccccacaacacatggtcggagccacccctttcgctgtagcccgcctggaaatccttcagctcctgaagggcaaacttgtcgtgggtcatgaccttaaacacgactttcaagctctgaaggaagacatgtctggttacacgatttacgacacgtcaacagatcgccttttatggcgcgaagctaagctggatcactgtaggagggtttccttgagagtgttaagtgaaagattgttacacaaatccattcagaatagcctgctgggtcactctagcgtcgaagacgcacgggccacgatggagttgtatcagatatctcagagaattagggcacgccgagggctgccacgacttgccgtttcagattag

SEQ ID NO: 114997 - DNA, 1856 bp, Artificial Sequence
  derived and/or modified sequence
atccactccacgaacgtcaaatgcgtcatctgaggagggggagggccggggcaaaggaggggcaccctgacatggagcctgccagctccgtcagccctgactcggcccggagctgagctccccacctgccggtagcccaggagatggagcagcccagcccacgtgcccggccttccgcccctgacttcacttgataacaaactagaaactgaaacagggtcgggatgccgatgccggcttggagttagagatgagtcaccgctgagagcagctgcagtagctgagcagtggcagcagagaggcagacgtgagctgagggcgcagaggcaggcagcatctctgagggtccccaaggaacatggctgggagccgtgaggtggtggccatggactgcgagatggtggggctggggccccaccgggagagtggcctggctcgttgcagcctcgtgaacgtccacggtgctgtgctgtacgacaagttcatccggcctgagggagagatcaccgattacagaacccgggtcagcggggtcacccctcagcacatggtgggggccacaccatttgccgtggccaggctagagatcctgcagctcctgaaaggcaagctggtggtgggtcatgacctgaagcacgacttccaggcactgaaagaggacatgagcggctacacaatctacgacacgtccactgacaggctgttgtggcgtgaggccaagctggaccactgcaggcgtgtctccctgcgggtgctgagtgagcgcctcctacacaagagcatccagaacagcctgcttggacacagctcggtggaagatgcgagggcaacgatggagctctatcaaatctcccagagaatccgagcccgccgagggctgccccgcctggctgtgtcagactgaagccccatccagcccgttccgcagggactagaggctttcggctttttgggacagcaactaccttgcttttggaaaatacatttttaatagtaaagtggctctatattttctctacgccatcactgggtcctcttcttattcttctctccaagctgggttaacagtagacaggacccatttctgtgtgatgttaggagggaatgaagtcttatgctggggaggtgggcaagtatcaatttccttaatatcttgaatcctgtgggtccaaaatgtggcttggaaatctaagtagcatgtggcttaattactaatcccaccctttgctgttgcatcccagccctattcctggtgcatttatgcccagagaggtggcattatttcctggggtggcattcagctcctcttgagttggtgccacagcatttgtgggctttgaagcaaaggtacaggaaatgtcaagggtgccaccccggcaaccttgagcaagtcacccctcctatttgtaaaatgaggaaggaaaggtaacaaactgtggagtcagagagaagtaggttggaatcctctttgtcatttagtagctgtttgacctaaggtggtttactgaacttctcagtttctccatctgtaaaatgagaattctagcaactcgtagggtatttgtgagatgttgcaggcaaagcccccagcaccatgcctgtcctagcttaagcacccaccaggtgtcgataagtaattgttcttccctggactgcctgcacatctagggcaccccaggaagagtcaccgcactctgtttcggggctcggctctctgaggggagggcatcctgtatggggaggagggtctggaccagagctgtccctgatcgctagaatcaacggcagaattcttgttattttaataataattaataatttagtgcttccactaaataaaaatcattggaatggtg

SEQ ID NO: 114998 - DNA, 800 bp, Artificial Sequence
  derived and/or modified sequence
tatggtcattacaggtggtcagctgtagctggatgtgtgccttgaaaggctgacaagtttgccctgagtgactcacctactgtcacctgatccaacaagatttgtgggcgtagcctgccgatgggtgacgccagttaaagcatctctgagggtccccaaggaacatggctgggagccgtgaggtggtggccatggactgcgagatggtggggctggggccccaccgggagagtggcctggctcgttgcagcctcgtgaacgtccacggtgctgtgctgtacgacaagttcatccggcctgagggagagatcaccgattacagaacccgggtcagcggggtcacccctcagcacatggtgggggccacaccatttgccgtggccaggctagagatcctgcagctcctgaaaggcaagctggtggtgggtcatgacctgaagcacgacttccaggcactgaaagaggacatgagcggctacacaatctacgacacgtccactgacaggctgttgtggcgtgaggccaagctggaccactgcaggcgtgtctccctgcgggtgctgagtgagcgcctcctacacaagagcatccagaacagcctgcttggacacagctcggtggaagatgcgagggcaacgatggagctctatcaaatctcccagagaatccgagcccgccgagggctgccccgcctggctgtgtcagactgaagccccatccagcccgttccgcagggactagaggctttcggctttttgggacagcaactaccttgcttttggaaaatacatttttaatag

SEQ ID NO: 114999 - DNA, 546 bp, Artificial Sequence
  derived and/or modified sequence
atggccggcagccgggaggtggtggccatggactgtgagatggtgggcctgggcccccaccgggagagcggcctggcccgctgcagcctggtgaatgtgcacggggctgtgctgtatgacaagttcatccggcctgagggggagatcacagactaccgcaccagggtgtctggagtgaccccccagcacatggtgggcgccaccccatttgctgtggcccggctggagatcctgcagctgctgaagggcaagctggtggtgggccatgacctgaagcatgacttccaggccctgaaggaggacatgagcggctacaccatctatgacaccagcacagaccggctgctgtggagggaggccaagctggaccactgccggcgggtgtccctgcgggtgctgtctgagcggctgctgcacaagagcatccagaacagcctgctgggccacagctctgtggaggatgcccgggccaccatggagctgtaccagatcagccagaggatccgggcccggcggggcctgccccggctggccgtgtctgactag

SEQ ID NO: 115000 - DNA, 546 bp, Artificial Sequence
  derived and/or modified sequence
atggccggcagccgggaggtggtggccatggactgcgagatggtgggattaggtccacatcgggaatcaggcctggcaaggtgtagccttgtgaacgtgcacggggccgtgctttatgataaattcattcgacccgagggggagatcacagattacaggaccagagtgtcgggagttactcctcagcacatggttggagcaacgccattcgcagtggcgcgtttagaaatccttcagctgctcaaaggcaaactagtggttggccacgacctcaagcacgattttcaggcgctgaaggaggacatgagtggttacacaatttatgatactagcaccgaccgtctactctggagggaggccaaattggatcattgtcggcgcgtaagtctgcgggtgctctcggaacgtcttctgcataaaagtatacagaacagcctgctgggtcactcatccgttgaggacgcccgggccaccatggagttgtaccagattagccaacgcataagggcaagacgggggctgccccggctcgccgttagcgactag

SEQ ID NO: 115001 - DNA, 546 bp, Artificial Sequence
  derived and/or modified sequence
atggccggcagccgggaggtggtggccatggactgcgagatggtgggcttgggtccgcatcgtgaatccgggctggcacgatgttccttggttaacgtccatggggcggtgctttacgacaaatttatcagacccgaaggagaaataactgactaccgaacccgcgtgtccggcgttacacctcagcacatggtgggggctacgcctttcgcagtggcgcggctggagatcctgcagctccttaaaggcaagcttgtggtggggcacgaccttaaacatgactttcaggcgctgaaagaagacatgagtgggtataccatctacgacacctcaacagacagactgctttggcgcgaggcaaagctggaccactgtcggcgcgtgtcactgcgcgtgctcagcgaaagattactccacaagtccattcaaaattcactactaggacattcaagcgtggaagacgctagggcaacaatggagttgtaccagatcagccagagaatccgtgccagacggggtctacccagactagcggtgtccgactag

SEQ ID NO: 115002 - DNA, 546 bp, Artificial Sequence
  derived and/or modified sequence
atggccggaagccgggaagttgtggctatggactgcgaaatggtcggccttggccctcatcgggaaagcgggctcgcccgatgctcgctggtgaatgtacacggggctgttctctacgacaaattcataagacccgagggcgagatcacagactaccgcacgagagtgtctggagtgacaccccaacatatggttggagcgacaccatttgctgtggccaggctggagatcctgcagctactgaaaggaaaactggtggttgggcatgatctcaagcacgacttccaggctcttaaagaggatatgagtggttatactatttacgatacgagcacagataggctgctctggcgggaggctaaactggaccattgccggagagtgtctcttcgcgtgctgtctgaaaggcttctgcacaaaagtatccagaattcacttctgggccattccagcgttgaagatgcacgggcaacaatggagctataccagatctctcaaaggattagagcaaggaggggactgccccgtctggccgtgagcgactag

SEQ ID NO: 115003 - DNA, 546 bp, Artificial Sequence
  derived and/or modified sequence
atggcaggatctcgtgaggtggtggcaatggactgcgagatggtggggctgggtccacaccgggaaagtggcctggcaaggtgttcccttgtgaatgttcatggggctgtgctctacgataagttcattcggccagagggggaaattaccgactatcgaacacgggtgagcggtgtcaccccccagcacatggtgggtgcaacacctttcgccgttgctcgcctcgagatactgcaactgttgaagggcaagctagtggtgggccacgaccttaagcatgatttccaggcgttaaaggaagatatgagcggttacactatctatgacacttccacagacagactcctctggcgtgaggccaagctcgaccactgccgcagagtaagtctcagggtgttaagcgagaggcttctacataaatctatccaaaattcactactggggcactcgagcgtggaggacgctcgtgctaccatggagttgtaccaaattagccagcggatacgggctcggagaggactgccacgtcttgccgtgtctgactag

SEQ ID NO: 115004 - DNA, 546 bp, Artificial Sequence
  derived and/or modified sequence
atggccggcagcagagaggtggtggccatggactgcgagatggtgggcctgggcccccacagagagagcggcctggccagatgcagcctggtgaacgtgcacggcgccgtgctgtacgacaagttcatcagacccgagggcgagatcaccgactacagaaccagagtgagcggcgtgaccccccagcacatggtgggcgccacccccttcgccgtggccagactggagatcctgcagctgctgaagggcaagctggtggtgggccacgacctgaagcacgacttccaggccctgaaggaggacatgagcggctacaccatctacgacaccagcaccgacagactgctgtggagagaggccaagctggaccactgcagaagagtgagcctgagagtgctgagcgagagactgctgcacaagagcatccagaacagcctgctgggccacagcagcgtggaggacgccagagccaccatggagctgtaccagatcagccagagaatcagagccagaagaggcctgcccagactggccgtgagcgactag

SEQ ID NO: 115005 - DNA, 1137 bp, Artificial Sequence
  derived and/or modified sequence
atgctgggcctgagaccccccctgctggccctggtgggcctgctgagcctgggctgcgtgctgagccaggagtgcaccaagttcaaggtgagcagctgcagagagtgcatcgagagcggccccggctgcacctggtgccagaagctgaacttcaccggccccggcgaccccgacagcatcagatgcgacaccagaccccagctgctgatgagaggctgcgccgccgacgacatcatggaccccaccagcctggccgagacccaggaggaccacaacggcggccagaagcagctgagcccccagaaggtgaccctgtacctgagacccggcttcggcagcttcgtggacaagaccgtgctgcccttcgtgaacacccaccccgacaagctgagaaacccctgccccaacaaggagaaggagtgccagccccccttcgccttcagacacgtgctgaagctgaccaacaacagcaaccagttccagaccgaggtgggcaagcagctgatcagcggcaacctggacgcccccgagggcggcctggacgccatgatgcaggtggccgcctgccccgaggagatcggctggagaaacgtgaccagactgctggtgttcgccaccgacgacggcttccacttcgccggcgacggcaagctgggcgccatcctgacccccaacgacggcagatgccacctggaggacaacctgtacaagagaagcaacgagttcgactaccccagcgtgggccagctggcccacaagctggccgagaacaacatccagcccatcttcgccgtgaccagcagaatggtgaagacctacgagaagctgaccgagatcatccccaagagcgccgtgggcgagctgagcgaggacagcagcaacgtggtgcagctgatcaagaacgcctacaacaagctgagcagcagagtgttcctggaccacaacgccctgcccgacaccctgaaggtgacctacgacagcttctgcagcaacggcgtgacccacagaaaccagcccagaggcgactgcgacggcgtgcagatcaacgtgcccatcaccttccaggtgaaggtgaccgccaccgagtgcatccaggagcagagcttcgtgatcggcagatgggccagcagaacctag

SEQ ID NO: 115006 - DNA, 1137 bp, Artificial Sequence
  derived and/or modified sequence
atgctgggactgcgaccaccactcctcgctctggtgggcctcttgtcgctaggatgtgtccttagccaagaatgtacaaagtttaaggtgagttcttgccgcgagtgtatagagtctggccctggttgtacctggtgtcagaaactcaacttcaccgggcctggcgaccctgacagcattcgctgcgatactcgcccccagctattaatgcgcggttgcgcagcggatgatattatggacccgacgtctctggccgagacacaggaggatcacaacgggggccaaaaacaactcagtccgcaaaaggtaaccctgtacctcaggccgggctttggatctttcgttgataagaccgtgctcccttttgtgaatacacatccagacaagctgcgaaatccttgtcctaataaggaaaaggaatgtcagccccccttcgcattcagacacgtattgaaactgacaaacaacagtaaccagtttcagacagaagtggggaaacaactgatcagtggcaaccttgatgcccctgagggaggcttagatgccatgatgcaggtggccgcatgccccgaagagatcggatggaggaacgtgacacggctgcttgtctttgcaaccgatgacgggttccactttgctggcgacgggaaacttggagctattcttactccaaatgacggcagatgtcacttggaggacaacctctacaaaaggtccaacgagtttgactacccatctgtcggccaactggcgcataaactggccgagaacaacattcagccaatattcgccgtaacctcccgtatggtcaaaacatacgagaagctgaccgaaattatccctaagtcagcggtaggtgagctcagcgaggatagcagcaacgtggtccagttaattaagaacgcttataacaaactctcatctcgggtctttctggaccacaatgcactgccagacaccttgaaggtcacctatgacagtttttgctctaatggagtgacccaccgaaatcagcctagaggtgattgcgacggagtccagataaatgtgccaatcacatttcaggttaaagtaactgccaccgaatgtatacaagagcaaagcttcgttatcggtcgctgggcttctcgcacttag

SEQ ID NO: 115007 - DNA, 1137 bp, Artificial Sequence
  derived and/or modified sequence
atgctgggcctgcggccccccctgctggccctggtgggcctgctgagcctgggctgtgtgctgagccaggagtgcaccaagttcaaggtgagcagctgcagagaatgtattgaaagtggccctggctgcacctggtgccagaagctgaacttcaccggccctggggaccctgacagcatccgctgtgacacccggccccagctgctgatgaggggctgtgccgcagatgacatcatggaccccaccagcctggccgagacccaggaggaccacaacggcggccagaagcagctgagcccccagaaggtgaccctgtacctgcggcccggcttcggcagctttgtggacaagacagtgctgccctttgtgaacacccacccagacaagctgaggaacccctgccccaacaaggagaaggagtgccagcccccatttgccttcagacatgtgctgaagctgaccaacaacagcaaccagttccagacagaggtgggcaagcagctgatcagcggcaacctggatgcccctgagggcggcctggatgccatgatgcaggtggccgcctgcccagaggagatcggctggagaaatgtgacccggctgctggtgtttgccacagatgatggcttccactttgctggagatggcaagctgggcgccatcctgaccccaaatgatggccgctgccacctggaggacaacctgtacaagaggagcaatgaatttgactaccccagcgtgggccagctggcccacaagctggccgagaacaacatccagcccatctttgctgtgaccagcaggatggtgaagacctatgagaagctgacagagatcatccccaagtctgctgtgggggagctgtctgaggacagcagcaatgtggtgcagctgatcaagaatgcctacaacaagctgagcagcagggtcttcctggaccacaatgccctgcctgacaccctgaaggtgacctatgacagcttctgcagcaatggagtgacccacaggaaccagcccaggggggactgtgatggagtgcagatcaacgtgcccatcaccttccaggtgaaggtgacagccacagagtgcatccaggagcagagctttgtgattggccgctgggccagcaggacatag

SEQ ID NO: 115008 - DNA, 1137 bp, Artificial Sequence
  derived and/or modified sequence
atgctgggcctgcggccccccctgctggccctggtgggcctgctgtcactgggctgcgtgttatcccaggaatgtacaaaatttaaagtgagctcatgtcgcgaatgtatcgaatccggaccaggatgcacttggtgtcaaaagctcaacttcaccggcccaggggaccccgactctatccgttgcgatactcgtcctcagttactcatgcggggatgcgcggccgacgatattatggatccaaccagcctcgccgaaacgcaggaggatcacaacggcggccagaaacagctttcaccacagaaagtcacactatacctcagacccgggtttggcagcttcgtggacaaaactgtgctgccctttgtaaatacacatccggataagcttagaaacccctgcccgaacaaggagaaagagtgtcaaccaccctttgctttcagacacgtcctgaagctgaccaataactcaaaccagtttcaaaccgaggtgggaaaacagttgatttcgggcaacctggacgcccctgagggtggattagacgccatgatgcaggtggcagcctgccctgaggagattgggtggaggaacgtgactcggcttctcgtgtttgctacagatgatggattccactttgccggcgacggtaaattaggagccatattgaccccaaacgacggacgttgccatctggaggacaatctgtacaagagaagcaatgagttcgactatcctagcgtgggacagttagcccacaagctggccgagaataacatccagccaattttcgctgtgacctctaggatggttaagacctatgaaaaactaacggagatcatacccaaatccgcggtgggcgagctctccgaggatagttcgaacgtcgtgcagctgattaagaatgcctacaacaagctaagtagccgagttttcctggaccacaacgccttacctgacaccctaaaagtaacctacgattccttctgttccaacggcgttacacaccggaatcagcctcgtggagactgcgatggcgtccagataaacgtgcccatcacttttcaggtaaaagtcactgcaacagagtgtatccaggagcaatcgttcgtgataggaaggtgggcctcccgaacttag

SEQ ID NO: 115009 - DNA, 1137 bp, Artificial Sequence
  derived and/or modified sequence
atgttgggactgcgccctcccctcttggctcttgtcggcctcctctcgttagggtgtgtgctgtcacaggaatgtaccaagtttaaggtgtctagctgccgcgagtgcatcgagtctggacccggatgcacatggtgccaaaagctcaatttcaccggcccaggagatcccgatagcattaggtgcgatacaaggccccagcttctgatgaggggctgcgctgctgatgacatcatggatcccacctctttagccgaaactcaagaagatcacaacggaggccaaaagcagctgtctcctcagaaggtgaccctctacctccgacctggattcgggtcctttgtggataaaaccgtgctgccctttgtgaatacccatccagacaagctgcggaatccttgtcccaacaaagaaaaggaatgtcaacccccattcgccttcagacatgtgttgaagttgacaaacaacagtaatcagtttcagactgaagtcggcaaacaattgattagcggaaacctggacgctcctgagggcggattagatgccatgatgcaggtggctgcatgccctgaggaaatcggctggcgaaatgtaacacgtctccttgtgtttgcgactgacgatggattccactttgctggggacggcaagcttggggcaatactgactccaaatgacggcagatgccatcttgaagataatctttataagagatccaacgagttcgattacccttcagttggtcagcttgcccacaaactggcagagaataacatccagcccatttttgccgtgactagtaggatggtaaagacctacgaaaagctgacagaaattatccctaagagtgccgtcggggagctttctgaggatagttccaatgttgtccagctcatcaaaaatgcttacaacaagctctcatctagagtcttccttgatcataatgctctccctgacactttgaaggtcacctatgatagcttttgtagcaacggggtgactcaccggaatcagcctaggggcgactgtgatggtgtccagatcaatgtccccataacctttcaagtgaaggttacagcaaccgaatgtatccaagagcaaagctttgtaatcggccgatgggctagtaggacatag

SEQ ID NO: 115010 - protein, 557 aa, Artificial Sequence
  derived and/or modified sequence
MPKEKYEPPDPRRMYTIMSSEEAANGKKSHWAELEISGKVRSLSASLWSLTHLTALHLSDNSLSRIPSDIAKLHNLVYLDLSSNKIRSLPAELGNMVSLRELHLNNNLLRVLPFELGKLFQLQTLGLKGNPLTQDILNLYQEPDGTRRLLNYLLDNLSGTAKRITTEQPPPRSWIMLQEPDRTRPTALFSVMCYNVLCDKYATRQLYGYCPSWALNWDYRKKAIIQEILSCNADIVSLQEVETEQYYSFFLVELKERGYNGFFSPKSRARTMSEQERKHVDGCAIFFKTEKFTLVQKHTVEFNQLAMANSEGSEAMLNRVMTKDNIGVAVLLELRKESIEMPSGKPHLGTEKQLILVANAHMHWDPEYSDVKLVQTMMFLSEVKNIIDKASRNLKSSVLGEFGTIPLVLCADLNSLPDSGVVEYLSTGGVETNHKDFKELRYNESLTNFSCHGKNGTTNGRITHGFKLQSAYESGLMPYTNYTFDFKGIIDYIFYSKPQLNTLGILGPLDHHWLVENNISGCPHPLIPSDHFSLFAQLELLLPFLPQVNGIHLPGRR

SEQ ID NO: 115011 - DNA, 1674 bp, Artificial Sequence
  derived and/or modified sequence
atgccaaaagagaagtatgagcccccggacccgagacgtatgtatacaattatgagttccgaagaggccgccaatgggaagaaatctcattgggccgagctcgaaattagtgggaaagtgcgatccctctccgccagcttgtggtcactaacacacttaacggctttgcacttatccgacaattccttgagccgaatcccctctgatatcgcaaagctgcacaatctggtctatctggatttgtcttccaataagatacgatcacttccggccgagttagggaatatggtgtcactccgggagctccacctgaacaacaacctgctgcgggtgcttccctttgagctgggcaagctctttcagcttcagacactggggttaaaaggtaacccgctgacacaggatatccttaacctgtaccaggagcctgatgggacgagacggttgctcaattatctcctcgacaatcttagtggaaccgccaaacgcattactactgagcagcctcctccgcgctcctggattatgttgcaagagccagacagaacacgacccacagctctattttccgtcatgtgctataacgtactgtgtgataagtacgcaacccgacagctgtacggctattgtccctcatgggccctaaactgggactacaggaagaaggcgattatccaggaaattcttagttgcaatgcggatatcgtgtccctgcaggaagtcgagaccgaacaatactactcattttttctggtggagctgaaggagagaggctacaatggctttttcagtcctaaatcacgggcacgcactatgtcagaacaagagagaaagcacgtggatggatgcgcaatcttcttcaagacagagaaatttacacttgttcagaagcacactgtggagttcaatcagctggccatggctaatagcgaagggtctgaggctatgctgaacagggtcatgaccaaggacaatataggcgtggcggtgctccttgagctcaggaaggaatcaatcgagatgccttcaggaaagccccatctgggcacggagaagcaactgattctggtggccaatgctcacatgcactgggaccctgagtattcggacgtgaagctggtacagacaatgatgttcctcagtgaggttaaaaatattattgacaaggcgagccggaatttaaagtcaagtgttctcggagaatttggaacaatccctctagtgctgtgcgcagacttgaactccctccccgattctggagtcgttgaatatttgagtacagggggagtcgagacaaaccataaagattttaaggagttacggtacaacgaatctctgacgaatttctcttgtcacggcaaaaatggcaccacgaatgggcgaattacccatggctttaaactgcaatccgcctatgaaagcggattaatgccatacactaactatacattcgattttaaggggatcatcgactatatattctactcgaaaccacaactgaacacgctgggcattctggggccgctcgatcaccactggttggtggagaacaacataagtggttgcccgcacccactcatcccctctgaccatttttcactgtttgcccaattagaactgcttctgccatttttgcctcaggtgaatggcatccatctgccaggccgcagatag

SEQ ID NO: 115012 - DNA, 1674 bp, Artificial Sequence
  derived and/or modified sequence
atgcctaaggaaaagtacgaacctcccgaccctcgtcggatgtataccatcatgtcgagtgaagaggccgccaacggtaagaagtcacattgggctgaactggaaatatccgggaaggtgaggtcattgagcgcttccttgtggagcctgacccacttgactgctctgcacctcagcgacaactccttatcaaggatccctagcgatatcgccaagttgcataatctggtttatcttgacctatccagcaacaagatacgctcccttccagccgaactgggaaacatggtctccctccgcgaactgcacctgaataataatttacttagggtcttgccttttgagttaggcaaactatttcagctccaaactctgggcctcaagggcaacccccttacccaggatatcctgaatctgtatcaggagcctgacgggaccagaaggctcttaaactatttattagacaacctcagcgggactgcgaaaaggataaccaccgagcagccgcctcctaggtcctggataatgctccaggagccagatcgtacacgccccacagccctctttagcgttatgtgttataatgtcctctgcgacaaatatgccacaagacagttatatggttattgtccatcttgggccttgaactgggactaccgaaaaaaagcaattatccaggagatcctgtcctgtaacgccgatatcgtgtccctgcaggaagtggagactgaacagtattatagtttttttctggtagagttgaaggaaaggggctataacggattttttagccccaagtcccgagcaagaaccatgagtgagcaggaacgcaagcatgtcgatgggtgcgccatcttcttcaagaccgagaagtttaccctggtccagaagcatacggtggagttcaatcagctagctatggccaacagcgaggggtcagaggccatgctgaatagagtgatgacaaaggacaatattggtgtggccgtccttctcgagttgcgcaaggagagcatcgagatgcccagcggcaaacctcaccttggaacagaaaaacagctgatactagtggcaaacgcacatatgcactgggatcctgaatattcagatgtgaagctggtccaaacaatgatgttcctgtccgaagtcaagaacatcattgataaagcgtcacgtaacctgaaatcctccgtgctaggggagttcggtacaatcccactggttctgtgcgccgatctcaactccctgccagactctggcgtcgtggaatatctgtcgaccggaggagtggaaacaaaccacaaagattttaaagagttgcgttacaacgagtccctgacaaacttctcatgccatgggaagaatggcacgaccaacggccggattactcacggcttcaagctccagtctgcttacgagtcgggcctgatgccttataccaactacacttttgactttaagggtataattgactatatattctactccaagccccagctgaatacgttaggaatcctcggtcccttagaccaccactggctcgttgagaataatatctcaggttgccctcacccactgattccgagcgaccacttctcactgtttgcccagcttgagctcttgctgcccttcctgcctcaggtcaacggcatccacctgcccgggcggcgctag

SEQ ID NO: 115013 - DNA, 1674 bp, Artificial Sequence
  derived and/or modified sequence
atgcccaaggagaagtatgagcccccagaccccaggaggatgtacaccatcatgagcagcgaggaggccgccaacgggaagaagagccactgggccgagctggagatcagcggcaaggtgcgcagcctgagcgccagcctgtggagcctgacccacctgacagccctgcacctgagtgacaacagcctgagccgcatccccagcgacatcgccaagctgcacaacctggtgtacctggacctgagcagcaacaagatccgcagcctgcctgctgagctgggcaacatggtgtccctgcgggagctgcacctgaacaacaacctgctgcgggtgctgccctttgagctgggcaagctgttccagctgcagaccctgggcctgaagggcaaccccctgacccaggacatcctgaacctgtaccaggagccagatggcacccggcggctgctgaactacctgctggacaacctgagcggcacagccaagaggatcaccacagagcagcccccacccaggtcctggatcatgctgcaggagccagacaggacccggcccacagccctcttctctgtgatgtgctacaacgtgctgtgtgacaagtatgccacccggcagctgtatggctactgccccagctgggccctgaactgggactacaggaagaaggccatcatccaggagatcctgagctgcaatgctgacatcgtgtccctgcaggaggtggagacagagcagtactacagcttcttcctggtggagctgaaggagcggggctacaacggcttcttcagccccaagagccgggcccggaccatgtctgagcaggagaggaagcacgtggatggctgtgccatcttcttcaagacagagaagttcaccctggtgcagaagcacacagtggagttcaaccagctggccatggccaacagcgagggcagcgaggccatgctgaacagagtgatgaccaaggacaacatcggcgtggccgtgctgctggagctgaggaaggagagcattgagatgcccagcggcaagccccacctgggcacagagaagcagctgatcctggtggccaatgcccacatgcactgggaccctgagtacagtgatgtgaagctggtgcagaccatgatgttcctgtctgaggtgaagaacatcatcgacaaggccagcaggaacctgaagagctctgtgctgggggagtttggcaccatccccctggtgctgtgtgccgacctgaacagcctgcctgattctggagtggtggagtacctgagcactggaggagtggagaccaaccacaaggacttcaaggagctgcgctacaatgaaagcctgaccaacttcagctgccacggcaagaatggcaccaccaacggccgcatcacccacggcttcaagctgcagagcgcctatgagagcggcctgatgccctacaccaactacacctttgacttcaagggcatcatcgactacatcttctacagcaagccccagctgaacaccctgggcatcctgggccccctggaccaccactggctggtggagaacaacatcagcggctgcccccaccccctcatccccagcgaccacttcagcctgtttgcccagctggagctgctgctgcccttcctgccccaggtgaatggcatccacctgcccggcagaagatag

SEQ ID NO: 115014 - DNA, 1674 bp, Artificial Sequence
  derived and/or modified sequence
atgcccaaggagaagtacgagccccccgacccccggcggatgtacaccataatgtcgagcgaggaggccgccaatggaaagaaaagccattgggccgagctggagatcagtggtaaagtgaggagcctaagcgccagcctctggagtctaactcacctcacagctctgcatctgtccgataattccttatccagaatcccatctgatattgcgaaacttcataacttggtctaccttgacctgagtagcaacaagatccgatctctaccggccgaactgggaaacatggtgagcctgcgcgagctacacctgaataacaacctgctccgcgtcctcccctttgagctcgggaagctgtttcagcttcagaccctggggttaaaagggaacccacttacgcaggatatcttgaatctgtaccaagagccggacggaactagacgccttctgaattaccttctcgataacctgtccggtacagcgaaaagaatcactacagaacagccacctcccaggtcctggattatgctgcaagagcccgataggactagacctactgcactcttcagcgtcatgtgttataatgtcttgtgcgataaatacgcaactcggcagttgtacggctattgtccaagctgggcattgaactgggactacagaaagaaggcaattattcaggagattctgtcttgcaatgcagacatcgtcagtcttcaggaagtggagactgaacagtattacagcttttttctcgtggaactaaaagagcgtgggtataacggtttcttctctccaaagtccagagctaggaccatgtctgaacaggagaggaaacacgtggatggctgcgctatattttttaaaaccgagaagtttactctggtgcagaagcatacagtcgagtttaatcagctggctatggcaaactcagaaggtagtgaggccatgctgaatcgagtgatgacgaaggataatatcggcgtggctgtgcttttagagctcaggaaggagagcatcgaaatgccttccggaaagccccacctcggcactgaaaaacagttgattctagtcgctaatgcacatatgcactgggatccagaatactccgacgtgaaactcgttcagacaatgatgtttttatcagaggtgaaaaatatcattgataaggcatccagaaatctcaagagcagcgttctgggcgagttcgggaccatccccctagtgttatgcgctgatctcaactccttacctgattctggagtcgtggaatacctgagtactggtggtgttgagaccaatcacaaggatttcaaggagctgaggtataacgagtcgttgaccaattttagctgtcatggcaaaaatggcaccactaacggcagaattactcacggcttcaagctacagtcggcctacgagagtggcttgatgccttacacaaactacacatttgattttaagggtattatcgactacatcttttattccaaaccacaattaaataccctcgggatcctaggccccctggatcatcattggctggtggagaacaacatctccgggtgccctcaccccctgataccaagtgatcatttcagcctcttcgcccagctggagctcctgcttccattcttaccccaagttaacggcattcacttacccggtcgacggtag

SEQ ID NO: 115015 - DNA, 1674 bp, Artificial Sequence
  derived and/or modified sequence
atgcccaaggagaagtacgagccccccgacccccggcggatgtacacgattatgagctctgaagaggccgccaacggtaagaagagccactgggccgaactggagatcagcggcaaggtgagatccttatccgctagtctctggtcacttacccatctgaccgccctgcacctgtccgataattctctgtcccggataccaagcgacattgcaaagctgcacaaccttgtgtatctcgacctgtcttctaacaaaatcaggagcctccccgctgagctgggcaatatggtgagcctgcgggagctgcacctgaacaataacctgttgcgcgtcctccctttcgaactgggcaagctctttcagctgcaaactctcggcttaaaaggcaatcctctgacccaggatatcttgaatctctatcaagaacctgacggcacccgcaggctcttgaactaccttctggataacctgtctggcacagccaaacggataactacagagcaaccaccccctcgtagttggatcatgttacaggagccggaccggacgcggccaacagcactcttttcagttatgtgttacaacgtgctgtgtgataaatacgccacgaggcagctctacggctactgccctagctgggctttgaattgggactaccggaaaaaggccatcatccaggaaatcctaagctgcaatgcggatattgtgtctctacaggaagtggagaccgagcagtattacagcttctttctggtcgaattaaaggagcgaggctacaacgggtttttcagtccaaagtcacgcgcacgcacgatgagtgagcaagaacgaaagcatgttgacggatgcgccattttctttaagaccgaaaagtttacactggtccagaaacacaccgtcgagttcaaccagctcgctatggctaacagtgaaggttcagaggccatgctaaatagggtcatgacaaaggacaatattggcgtcgcagtgctgttggaactccgtaaagagagtattgagatgccctccggcaagccccatttagggactgaaaagcagcttatccttgtggcaaatgcacatatgcactgggatcctgaatactcagacgtgaagctggttcagacaatgatgtttctgagcgaagttaaaaatatcatcgacaaggcaagcagaaacctgaagtcgagcgtccttggcgaattcggcactatccctctggtgctgtgtgctgatctcaacagtcttcccgacagcggggtggtcgagtatcttagcactgggggagttgaaaccaaccacaaggattttaaagagctgagatataatgagagcctgaccaactttagctgccacgggaagaacggtacaacaaacggcagaattactcacgggttcaaactccagtctgcttatgagtctggcttaatgccttataccaattatacgttcgattttaaaggcataatcgattatatcttttactcaaagccacagctcaacaccctggggattttgggccccctggatcatcattggctggtggagaacaatatttctgggtgtccccaccctcttattccgagtgatcacttctccttgttcgcacaactcgaactccttctgccttttctgccccaggtcaacgggatccatctgcccggccgacggtag

SEQ ID NO: 115016 - DNA, 1674 bp, Artificial Sequence
  derived and/or modified sequence
atgcccaaggaaaagtacgaaccaccggacccgaggaggatgtacaccataatgtcttcagaggaagctgccaacggaaaaaagtcccattgggctgagctagaaatcagcggcaaggtaaggagcctgtccgcgtcactctggtccttgacccacctgaccgcattgcatttgtccgacaattccctgtctaggattccatctgacatcgcaaagctgcataacctggtgtatctcgacctgtcgagcaataaaattcgcagcctgcctgccgagctgggaaacatggtaagcctgcgcgagctgcatctgaataacaacctactgagagtcttaccatttgagctcggaaagctctttcagctgcagacattggggttgaaggggaatccacttactcaggacatactcaatctgtatcaagagcctgatggcaccaggagactgctgaattacctgcttgataacctaagcggcactgccaagaggattaccacagagcagccgcctcccaggagctggattatgctgcaggaaccggataggaccaggcccacagccttattcagcgtcatgtgctacaatgtgctgtgcgacaagtacgccacacggcagctgtacggttactgcccttcttgggctttaaactgggattaccgcaagaaggccatcatccaggagattctgagttgtaacgcggatatcgtgagcctgcaggaggtggagaccgaacagtactacagtttcttcctggtggaattgaaggagagaggatacaacgggtttttttctcccaagtcccgggctcgcacaatgagcgagcaggaaagaaagcatgtggacggatgtgccatcttctttaagaccgagaagtttaccctggtgcagaagcatacggtcgagtttaatcagttggctatggccaattcagaaggcagcgaggcgatgctcaatagagtcatgaccaaggacaatattggagtagctgtattgctggagcttcggaaggaatctattgaaatgccatcgggtaagcctcacctgggcactgagaaacagctgatcctcgttgcaaacgcccacatgcattgggatccagaatacagcgatgtaaaactggttcagacaatgatgtttctgagcgaggtaaaaaatatcattgataaggcttccaggaatctgaaaagttccgtgctcggcgaatttggtactatcccccttgtgttgtgtgccgacctgaatagtttgcctgatagtggggtcgtggagtacctgagtactggtggggtagagacaaatcataaggacttcaaggagctcagatataatgagtctctgacaaactttagctgtcacggcaaaaacgggacgacaaacggcaggataacccacggctttaagctccagtcagcctatgagtccggtttgatgccctacacaaattacacatttgactttaagggcattatcgactacatcttttattcaaaaccccagctaaacacactcggaatcctgggacctttggaccaccattggctggtggaaaataacatttcaggctgccctcatccgctgatccctagtgaccacttcagcctctttgctcagctggagctccttctaccctttcttcctcaggtaaacgggattcatctacccggaaggagatag

SEQ ID NO: 115017 - DNA, 1674 bp, Artificial Sequence
  derived and/or modified sequence
atgccaaaggagaagtatgagcctccagaccctcggagaatgtataccattatgtccagcgaggaagccgcaaatggcaaaaaaagccactgggccgaactcgagataagcggcaaggtccggtccctgtcagcctcattgtggagcctcacacacctaaccgccctgcacctctcagataattcgctgtcgaggattccatccgacattgcgaagttgcacaacctggtttacctggacttgagcagcaacaagattagaagtctccctgcggaactcggaaacatggtttcactgagggagctgcacttgaataacaacctgttacgcgtgctgcctttcgagctgggaaagctctttcaactgcagacactcgggctcaagggaaaccccctgacgcaagatattctcaatttgtatcaggaaccagacggaacccgaagactgctcaactaccttctggacaacttgtcggggaccgctaagaggattaccactgaacagcccccacctcgctcttggataatgctgcaggagcctgacagaacaagaccaacagccctgttcagcgtgatgtgttataatgtcttatgcgacaaatacgcaactcggcagttgtatgggtactgcccatcctgggctctgaattgggactaccggaagaaggctataatacaggagattctgagttgcaatgccgacattgtgagccttcaggaggttgaaacagagcagtattactctttttttctggtggagctcaaagagcgtggatacaacgggtttttctcaccaaagagccgagccaggacaatgtcagaacaggagcgcaaacacgtggatggttgcgccatcttttttaaaacagaaaaatttacacttgttcagaagcacaccgtagagttcaaccaactggctatggctaatagcgaaggatcagaggcgatgctcaatagggtgatgactaaagataacatcggcgtggccgtgcttctggagctccgaaaggaatccatcgaaatgccatctggaaaaccacacttgggcactgaaaagcaactgatcctggtggccaatgcccacatgcactgggatccagaatactccgatgtcaagctggtgcaaaccatgatgttcctaagcgaagtgaagaatattatcgacaaggctagccgcaatctcaagtccagcgtcctgggagaattcggcacgattcccctggttttgtgtgccgatctgaatagtctccctgactccggcgttgtagaatatctgagtacagggggagtggagaccaatcacaaggatttcaaagaactgagatataacgaatctctgactaactttagctgtcatggtaagaacggaactactaatggaaggatcacacacggatttaagctgcagagcgcctacgaatccggccttatgccgtacactaattatacttttgactttaaagggatcattgattatatcttctactcgaagccacaattgaacacgttggggattctcgggccacttgaccatcattggctcgtggaaaacaacatctccggctgtccgcaccctcttatcccatctgaccatttctcactgtttgcacagttggagctgttgctgccattcctgccacaggtcaacggcattcatctgcccggaagacggtag

SEQ ID NO: 115018 - DNA, 6176 bp, Artificial Sequence
  derived and/or modified sequence
caatgaaaacgaggggggcgcggaggaggaggcggcggcgtcggtggcggcggcgacggcggcgcggaggcgaaggcagcggcgggcgcagcgaggagggcgaggccgggggccgagagggcgggagggcgtagtggcggcccgtcggggcggctgaggcgggcagccgaagcagtggctctcggagggggaacaaagagcagcgactaaggcggcagaggagcggcggcggtggcggcgctgcagcagcgggcgggactggtatggtggttccacagggcagaccccgctgcactcacagggaggaggaggcggcagcggcggaggaaggcggcgcaccccgagaggcatgcccaaagaaaaatacgagccccctgaccctcggaggatgtatacaattatgtcttctgaggaagcagcaaatggaaagaaatcccactgggcagagcttgaaataagtggaaaagtaagaagcttaagcgcatctttgtggtcactaactcacctgacagctttgcatttgagtgacaattccctgtcccgaattccttcagacattgccaagcttcacaatctggtgtatttggacctgtcatctaataaaattcgtagcttacccgcagaactcggaaacatggtatcactcagggagctccatttaaataacaacctgttacgagttctaccttttgagctgggaaaactgtttcagttgcagactttaggcctgaaaggaaatccccttacccaggatatattgaacctttatcaggaaccagatggaacaagacggctgctgaactatttgcttgataatttgtcaggtactgcaaaaagaattacaacagaacaaccacctccaaggtcttggattatgttacaagaaccagataggacaaggccaactgccttgttttctgtcatgtgctataatgttctttgtgataaatatgcgacccggcagttatacggctactgtccatcatgggcgctaaactgggactacaggaaaaaggccattattcaagaaatcttgagctgcaatgctgatatcgtaagtcttcaggaggttgaaacggaacagtattacagtttttttctggtagagctgaaagaacgtggctataatggattcttcagtcctaagtctagagctaggacaatgtcagaacaagaaaggaaacatgttgatggctgtgcaatattcttcaagacagaaaaatttactttggttcagaaacacactgttgaatttaatcagctagccatggcaaattctgaggggtctgaagctatgctgaacagagtcatgacaaaagataacattggggttgcagtactgctagaacttcggaaggaatcgattgaaatgccgtccggaaagccacatcttggaacagaaaaacaacttattcttgtggctaacgcccacatgcattgggaccctgaatactctgatgtgaagttggtacaaactatgatgttcctctcagaagtgaagaacattattgataaagcctctcgcaacctcaaatccagtgttttgggagaatttggaactattccacttgtgttatgtgcagatcttaattctttgccagactctggtgttgtagaatatttgagcacaggtggagtagaaacaaatcacaaagactttaaggagttgaggtataatgaaagtctcacaaacttcagctgtcatgggaagaatggaaccaccaatggaaggatcactcatggtttcaagttacagagtgcctatgagagtggcctgatgccttacacgaattacacatttgatttcaagggtataatagactacattttctattctaaacctcagctgaacaccttaggcatcctgggccctctggaccaccactggctggttgagaataacatcagtggctgcccgcaccccctcatcccctctgaccacttctcactttttgcacaactggagctcttactgcctttcctgccccaagtcaacggcatccaccttcctggcaggaggtagtcaagcaccttcagaggacagccttgattcacttgtaaacttgtgaaaatctgaacataggggagtgaggtatggccactgaggatttttgcttgcttaagaatgatttggactttcaatctgattatttgataaggatatagtatgaaagccaggtgctagcaacagacaaattctgagcccaatatgctttatactgctagacagggattggtgtgtttgcacctgtctttcatttgtcataagagattttcctatttcttctacccaatagaatattttcatgcctggaaataggaaaatgtgtgaacagcgtattctcttcacacagaaatctgtagcactgcttttttgaggccagtagcaacatccagagatcattcttccatactttactccctcctttttcagacttgtttgtaaagtacagaatctgaatttagcctttatgattgtatatgatccacagaagacctgatttatgaaattttgtactaaaatcatttggaaatgattgtattgtaaactgaggctaaatttttttttaaacctgtttcatgtgttataaaggccagcttgtaaaagaagctgcaacagactttctctgctcatgatttgcactcttagggttttgttagcccttttgtactactttctttttaaattgagaacatggttctttacatataaatctgcttcaaccttaggatgttttcagaccagaggcaacttattcatgaatttttatgaaaactatctactaggacagataagctgaacagtgatgatctgtagacatttatggactgaatgtaatggttgatatatgtacattctgatatttttaaatctttaactttttaaagttaaaaacctacagctgcttaggtccagcttcttaactctttttgagacacttcctgtcctatctccactgtgcctgcctaaatttgttctcaccaagcactgcctgtgcatgcagagaaaatctgtgcatcctcttttatatttttaaaatactgtttaacatttgtgagaattttatgaaaatgcttttgtatgagctgtggctttttcccattgtgaagcattgaatatcacattttggaacatgttatagggtgagtccctggatctttgctcaccagatccaagcactgcttctcggtgtcattgcagtgtgctgcttgtcacccagaatactactatcatgtgaattctttttgtcgtcagtgtcttttccttagtctttttgttgttgttgttgttgttgttttaatcattccttttttaagaagaagtaattttccatttatgaagcagtatgaattagatgtattttcaaaacaggtccctaagacaattcttcagatcatttttaaaatgactaagtcattttagtatgtcaagcaagataaaaattacatcataccgtctattttgcccatagtgccatttagagatgaaaaccagctttaactttgcaaagtgaacatgtacatggtctgctctcatttattcattcttctctcaaaagtcaaatgaatgcagagggagcttggtcaaactgcttttgtttcaactgcaggcaggggagcaaaaggacgccatgtgagcattaggaaaaaaaatactcactcttactaacaatttttatacagaaaatgagtcattttggaaatgattcttatgttttttttttttctccttttagaaaattctccaaaaggttttgatgttgaatcttggtcttggacctgttttttcctttgagggttttttgttttttgttttttctaggatttcattgtgatgttttggttttgttttttgctttttgtttaagttgtgctgacaccaaacacatccagtttataatcagtacattggaaagctggtattgatgtagaaccagtgcataactttttatggggttttgttattggtttttttttgtaaagtgtgaataaaaggtatgtttactcatttttcctgaacactgtgttggtaatgtgcatcatgacaatttccagtgaaggtgagctggagctggttggactaatgagactgaggaagcagcttttcctacgatctgcattatgtaatcacaggtccagagagctttatggaagcgggagaggaggagcacttactcatgttgtatttgttaatggaggatgtcatcttttcatagatgctggaactagagtgcacttgttagatgctaaaggtttgagctttacacaaaatgtcttcatctgtatttgttattgtctacaatatatttgaatttggggcagcatattaagatgtaatggcctgttatgtcttgaaaatacttgttttgcctcttccaggcatactgcattctgtggatcagtttgaacagcttctccaccttatttggacagtgataaattgaaccaagagtgtagatttacaagtgtaaccttcaaaagaggaagaactatttggggtctgtaggtaatgaacagtcacaccaaaatagactatgatgcttttgttaagaaaggtttcatgttttagatattttccgtgtcctaaataattttcaataatctataatccctaaaatgcaataaaaactagtatgttttcacggtgtatattttttttcaaaaattctgtaacaaatatatttaatgtgttgccataatgtcatttcagtatttttgctggataaatccattttagaaatgtcttacaaaaagtttagggcatgttttctgttttaaagaccagaagtttgaaggcacccaaatccttgtcgccaatctcctgaagtacagctttaccatattagtggtcattatttatgctttgagagtttcaatattgttcgtcaagttaacttatggcataatttaagctaaagttgtagaaatgaattgttgagtgcaactttcatagtcccaaagataggcagagaacatctccagaaatgtgtgtgtgtgtgtgtgtgtgtgtgtgtgtgtttaatatgatttagtgacaaccaggaaaacttacttgggattattagcactttcaaacttagggacattattaaattggatggaatgcacttctaaatgtttaaattaaaatttcaaagctctttcgagattcaggttctcaataataatattcaagttttagagtttcactttgtactatttaaatttatggaactagtttccatactgacttgtaaggttttggggtcatatataaggactaaagccaagctaggcaaaacaatgacagcaccgttttttcagtgaagctctcagaatgtccagtacagatgttgcagataattccaagaactccttcagcaggtgttcttcaccattcgtaaacagtattttaagatgttcactttgctcttctttttggttacatacattttaataactggtatgttgaagtagtgtctaaaagtatctagtctttattcacagtacattatattgtgtgatgcactggactaactcttgtttaccattcatgtaacaaaacccagcacattatctgcactataagctcaaagaatgtcacatccgcccagacagctctttgatgagggtgatgggaactgaataaaccatacggactggcagtaacaagggcttttactgttctgttcagtggaaccttcttggtcaaattgtaattagctagcattatatttatatacagggtcttttttctttaccgatgtattttcctactcatagccaaccaataaattcagtatctgtttcaaatattttagaagtgtagtttgtatagctgtagtactgaggtttgaggaaaaataaatgttgatcagcagaccacgtatttaaaattctgaatcttctgggacagggttgtaactcagccttccaaagggaagagtgcagggggacggggccatgatatggggaaatggtgtaaactaatgtatttctttattggctgttattctgtataacactcatatctttgccaaagttcaattttatatttaggcaactgatggtccttttgcatttaggattttcgttgttgttaccttatacctcatgatataaggaatgggctcatgtgtcttccgtcttttggaaggaggttgacatattttaaataaatgcttttaaatacagta

SEQ ID NO: 115019 - DNA, 6303 bp, Artificial Sequence
  derived and/or modified sequence
ggcgcggaggaggaggcggcggcgtcggtggcggcggcgacggcggcgcggaggcgaaggcagcggcgggcagccgaagcagtggctctcggagggggaacaaagagcagcgactaaggcggcagaggagcggcggcggtggcggcgctgcagcagcgggcgggactggtatggtggttccacagggcagaccccgctgcactcacagggaggaggaggcggcagcggcggaggaaggcggcgcaccccgagagcactaatcgctattttctttggaaacttcctttgattctttacctccttcaccttccccgaagagcctgctaaccaacacctgtggccttctgtttttaactgttgttgccattgacagcgttgtgaatggtcatctcgctcgagctctttggatttgttgttactgtgcatgcccaaagaaaaatacgagccccctgaccctcggaggatgtatacaattatgtcttctgaggaagcagcaaatggaaagaaatcccactgggcagagcttgaaataagtggaaaagtaagaagcttaagcgcatctttgtggtcactaactcacctgacagctttgcatttgagtgacaattccctgtcccgaattccttcagacattgccaagcttcacaatctggtgtatttggacctgtcatctaataaaattcgtagcttacccgcagaactcggaaacatggtatcactcagggagctccatttaaataacaacctgttacgagttctaccttttgagctgggaaaactgtttcagttgcagactttaggcctgaaaggaaatccccttacccaggatatattgaacctttatcaggaaccagatggaacaagacggctgctgaactatttgcttgataatttgtcaggtactgcaaaaagaattacaacagaacaaccacctccaaggtcttggattatgttacaagaaccagataggacaaggccaactgccttgttttctgtcatgtgctataatgttctttgtgataaatatgcgacccggcagttatacggctactgtccatcatgggcgctaaactgggactacaggaaaaaggccattattcaagaaatcttgagctgcaatgctgatatcgtaagtcttcaggaggttgaaacggaacagtattacagtttttttctggtagagctgaaagaacgtggctataatggattcttcagtcctaagtctagagctaggacaatgtcagaacaagaaaggaaacatgttgatggctgtgcaatattcttcaagacagaaaaatttactttggttcagaaacacactgttgaatttaatcagctagccatggcaaattctgaggggtctgaagctatgctgaacagagtcatgacaaaagataacattggggttgcagtactgctagaacttcggaaggaatcgattgaaatgccgtccggaaagccacatcttggaacagaaaaacaacttattcttgtggctaacgcccacatgcattgggaccctgaatactctgatgtgaagttggtacaaactatgatgttcctctcagaagtgaagaacattattgataaagcctctcgcaacctcaaatccagtgttttgggagaatttggaactattccacttgtgttatgtgcagatcttaattctttgccagactctggtgttgtagaatatttgagcacaggtggagtagaaacaaatcacaaagactttaaggagttgaggtataatgaaagtctcacaaacttcagctgtcatgggaagaatggaaccaccaatggaaggatcactcatggtttcaagttacagagtgcctatgagagtggcctgatgccttacacgaattacacatttgatttcaagggtataatagactacattttctattctaaacctcagctgaacaccttaggcatcctgggccctctggaccaccactggctggttgagaataacatcagtggctgcccgcaccccctcatcccctctgaccacttctcactttttgcacaactggagctcttactgcctttcctgccccaagtcaacggcatccaccttcctggcaggaggtagtcaagcaccttcagaggacagccttgattcacttgtaaacttgtgaaaatctgaacataggggagtgaggtatggccactgaggatttttgcttgcttaagaatgatttggactttcaatctgattatttgataaggatatagtatgaaagccaggtgctagcaacagacaaattctgagcccaatatgctttatactgctagacagggattggtgtgtttgcacctgtctttcatttgtcataagagattttcctatttcttctacccaatagaatattttcatgcctggaaataggaaaatgtgtgaacagcgtattctcttcacacagaaatctgtagcactgcttttttgaggccagtagcaacatccagagatcattcttccatactttactccctcctttttcagacttgtttgtaaagtacagaatctgaatttagcctttatgattgtatatgatccacagaagacctgatttatgaaattttgtactaaaatcatttggaaatgattgtattgtaaactgaggctaaatttttttttaaacctgtttcatgtgttataaaggccagcttgtaaaagaagctgcaacagactttctctgctcatgatttgcactcttagggttttgttagcccttttgtactactttctttttaaattgagaacatggttctttacatataaatctgcttcaaccttaggatgttttcagaccagaggcaacttattcatgaatttttatgaaaactatctactaggacagataagctgaacagtgatgatctgtagacatttatggactgaatgtaatggttgatatatgtacattctgatatttttaaatctttaactttttaaagttaaaaacctacagctgcttaggtccagcttcttaactctttttgagacacttcctgtcctatctccactgtgcctgcctaaatttgttctcaccaagcactgcctgtgcatgcagagaaaatctgtgcatcctcttttatatttttaaaatactgtttaacatttgtgagaattttatgaaaatgcttttgtatgagctgtggctttttcccattgtgaagcattgaatatcacattttggaacatgttatagggtgagtccctggatctttgctcaccagatccaagcactgcttctcggtgtcattgcagtgtgctgcttgtcacccagaatactactatcatgtgaattctttttgtcgtcagtgtcttttccttagtctttttgttgttgttgttgttgttgttttaatcattccttttttaagaagaagtaattttccatttatgaagcagtatgaattagatgtattttcaaaacaggtccctaagacaattcttcagatcatttttaaaatgactaagtcattttagtatgtcaagcaagataaaaattacatcataccgtctattttgcccatagtgccatttagagatgaaaaccagctttaactttgcaaagtgaacatgtacatggtctgctctcatttattcattcttctctcaaaagtcaaatgaatgcagagggagcttggtcaaactgcttttgtttcaactgcaggcaggggagcaaaaggacgccatgtgagcattaggaaaaaaaatactcactcttactaacaatttttatacagaaaatgagtcattttggaaatgattcttatgttttttttttttctccttttagaaaattctccaaaaggttttgatgttgaatcttggtcttggacctgttttttcctttgagggttttttgttttttgttttttctaggatttcattgtgatgttttggttttgttttttgctttttgtttaagttgtgctgacaccaaacacatccagtttataatcagtacattggaaagctggtattgatgtagaaccagtgcataactttttatggggttttgttattggtttttttttgtaaagtgtgaataaaaggtatgtttactcatttttcctgaacactgtgttggtaatgtgcatcatgacaatttccagtgaaggtgagctggagctggttggactaatgagactgaggaagcagcttttcctacgatctgcattatgtaatcacaggtccagagagctttatggaagcgggagaggaggagcacttactcatgttgtatttgttaatggaggatgtcatcttttcatagatgctggaactagagtgcacttgttagatgctaaaggtttgagctttacacaaaatgtcttcatctgtatttgttattgtctacaatatatttgaatttggggcagcatattaagatgtaatggcctgttatgtcttgaaaatacttgttttgcctcttccaggcatactgcattctgtggatcagtttgaacagcttctccaccttatttggacagtgataaattgaaccaagagtgtagatttacaagtgtaaccttcaaaagaggaagaactatttggggtctgtaggtaatgaacagtcacaccaaaatagactatgatgcttttgttaagaaaggtttcatgttttagatattttccgtgtcctaaataattttcaataatctataatccctaaaatgcaataaaaactagtatgttttcacggtgtatattttttttcaaaaattctgtaacaaatatatttaatgtgttgccataatgtcatttcagtatttttgctggataaatccattttagaaatgtcttacaaaaagtttagggcatgttttctgttttaaagaccagaagtttgaaggcacccaaatccttgtcgccaatctcctgaagtacagctttaccatattagtggtcattatttatgctttgagagtttcaatattgttcgtcaagttaacttatggcataatttaagctaaagttgtagaaatgaattgttgagtgcaactttcatagtcccaaagataggcagagaacatctccagaaatgtgtgtgtgtgtgtgtgtgtgtgtgtgtgtgtttaatatgatttagtgacaaccaggaaaacttacttgggattattagcactttcaaacttagggacattattaaattggatggaatgcacttctaaatgtttaaattaaaatttcaaagctctttcgagattcaggttctcaataataatattcaagttttagagtttcactttgtactatttaaatttatggaactagtttccatactgacttgtaaggttttggggtcatatataaggactaaagccaagctaggcaaaacaatgacagcaccgttttttcagtgaagctctcagaatgtccagtacagatgttgcagataattccaagaactccttcagcaggtgttcttcaccattcgtaaacagtattttaagatgttcactttgctcttctttttggttacatacattttaataactggtatgttgaagtagtgtctaaaagtatctagtctttattcacagtacattatattgtgtgatgcactggactaactcttgtttaccattcatgtaacaaaacccagcacattatctgcactataagctcaaagaatgtcacatccgcccagacagctctttgatgagggtgatgggaactgaataaaccatacggactggcagtaacaagggcttttactgttctgttcagtggaaccttcttggtcaaattgtaattagctagcattatatttatatacagggtcttttttctttaccgatgtattttcctactcatagccaaccaataaattcagtatctgtttcaaatattttagaagtgtagtttgtatagctgtagtactgaggtttgaggaaaaataaatgttgatcagcagaccacgtatttaaaattctgaatcttctgggacagggttgtaactcagccttccaaagggaagagtgcagggggacggggccatgatatggggaaatggtgtaaactaatgtatttctttattggctgttattctgtataacactcatatctttgccaaagttcaattttatatttaggcaactgatggtccttttgcatttaggattttcgttgttgttaccttatacctcatgatataaggaatgggctcatgtgtcttccgtcttttggaaggaggttgacatattttaaataaatgcttttaaatacagtagcaaacattgtgttggggttataataattcattaaatgtcttgttgcctgta

SEQ ID NO: 115020 - DNA, 1674 bp, Artificial Sequence
  derived and/or modified sequence
atgcccaaggagaagtacgagccccccgaccccagaagaatgtacaccatcatgagcagcgaggaggccgccaacggcaagaagagccactgggccgagctggagatcagcggcaaggtgagaagcctgagcgccagcctgtggagcctgacccacctgaccgccctgcacctgagcgacaacagcctgagcagaatccccagcgacatcgccaagctgcacaacctggtgtacctggacctgagcagcaacaagatcagaagcctgcccgccgagctgggcaacatggtgagcctgagagagctgcacctgaacaacaacctgctgagagtgctgcccttcgagctgggcaagctgttccagctgcagaccctgggcctgaagggcaaccccctgacccaggacatcctgaacctgtaccaggagcccgacggcaccagaagactgctgaactacctgctggacaacctgagcggcaccgccaagagaatcaccaccgagcagcccccccccagaagctggatcatgctgcaggagcccgacagaaccagacccaccgccctgttcagcgtgatgtgctacaacgtgctgtgcgacaagtacgccaccagacagctgtacggctactgccccagctgggccctgaactgggactacagaaagaaggccatcatccaggagatcctgagctgcaacgccgacatcgtgagcctgcaggaggtggagaccgagcagtactacagcttcttcctggtggagctgaaggagagaggctacaacggcttcttcagccccaagagcagagccagaaccatgagcgagcaggagagaaagcacgtggacggctgcgccatcttcttcaagaccgagaagttcaccctggtgcagaagcacaccgtggagttcaaccagctggccatggccaacagcgagggcagcgaggccatgctgaacagagtgatgaccaaggacaacatcggcgtggccgtgctgctggagctgagaaaggagagcatcgagatgcccagcggcaagccccacctgggcaccgagaagcagctgatcctggtggccaacgcccacatgcactgggaccccgagtacagcgacgtgaagctggtgcagaccatgatgttcctgagcgaggtgaagaacatcatcgacaaggccagcagaaacctgaagagcagcgtgctgggcgagttcggcaccatccccctggtgctgtgcgccgacctgaacagcctgcccgacagcggcgtggtggagtacctgagcaccggcggcgtggagaccaaccacaaggacttcaaggagctgagatacaacgagagcctgaccaacttcagctgccacggcaagaacggcaccaccaacggcagaatcacccacggcttcaagctgcagagcgcctacgagagcggcctgatgccctacaccaactacaccttcgacttcaagggcatcatcgactacatcttctacagcaagccccagctgaacaccctgggcatcctgggccccctggaccaccactggctggtggagaacaacatcagcggctgcccccaccccctgatccccagcgaccacttcagcctgttcgcccagctggagctgctgctgcccttcctgccccaggtgaacggcatccacctgcccggcagaagatag

SEQ ID NO: 115021 - protein, 241 aa, Artificial Sequence
  derived and/or modified sequence
MEDYLQGCRAALQERTIILDCVNMDLKIGKATPKDSKYVEKLEALFPDLPKRNDIFDSLQKAKFDVSGLTTEQMLRKDQKTIYRQGVKVAISAIYMDLEICEVLERSHSPPLKLTPASSTHPNLHAYLQGNTQVSRKKLLPLLQEALSAYFDSMKIPSGQPETADVSREQVDKELDRASNSLISGLSQDEEDPPLPPTPMNSLVDECPLDQGLPKLSAEAVFEKCSQISLSQSTTASLSKK

SEQ ID NO: 115022 - protein, 218 aa, Artificial Sequence
  derived and/or modified sequence
MDLKIGKATPKDSKYVEKLEALFPDLPKRNDIFDSLQKAKFDVSGLTTEQMLRKDQKTIYRQGVKVAISAIYMDLEICEVLERSHSPPLKLTPASSTHPNLHAYLQGNTQVSRKKLLPLLQEALSAYFDSMKIPSGQPETADVSREQVDKELDRASNSLISGLSQDEEDPPLPPTPMNSLVDECPLDQGLPKLSAEAVFEKCSQISLSQSTTASLSKK

SEQ ID NO: 115023 - protein, 168 aa, Artificial Sequence
  derived and/or modified sequence
MLRKDQKTIYRQGVKVAISAIYMDLEICEVLERSHSPPLKLTPASSTHPNLHAYLQGNTQVSRKKLLPLLQEALSAYFDSMKIPSGQPETADVSREQVDKELDRASNSLISGLSQDEEDPPLPPTPMNSLVDECPLDQGLPKLSAEAVFEKCSQISLSQSTTASLSKK

SEQ ID NO: 115024 - protein, 178 aa, Artificial Sequence
  derived and/or modified sequence
MDLKIGKATPKDSKYVEKLEALFPDLPKRNDIFDSLQKAKFDVSGLTTEQMLRKDQKTIYRQGVKVAISAIYMDLEICEVLERSHSPPLKLTPASSTHPNLHAYLQGNTQVSRKKLLPLLQEALSAYFDSMKIPSGQPETADVSREQVDKELDRASNSLISGLSQDEEDPPLPPTPMN

SEQ ID NO: 115025 - DNA, 726 bp, Artificial Sequence
  derived and/or modified sequence
atggaggactacctgcagggctgcagagccgccctgcaggagagaaccatcatcctggactgcgtgaacatggacctgaagatcggcaaggccacccccaaggacagcaagtacgtggagaagctggaggccctgttccccgacctgcccaagagaaacgacatcttcgacagcctgcagaaggccaagttcgacgtgagcggcctgaccaccgagcagatgctgagaaaggaccagaagaccatctacagacagggcgtgaaggtggccatcagcgccatctacatggacctggagatctgcgaggtgctggagagaagccacagcccccccctgaagctgacccccgccagcagcacccaccccaacctgcacgcctacctgcagggcaacacccaggtgagcagaaagaagctgctgcccctgctgcaggaggccctgagcgcctacttcgacagcatgaagatccccagcggccagcccgagaccgccgacgtgagcagagagcaggtggacaaggagctggacagagccagcaacagcctgatcagcggcctgagccaggacgaggaggacccccccctgccccccacccccatgaacagcctggtggacgagtgccccctggaccagggcctgcccaagctgagcgccgaggccgtgttcgagaagtgcagccagatcagcctgagccagagcaccaccgccagcctgagcaagaagtag

SEQ ID NO: 115026 - DNA, 657 bp, Artificial Sequence
  derived and/or modified sequence
atggacctgaagatcggcaaggccacccccaaggacagcaagtacgtggagaagctggaggccctgttccccgacctgcccaagagaaacgacatcttcgacagcctgcagaaggccaagttcgacgtgagcggcctgaccaccgagcagatgctgagaaaggaccagaagaccatctacagacagggcgtgaaggtggccatcagcgccatctacatggacctggagatctgcgaggtgctggagagaagccacagcccccccctgaagctgacccccgccagcagcacccaccccaacctgcacgcctacctgcagggcaacacccaggtgagcagaaagaagctgctgcccctgctgcaggaggccctgagcgcctacttcgacagcatgaagatccccagcggccagcccgagaccgccgacgtgagcagagagcaggtggacaaggagctggacagagccagcaacagcctgatcagcggcctgagccaggacgaggaggacccccccctgccccccacccccatgaacagcctggtggacgagtgccccctggaccagggcctgcccaagctgagcgccgaggccgtgttcgagaagtgcagccagatcagcctgagccagagcaccaccgccagcctgagcaagaagtag

SEQ ID NO: 115027 - DNA, 507 bp, Artificial Sequence
  derived and/or modified sequence
atgctgagaaaggaccagaagaccatctacagacagggcgtgaaggtggccatcagcgccatctacatggacctggagatctgcgaggtgctggagagaagccacagcccccccctgaagctgacccccgccagcagcacccaccccaacctgcacgcctacctgcagggcaacacccaggtgagcagaaagaagctgctgcccctgctgcaggaggccctgagcgcctacttcgacagcatgaagatccccagcggccagcccgagaccgccgacgtgagcagagagcaggtggacaaggagctggacagagccagcaacagcctgatcagcggcctgagccaggacgaggaggacccccccctgccccccacccccatgaacagcctggtggacgagtgccccctggaccagggcctgcccaagctgagcgccgaggccgtgttcgagaagtgcagccagatcagcctgagccagagcaccaccgccagcctgagcaagaagtag

SEQ ID NO: 115028 - DNA, 537 bp, Artificial Sequence
  derived and/or modified sequence
atggacctgaagatcggcaaggccacccccaaggacagcaagtacgtggagaagctggaggccctgttccccgacctgcccaagagaaacgacatcttcgacagcctgcagaaggccaagttcgacgtgagcggcctgaccaccgagcagatgctgagaaaggaccagaagaccatctacagacagggcgtgaaggtggccatcagcgccatctacatggacctggagatctgcgaggtgctggagagaagccacagcccccccctgaagctgacccccgccagcagcacccaccccaacctgcacgcctacctgcagggcaacacccaggtgagcagaaagaagctgctgcccctgctgcaggaggccctgagcgcctacttcgacagcatgaagatccccagcggccagcccgagaccgccgacgtgagcagagagcaggtggacaaggagctggacagagccagcaacagcctgatcagcggcctgagccaggacgaggaggacccccccctgccccccacccccatgaactag

SEQ ID NO: 115029 - DNA, 726 bp, Artificial Sequence
  derived and/or modified sequence
atggaagactacctccagggatgcagggctgctctccaagagcgcaccatcatcttggactgcgtgaatatggatctgaagatcggcaaggccacccccaaggacagcaagtatgtagaaaaactcgaggctctcttcccagacttacccaagaggaacgacatattcgactctcttcaaaaggctaaatttgacgtaagcggtttaacaactgaacagatgctacgaaaggaccaaaaaacaatttaccggcagggagtgaaagtcgctatctctgcgatctacatggatctcgagatctgcgaagttctggaacgcagccacagcccgccgctgaaacttacacctgcatctagtactcatcctaacctacatgcatacctgcagggcaacacacaggtatcaagaaaaaagcttctgcctctactgcaggaagctctgtcagcttactttgattctatgaagatccccagcgggcagcccgagactgctgacgtgtcacgcgaacaggtagataaggaactggaccgcgcgagtaatagccttattagtgggcttagtcaggatgaggaagacccgccactaccccctacccctatgaattccctcgttgacgaatgtcctctggatcaggggctgccgaaactgtctgccgaggccgtgtttgagaagtgcagccagataagtttgtctcagagcactactgctagcctgagcaaaaagtag

SEQ ID NO: 115030 - DNA, 657 bp, Artificial Sequence
  derived and/or modified sequence
atggatctgaaaattggcaaagctactcctaaggacagcaagtatgtcgaaaaactcgaggctctgtttccggacctgcccaaacggaacgatatatttgacagcttgcaaaaggcgaaattcgatgtgagcggtctcactactgagcagatgctacgaaaggatcagaagacgatttaccgtcaaggcgtgaaggttgccatatcagcgatttacatggatctggagatctgcgaggtgctggagcggtcacattccccaccactgaaacttactccagcttcttctacccacccaaacttgcacgcttatctccaggggaatactcaggtctcgcggaagaaactgctgcctctcctgcaggaagccctgagtgcctactttgacagtatgaagattccctcaggacagcctgaaaccgccgacgtttctagagagcaggtagataaagaactggatcgcgcctctaattcccttatctctggactgagccaggatgaagaagatccccctctgcctcccactccaatgaatagtcttgtggacgagtgccctctcgaccaggggttgccaaagcttagcgctgaagcagtgtttgagaaatgcagtcaaatttctttgtcgcagtccaccacggcttctctgagcaaaaagtag

SEQ ID NO: 115031 - DNA, 507 bp, Artificial Sequence
  derived and/or modified sequence
atgctgcgcaaggaccagaaaactatttataggcaaggcgttaaggtagccatctcggcgatatatatggacctggagatctgtgaggttcttgagaggagtcacagcccaccattaaaactcactccagcctctagcacccatcccaatctgcacgcctatctgcagggaaatacacaggtttcaagaaagaaacttctgccactcctgcaagaagcgctgtccgcctacttcgattctatgaagattccatccggacaacctgaaactgcagacgtgtccagggagcaggtggacaaggagttggacagggcctccaactcactgattagtggacttagccaggatgaagaggatcccccactgccacccacccctatgaactccctcgtcgacgagtgtcctttggatcaggggctcccgaagctttcagcagaggccgtgttcgaaaaatgctcccagataagtctgagccaatctaccacagcaagcctgtcaaaaaagtag

SEQ ID NO: 115032 - DNA, 657 bp, Artificial Sequence
  derived and/or modified sequence
atggatttgaagatcggcaaggcgactccaaaagattctaaatatgtggagaaactggaagccctgttcccagacctcccaaagcgaaatgacatctttgattcccttcaaaaagccaaatttgatgtttctggcttgacaacagaacagatgctgcggaaagatcagaaaaccatttatcgccagggcgttaaagttgccatttctgccatctacatggacctggagatctgtgaagtgctggaacgcagccattcacctcctctgaaattaactccagcctctagcacacacccaaaccttcacgcctatctccaaggcaacacgcaagtgtccaggaagaagctcttgccgctgctgcaggaagctctgagcgcatattttgacagcatgaaaatcccatcaggccaaccggaaactgcagacgttagcagggagcaagtggataaggaattagaccgggctagcaattcactcatctctggccttagtcaggatgaagaggacccccctttacctccaacgcctatgaatagtctggtggatgaatgtcccctcgatcagggactccctaagctctcagctgaggcagtgtttgaaaaatgtagtcagatatccctctctcaaagcactactgccagcctgagtaagaagtag

SEQ ID NO: 115033 - DNA, 537 bp, Artificial Sequence
  derived and/or modified sequence
atggaccttaaaatcgggaaggcaactcccaaggactctaaatatgtggagaagttagaggcgcttttccccgatctgccaaagcgcaacgacattttcgattctctgcagaaagctaagttcgacgtgtcaggtttaaccactgagcagatgctacgcaaagaccagaaaaccatctaccgtcagggcgtgaaggtcgctatcagcgccatttatatggacctggagatttgtgaagttctcgagagatctcattctccccctcttaaactgaccccggcctcatcgacacatccgaacctgcacgcctacctgcaagggaacacacaggtttcccgaaaaaaactgctgccactgttgcaggaggcgctgtcggcatattttgattccatgaagataccgtctggccaacctgaaacagctgacgtgtctcgggagcaggtcgacaaggagttagacagggcctccaatagtctgatatccgggctgagtcaggacgaggaggatcctccgctaccaccaacgcctatgaattag

SEQ ID NO: 115034 - DNA, 726 bp, Artificial Sequence
  derived and/or modified sequence
atggaggactacctgcagggctgccgggccgccctgcaggagaggaccatcatcctggactgtgtgaacatggacctgaagattggcaaggccacccccaaggacagcaaatatgtggagaagctggaggccctcttcccagacctgcccaagagaaatgacatctttgacagcctgcagaaggccaagtttgatgtgtctggcctgaccacagagcagatgctgaggaaggaccagaagaccatctaccggcagggcgtgaaggtggccatcagcgccatctacatggacctggagatctgtgaggtgctggagaggagccacagcccccccctgaagctgaccccagccagcagcacccaccccaacctgcacgcctacctgcagggcaacacccaggtgtccaggaagaagctgctgcccctgctgcaggaggccctgagcgcctactttgacagcatgaagatccccagcggccagcctgagacagcagatgtgtcccgggagcaggtggacaaggagctggaccgggccagcaacagcctcatcagcggcctgagccaggatgaagaagatcctcccctgccccccacccccatgaacagcctggtggatgagtgccccctggaccagggcctgcccaagctgtctgctgaggccgtgtttgagaagtgcagccagatcagcctgagccagagcaccacagccagcctgagcaagaagtag

SEQ ID NO: 115035 - DNA, 657 bp, Artificial Sequence
  derived and/or modified sequence
atggacctgaagattggcaaggccacccccaaggacagcaaatatgtggagaagctggaggccctcttcccagacctgcccaagagaaatgacatctttgacagcctgcagaaggccaagtttgatgtgtctggcctgaccacagagcagatgctgaggaaggaccagaagaccatctaccggcagggcgtgaaggtggccatcagcgccatctacatggacctggagatctgtgaggtgctggagaggagccacagcccccccctgaagctgaccccagccagcagcacccaccccaacctgcacgcctacctgcagggcaacacccaggtgtccaggaagaagctgctgcccctgctgcaggaggccctgagcgcctactttgacagcatgaagatccccagcggccagcctgagacagcagatgtgtcccgggagcaggtggacaaggagctggaccgggccagcaacagcctcatcagcggcctgagccaggatgaggaggacccccccctgccccccacccccatgaacagcctggtggatgaatgtcccctggaccagggcctgcccaagctgtctgctgaggccgtgtttgagaagtgcagccagatcagcctgagccagagcaccacagccagcctgagcaagaagtag

SEQ ID NO: 115036 - DNA, 507 bp, Artificial Sequence
  derived and/or modified sequence
atgctgaggaaggaccagaagaccatctaccggcagggcgtgaaggtggccatcagcgccatctacatggacctggagatctgtgaggtgctggagaggagccacagcccccccctgaagctgaccccagccagcagcacccaccccaacctgcacgcctacctgcagggcaacacccaggtgtccaggaagaagctgctgcccctgctgcaggaggccctgagcgcctactttgacagcatgaagatccccagcggccagcctgagacagcagatgtgtcccgggagcaggtggacaaggagctggaccgggccagcaacagcctcatcagcggcctgagccaggatgaggaggacccccccctgccccccacccccatgaacagcctggtggatgaatgtcccctggaccagggcctgcccaagctgtctgctgaggccgtgtttgagaagtgcagccagatcagcctgagccagagcaccacagccagcctgagcaagaagtag

SEQ ID NO: 115037 - DNA, 537 bp, Artificial Sequence
  derived and/or modified sequence
atggacctgaagattggcaaggccacccccaaggacagcaaatatgtggagaagctggaggccctcttcccagacctgcccaagagaaatgacatctttgacagcctgcagaaggccaagtttgatgtgtctggcctgaccacagagcagatgctgaggaaggaccagaagaccatctaccggcagggcgtgaaggtggccatcagcgccatctacatggacctggagatctgtgaggtgctggagaggagccacagcccccccctgaagctgaccccagccagcagcacccaccccaacctgcacgcctacctgcagggcaacacccaggtgtccaggaagaagctgctgcccctgctgcaggaggccctgagcgcctactttgacagcatgaagatccccagcggccagcctgagacagcagatgtgtcccgggagcaggtggacaaggagctggaccgggccagcaacagcctcatcagcggcctgagccaggatgaggaggacccccccctgccccccacccccatgaactag

SEQ ID NO: 115038 - DNA, 726 bp, Artificial Sequence
  derived and/or modified sequence
atggaggactacctgcagggctgccgggccgccctgcaggagcggactatcatcctggattgtgtaaacatggatcttaaaatcggaaaagctacccccaaagactccaagtacgtcgagaagctggaggccctgtttccagatctgccaaaaaggaacgacatcttcgactctctccaaaaagccaagttcgacgtgagcggcttaacaacggaacagatgttacgcaaggatcaaaaaacaatctaccgccaaggagtgaaagtcgccattagtgctatttatatggacttggagatttgcgaggtattggagcgctcccacagcccacccctcaagctgactcccgcgagctcgacacacccaaacctgcatgcatacctgcagggtaatacccaggtgtcccgcaagaagttgttgcccctgctgcaggaggccctgtcggcatattttgattctatgaagattccctcaggccagccggagacagcagacgtctcgcgtgagcaggttgacaaggagctcgacagggccagcaactcacttatttctggactctcacaggacgaggaggaccccccattgccccccacaccaatgaacagcttggtggacgagtgccccctagaccaaggtcttcctaaactgtccgccgaagctgtgttcgaaaaatgttcacagatttccctgagtcagagcactacggcgagcttgagtaagaagtag

SEQ ID NO: 115039 - DNA, 657 bp, Artificial Sequence
  derived and/or modified sequence
atggacctgaagatcggcaaggccacccccaaggacagcaagtacgtcgagaagctcgaggccctctttccagacctgccaaagcgtaacgacattttcgatagcctgcaaaaagccaaatttgacgtgtccggccttacgactgaacagatgctcagaaaggaccaaaaaaccatttacagacagggggtgaaagtggccatctccgctatttacatggatctagagatttgcgaagtgctggagcgctcacactcaccacctctcaaactaacccccgccagttctacacacccaaatctgcacgcctacctccagggtaacacccaagtaagtcggaaaaaactattacctctcctacaagaggctttaagcgcatactttgattccatgaaaattccttccggccaacctgaaaccgcagatgtcagcagggaacaggttgacaaggaactggatagggcgtcgaacagcttgatatccggcctgagccaggatgaagaggatccgccactgcctcctactcccatgaattctctggtagacgaatgccccctcgaccagggactcccaaagctaagcgctgaggccgtgtttgagaaatgttcacagatttcactgtctcagtccaccaccgcctccctgtctaaaaaatag

SEQ ID NO: 115040 - DNA, 507 bp, Artificial Sequence
  derived and/or modified sequence
atgctgcggaaggaccagaagaccatctaccggcagggcgtgaaggttgctatctccgctatctacatggatctcgagatctgtgaggtgcttgagcgaagccactcaccgcccctcaaactgaccccggctagtagcacgcatccaaatctacacgcgtacctccagggcaatacccaggttagtaggaagaaattattgcctttactccaggaagcactgtccgcatatttcgatagcatgaagatcccaagcggtcagcctgagacagccgatgtgtctcgcgaacaagtggacaaagagctcgatcgagcctccaacagccttatctccggtctttcccaggatgaagaggatcccccactgccacctaccccaatgaatagtctagtggacgaatgtcctctcgaccagggcctcccaaaactgagtgcggaagcagtattcgaaaagtgttcccagataagcctgtcacagtcaacgaccgcctcactgtctaagaagtag

SEQ ID NO: 115041 - DNA, 657 bp, Artificial Sequence
  derived and/or modified sequence
atggacctgaagatcggcaaggccacccccaaggacagcaagtacgtggaaaagttagaggccctgtttcccgacctgccaaagagaaacgatatcttcgactccttgcaaaaagccaagtttgacgtcagtggcctgacgacagaacaaatgctgcgaaaggaccagaagaccatatatagacaaggcgtgaaggtggctatctctgccatctatatggacttagaaatttgcgaagtgctcgaacgttcgcacagtccccctctgaagttaactcctgcctcttccacccatccaaacctgcacgcctacctgcagggtaacacccaggtgtcccggaagaaacttctgcccctactgcaagaggctctctcagcgtattttgattctatgaagattccttctggacaaccggaaactgccgacgtaagtcgggagcaggtagataaagagctggatagggcctcaaacagccttattagcggccttagccaggatgaggaggatcctcctctcccaccaacgccaatgaactcactggtcgacgaatgccccttagatcagggcctcccaaagctgagcgcagaggccgtttttgaaaaatgttctcagatctctctaagccagagcaccacggcctccctctcaaaaaagtag

SEQ ID NO: 115042 - DNA, 537 bp, Artificial Sequence
  derived and/or modified sequence
atggacctgaagatcggcaaggccacccccaaggacagcaagtacgtagaaaagttagaggccctgtttccagacctaccaaagagaaacgatatcttcgactccctgcagaaagccaaattcgatgtgtccgggctcaccacggagcaaatgctgaggaaggaccaaaagaccatatatagacagggcgttaaggtcgcaataagcgcaatctatatggatctggagatctgcgaggtgctcgagcggagtcacagtcctccgctcaagcttacaccagcgtcgagtactcatcccaatttgcatgcctatctgcaggggaacacacaggtatccagaaaaaagctgttgccactcctgcaggaggccctgtcagcctattttgactcaatgaaaatcccgtctggccagcccgaaacagctgacgtcagcagggagcaggttgataaggaactcgaccgggcgtctaactcactcatttctggtctcagtcaggacgaggaagacccccccctgccccctaccccaatgaactag

SEQ ID NO: 115043 - DNA, 2361 bp, Artificial Sequence
  derived and/or modified sequence
ggaggccgattcgccgtgtggcgggttcgagtcccgcctcctgactctggcctctagtccctgagtcccgggcgggctgcattcgtcggggaaacctctcctcgaccaggggcacctctactcgaccaggggcgacggcgtactttgggcttcatcatggaggactacctgcagggttgtcgagctgctctgcaggagcgaaccatcatcctggactgtgtcaacatggaccttaaaattggaaaggcaaccccaaaggacagcaaatatgtggagaaactagaggcccttttcccagacctacccaagagaaatgatatatttgattccctacaaaaggcaaagtttgatgtatcaggactgaccactgagcagatgctgagaaaagaccagaagactatctatagacaaggcgtcaaggtggccattagtgcaatatatatggatttggagatctgtgaagtcctggaacgctcccactctccacccctgaagctgacccctgcctcaagtacccaccctaacctccatgcctatcttcaaggcaacacccaggtctctcgaaagaaacttctgcccctgctccaggaagccctgtcagcatattttgactccatgaagatcccttcaggacagcctgagacagcagatgtgtccagggagcaagtggacaaggaattggacagggcaagtaactccctgatttctggcctgagtcaagatgaggaggaccctccgctgcccccgacgcccatgaacagcttggtggatgagtgccctctagatcaggggctgcctaaactctctgctgaggccgtcttcgagaagtgcagtcagatctcactgtcacagtctaccacagcctccctgtccaagaagtgactgttgagaggcgaggaggtagtgggtgaggctacctgactcacttcaaatgcatgttttgagatgtttggagattcagcaattctgtcttcattgctccaggatctggtatactgttctcataaaactgagaggagaaaaaaagtgaaagaaagcagctgctttaagaatggttttccaccttttccccctaatctctaccaatcagacacattttattatttaaatctgcacctctctctattttatttgccaggggcacgatgtgacatatctgcagtcccagcacagtgggacaaaaagaatttagaccccaaaagtgtcctcggcatggatcttgaacagaaccagtatctgtcatggaactgaacattcatcgatggtctccatgtattcatttattcacttgttcattcaagtatttattgaatacctgcctcaagctagagagaaaagagagtgcgctttggaaatttattccagttttcagcctacagcagattatcagctcggtgacttttctttctgccaccatttaggtgatggtgtttgattcagagatggctgaatttctattcttagcttattgtgactgtttcagatctagtttgggaacagattagaggccattgtcttctgtcctgatcaggtggcctggctgtttctttggatccctctgtcccagagccacccagaaccctgactcttgagaatcaagaaaacacccagaaaggccttaatgacctcataggcactcttccaaaaagacaacagaactggaatgagaggcctgggtctgtctcctgccttagcaggcctatcaatttcttgtcaatctctttttttccttgctcacattaaaaggaagcatggagttctaatgctcccataaactatgtattttggcaagacacttcactactccaggtctcactttccccatctgtaaaacagggtttggactaggtgttccctggtattctgtgatctgcctcttgctgccattctttctctcctctgcttctctgtatttttcttctgttatccctgggggtgctcaggttcacttgattgtctgtatttctgtgtggttgtagcaaggactcagcctcatgtagcacgaataggggtgtggttcatggcgtgttgacccagcagagcactccctcccactaacttgttctgcatgtgtagagtctccccattttttttaacgcaaccctttcccctttttcctaccccacagctctgttccatgtaagttgccaacagtttcactgaacagtggggtatgtgatggttttggcatgacatcttcagtatgagggggacagtttgacttcactttgagggtgtgatgtctgtagctatgtggaaggtaaaaatagtggtgtgatcatgaaccaaaggaatttatgttttgtaacttgggtactttattttgcattttgttatactattaaataattttttcctgtt

SEQ ID NO: 115044 - DNA, 2214 bp, Artificial Sequence
  derived and/or modified sequence
tcctgcagggggcaccagagatcttggacaggcaaactgcagcccttctgcatggaaccatcatcctggactgtgtcaacatggaccttaaaattggaaaggcaaccccaaaggacagcaaatatgtggagaaactagaggcccttttcccagacctacccaagagaaatgatatatttgattccctacaaaaggcaaagtttgatgtatcaggactgaccactgagcagatgctgagaaaagaccagaagactatctatagacaaggcgtcaaggtggccattagtgcaatatatatggatttggagatctgtgaagtcctggaacgctcccactctccacccctgaagctgacccctgcctcaagtacccaccctaacctccatgcctatcttcaaggcaacacccaggtctctcgaaagaaacttctgcccctgctccaggaagccctgtcagcatattttgactccatgaagatcccttcaggacagcctgagacagcagatgtgtccagggagcaagtggacaaggaattggacagggcaagtaactccctgatttctggcctgagtcaagatgaggaggaccctccgctgcccccgacgcccatgaacagcttggtggatgagtgccctctagatcaggggctgcctaaactctctgctgaggccgtcttcgagaagtgcagtcagatctcactgtcacagtctaccacagcctccctgtccaagaagtgactgttgagaggcgaggaggtagtgggtgaggctacctgactcacttcaaatgcatgttttgagatgtttggagattcagcaattctgtcttcattgctccaggatctggtatactgttctcataaaactgagaggagaaaaaaagtgaaagaaagcagctgctttaagaatggttttccaccttttccccctaatctctaccaatcagacacattttattatttaaatctgcacctctctctattttatttgccaggggcacgatgtgacatatctgcagtcccagcacagtgggacaaaaagaatttagaccccaaaagtgtcctcggcatggatcttgaacagaaccagtatctgtcatggaactgaacattcatcgatggtctccatgtattcatttattcacttgttcattcaagtatttattgaatacctgcctcaagctagagagaaaagagagtgcgctttggaaatttattccagttttcagcctacagcagattatcagctcggtgacttttctttctgccaccatttaggtgatggtgtttgattcagagatggctgaatttctattcttagcttattgtgactgtttcagatctagtttgggaacagattagaggccattgtcttctgtcctgatcaggtggcctggctgtttctttggatccctctgtcccagagccacccagaaccctgactcttgagaatcaagaaaacacccagaaaggccttaatgacctcataggcactcttccaaaaagacaacagaactggaatgagaggcctgggtctgtctcctgccttagcaggcctatcaatttcttgtcaatctctttttttccttgctcacattaaaaggaagcatggagttctaatgctcccataaactatgtattttggcaagacacttcactactccaggtctcactttccccatctgtaaaacagggtttggactaggtgttccctggtattctgtgatctgcctcttgctgccattctttctctcctctgcttctctgtatttttcttctgttatccctgggggtgctcaggttcacttgattgtctgtatttctgtgtggttgtagcaaggactcagcctcatgtagcacgaataggggtgtggttcatggcgtgttgacccagcagagcactccctcccactaacttgttctgcatgtgtagagtctccccattttttttaacgcaaccctttcccctttttcctaccccacagctctgttccatgtaagttgccaacagtttcactgaacagtggggtatgtgatggttttggcatgacatcttcagtatgagggggacagtttgacttcactttgagggtgtgatgtctgtagctatgtggaaggtaaaaatagtggtgtgatcatgaaccaaaggaatttatgttttgtaacttgggtactttattttgcattttgttatactattaaataattttttcctg

SEQ ID NO: 115045 - DNA, 2238 bp, Artificial Sequence
  derived and/or modified sequence
ctagtccctgagtcccgggcgggctgcattcgtcggggaaacctctcctcgaccaggggcacctctactcgaccaggggcgacggcgtactttgggcttcatcatggaggactacctgcagggttgtcgagctgctctgcaggagtcccgacctctacatgttgtgctgggaaatgaagcctgtgatttggactccacagtgtctgctcttgccctggctttttacctagcaaaggactgaccactgagcagatgctgagaaaagaccagaagactatctatagacaaggcgtcaaggtggccattagtgcaatatatatggatttggagatctgtgaagtcctggaacgctcccactctccacccctgaagctgacccctgcctcaagtacccaccctaacctccatgcctatcttcaaggcaacacccaggtctctcgaaagaaacttctgcccctgctccaggaagccctgtcagcatattttgactccatgaagatcccttcaggacagcctgagacagcagatgtgtccagggagcaagtggacaaggaattggacagggcaagtaactccctgatttctggcctgagtcaagatgaggaggaccctccgctgcccccgacgcccatgaacagcttggtggatgagtgccctctagatcaggggctgcctaaactctctgctgaggccgtcttcgagaagtgcagtcagatctcactgtcacagtctaccacagcctccctgtccaagaagtgactgttgagaggcgaggaggtagtgggtgaggctacctgactcacttcaaatgcatgttttgagatgtttggagattcagcaattctgtcttcattgctccaggatctggtatactgttctcataaaactgagaggagaaaaaaagtgaaagaaagcagctgctttaagaatggttttccaccttttccccctaatctctaccaatcagacacattttattatttaaatctgcacctctctctattttatttgccaggggcacgatgtgacatatctgcagtcccagcacagtgggacaaaaagaatttagaccccaaaagtgtcctcggcatggatcttgaacagaaccagtatctgtcatggaactgaacattcatcgatggtctccatgtattcatttattcacttgttcattcaagtatttattgaatacctgcctcaagctagagagaaaagagagtgcgctttggaaatttattccagttttcagcctacagcagattatcagctcggtgacttttctttctgccaccatttaggtgatggtgtttgattcagagatggctgaatttctattcttagcttattgtgactgtttcagatctagtttgggaacagattagaggccattgtcttctgtcctgatcaggtggcctggctgtttctttggatccctctgtcccagagccacccagaaccctgactcttgagaatcaagaaaacacccagaaaggccttaatgacctcataggcactcttccaaaaagacaacagaactggaatgagaggcctgggtctgtctcctgccttagcaggcctatcaatttcttgtcaatctctttttttccttgctcacattaaaaggaagcatggagttctaatgctcccataaactatgtattttggcaagacacttcactactccaggtctcactttccccatctgtaaaacagggtttggactaggtgttccctggtattctgtgatctgcctcttgctgccattctttctctcctctgcttctctgtatttttcttctgttatccctgggggtgctcaggttcacttgattgtctgtatttctgtgtggttgtagcaaggactcagcctcatgtagcacgaataggggtgtggttcatggcgtgttgacccagcagagcactccctcccactaacttgttctgcatgtgtagagtctccccattttttttaacgcaaccctttcccctttttcctaccccacagctctgttccatgtaagttgccaacagtttcactgaacagtggggtatgtgatggttttggcatgacatcttcagtatgagggggacagtttgacttcactttgagggtgtgatgtctgtagctatgtggaaggtaaaaatagtggtgtgatcatgaaccaaaggaatttatgttttgtaacttgggtactttattttgcattttgttatactattaaataattttttcctgtt

SEQ ID NO: 115046 - DNA, 1850 bp, Artificial Sequence
  derived and/or modified sequence
gaggccgattcgccgtgtggcgggttcgagtcccgcctcctgactctggcctctagtccctgagtcccgggcgggctgcattcgtcggggaaacctctcctcgaccaggggcacctctactcgaccaggggcgacggcgtactttgggcttcatcatggaggactacctgcagggttgtcgagctgctctgcaggaaccatcatcctggactgtgtcaacatggaccttaaaattggaaaggcaaccccaaaggacagcaaatatgtggagaaactagaggcccttttcccagacctacccaagagaaatgatatatttgattccctacaaaaggcaaagtttgatgtatcaggactgaccactgagcagatgctgagaaaagaccagaagactatctatagacaaggcgtcaaggtggccattagtgcaatatatatggatttggagatctgtgaagtcctggaacgctcccactctccacccctgaagctgacccctgcctcaagtacccaccctaacctccatgcctatcttcaaggcaacacccaggtctctcgaaagaaacttctgcccctgctccaggaagccctgtcagcatattttgactccatgaagatcccttcaggacagcctgagacagcagatgtgtccagggagcaagtggacaaggaattggacagggcaagtaactccctgatttctggcctgagtcaagatgaggaggaccctccgctgcccccgacgcccatgaacagcttggtggatgagtgccctctagatcaggggctgcctaaactctctgctgaggccgtcttcgagaagtgcagtcagatctcactgtcacagtctaccacagcctccctgtccaagaagtgactgttgagaggcgaggaggtagtgggtgaggctacctgactcacttcaaatgcatgttttgagatgtttggagattcagcaattctgtcttcattgctccaggatctggtatactgttctcataaaactgagaggagaaaaaaagtgaaagaaagcagctgctttaagaatggttttccaccttttccccctaatctctaccaatcagacacattttattatttaaatctgcacctctctctattttatttgccaggggcacgatgtgacatatctgcagtcccagcacagtgggacaaaaagaatttagaccccaaaagtgtcctcggcatggatcttgaacagaaccagtatctgtcatggaactgaacattcatcgatggtctccatgtattcatttattcacttgttcattcaagtatttattgaatacctgcctcaagctagagagaaaagagagtgcgctttggaaatttattccagttttcagcctacagcagattatcagctcggtgacttttctttctgccaccatttaggtgatggtgtttgattcagagatggctgaatttctattcttagcttattgtgactgtttcagatctagtttgggaacagattagaggccattgtcttctgtcctgatcaggtggcctggctgtttctttggatccctctgtcccagagccacccagaaccctgactcttgagaatcaagaaaacacccagaaaggccttaatgacctcataggcactcttccaaaaagacaacagaactggaatgagaggcctgggtctgtctcctgccttagcaggcctatcaatttcttgtcaatctctttttttccttgctcacattaaaaggaagcatggagttctaatgctcccataaactatgtattttggcaagacacttcactactccaggtctcactttccccatctgtaaaacagggtttggactaggtgttcc

SEQ ID NO: 115047 - DNA, 845 bp, Artificial Sequence
  derived and/or modified sequence
ccgattcgccgtgtggcgggttcgagtcccgcctcctgactctggcctctagtccctgagtcccgggcgggctgcattcgtcggggaaacctctcctcgaccaggggcacctctactcgaccaggggcgacggcgtactttgggcttcatcatggaggactacctgcagggttgtcgagctgctctgcaggagtcccgacctctacatgttgtgctgggaaatgaagcctgtgatttggactccacagtgtctgctcttgccctggctttttacctagcaaaggaaccatcatcctggactgtgtcaacatggaccttaaaattggaaaggcaaccccaaaggacagcaaatatgtggagaaactagaggcccttttcccagacctacccaagagaaatgatatatttgattccctacaaaaggcaaagtttgatgtatcaggactgaccactgagcagatgctgagaaaagaccagaagactatctatagacaaggcgtcaaggtggccattagtgcaatatatatggatttggagatctgtgaagtcctggaacgctcccactctccacccctgaagctgacccctgcctcaagtacccaccctaacctccatgcctatcttcaaggcaacacccaggtctctcgaaagaaacttctgcccctgctccaggaagccctgtcagcatattttgactccatgaagatcccttcaggacagcctgagacagcagatgtgtccagggagcaagtggacaaggaattggacagggcaagtaactccctgatttctggcctgagtcaagatgaggaggaccctccgctgcccccgacgcccatgaacag

SEQ ID NO: 115048 - DNA, 726 bp, Artificial Sequence
  derived and/or modified sequence
atggaggattacttgcagggctgcagggccgcacttcaagagcgcacgatcattctggactgtgtcaacatggacctgaagattgggaaggccaccccaaaagacagcaagtacgtcgagaagctggaagcactctttcctgacctaccaaaacgcaacgatatttttgattccctccagaaggcgaagttcgatgtgtccggactcacaacagaacagatgctccgcaaggaccagaagacgatttatcgacagggcgtgaaagtggcaatttcagctatttacatggatttagagatttgcgaagtgctggagcgatcccattcacctcccctaaagctcaccccagcatctagcactcatccaaacctccacgcctatctgcaggggaatacacaagtttcacggaaaaaactgttacctctcctccaggaagccctttctgcatactttgacagtatgaaaatcccctccggtcagccggaaactgccgatgtgagccgcgagcaggtggataaagagttggatagggcgtctaatagtctgatttcaggactgtctcaggacgaggaagatcccccactgcctcccacccctatgaactcacttgtcgacgagtgccctctggaccagggactgcctaagctgtcggccgaagctgtgttcgagaagtgttctcagatatctctgtcccagtccaccacagcatccttaagtaagaagtag

SEQ ID NO: 115049 - DNA, 657 bp, Artificial Sequence
  derived and/or modified sequence
atggaccttaagattggaaaggctacaccaaaggacagtaaatacgtggaaaagttagaggcgttgttcccagatttacctaagaggaatgacatttttgatagcctgcagaaagccaagttcgacgtgtccggcctgacaaccgagcaaatgctgaggaaggaccagaagactatctaccggcagggtgtaaaggtggcaatcagcgctatatacatggatctggaaatttgcgaagtgttggagcggtcccactccccacccctgaaactgactccagcatcatccactcatcctaacctccatgcttacttacagggaaatacccaagtttcacgaaaaaagttattgccgctgctccaggaggccctttccgcttacttcgattctatgaagattccttcagggcaaccagaaaccgcagatgtatctcgcgaacaagtggataaagaattagatagagcgagtaactcactgatcagtggactcagtcaagacgaggaggatcccccattaccaccaaccccaatgaactcactggtagacgaatgtcctttagatcagggcttacccaagttatcggccgaagccgtgttcgagaagtgcagccagataagcctaagtcagtcgactaccgccagcttatcaaaaaagtag

SEQ ID NO: 115050 - DNA, 507 bp, Artificial Sequence
  derived and/or modified sequence
atgctccggaaggatcaaaagacaatataccggcagggggtaaaagtggctatctcggctatttatatggacttggagatatgcgaggtcttagaacggtcccactcaccccctctcaaacttacccccgcaagttccacacatcctaatctccacgcttatctccagggcaacacgcaggtctcacgtaaaaagttgttacctctgctgcaggaggccctgtctgcttacttcgactccatgaagatcccttcaggccagcccgaaacagctgacgtgagtagggagcaagttgataaagaattagaccgcgcttcaaattcactgatctcaggcctatctcaggacgaggaagatcccccactccccccaactcctatgaattcactggttgacgagtgtcccctggaccagggcctacccaagttaagtgctgaagccgtctttgaaaaatgctctcagatcagtctgtcacagagcacaaccgcctccctgagcaagaaatag

SEQ ID NO: 115051 - DNA, 657 bp, Artificial Sequence
  derived and/or modified sequence
atggatttgaagattggcaaggcaacccctaaggattctaaatacgtcgagaaactcgaggccctgttccccgacctgcctaagcggaacgacatttttgacagtctccaaaaagcgaagttcgatgtttctggccttactacggaacagatgcttagaaaggatcagaagacaatctatcggcagggcgttaaagtggccattagcgcaatttatatggatttggaaatatgtgaggtcttagaacgctctcattcccctcccttgaagttgactccggctagttccacacatcccaacctgcatgcctatttacagggtaatactcaggtttctagaaaaaagttgctgcccctcttgcaagaggccctgagtgcctatttcgactcgatgaaaatcccctcgggacaaccagagacagcggacgtgtcaagagagcaagtggacaaggagcttgatcgagcaagcaattctctgatctctggattgtcacaggatgaagaggatcccccactgcctcctactcctatgaactcattggtcgatgagtgcccactggaccaggggctgcccaaactctcagcagaggccgttttcgaaaaatgttcccaaatctctctttcccagtctacaacggcctcgctgagcaaaaaatag

SEQ ID NO: 115052 - DNA, 537 bp, Artificial Sequence
  derived and/or modified sequence
atggacctgaagatcggtaaggctaccccaaaggattccaagtatgtggaaaagcttgaagccctctttcctgatctgccgaaaagaaacgatatattcgactcactgcagaaagctaaatttgacgtgagcgggttgactacagagcagatgctaagaaaggaccagaagaccatctaccggcagggagtaaaggttgccatttcggccatatatatggacctggaaatatgtgaagtgcttgagagatcccatagtccccctttgaagttgacccctgcctcctcaacccatccaaacctgcatgcttacctgcaggggaatacacaggtctcccgcaaaaagctgttgccgctgcttcaggaggccttgagtgcctacttcgactccatgaagataccctcagggcagccggaaactgccgatgtcagccgagagcaggtggacaaagagctggaccgggcttctaacagtctcataagtggactgagtcaggatgaggaagatccgcctctgccacccactcccatgaactag

SEQ ID NO: 115053 - protein, 277 aa, Artificial Sequence
  derived and/or modified sequence
MMKIVGGHYLKVTLKPILDEICDSSKSCEIDPIKLKEGDNVENNKENLRYYVDKLFNTIVKSSMSCPTVMCDIFYSLRQMATQRFPNDPHVQYSAVSSFVFLRFFAVAVVSPHTFHLRPHHPDAQTIRTLTLISKTIQTLGSWGSLSKSKSSFKETFMCEFFKMFQEEGYIIAVKKFLDEISSTETKESSGTSEPVHLKEGEMYKRAQGRTRIGKKNFKKRWFCLTSRELTYHKQPGSCVYALLWGFSWFSVKVSLPLIVTLVNPFSNITVVYGFSH

SEQ ID NO: 115054 - protein, 850 aa, Artificial Sequence
  derived and/or modified sequence
MAAAAPAAAAASSEAPAASATAEPEAGDQDSREVRVLQSLRGKICEAKNLLPYLGPHKMRDCFCTINLDQEEVYRTQVVEKSLSPFFSEEFYFEIPRTFQYLSFYVYDKNVLQRDLRIGKVAIKKEDLCNHSGKETWFSLQPVDSNSEVQGKVHLELKLNELITENGTVCQQLVVHIKACHGLPLINGQSCDPYATVSLVGPSRNDQKKTKVKKKTSNPQFNEIFYFEVTRSSSYTRKSQFQVEEEDIEKLEIRIDLWNNGNLVQDVFLGEIKVPVNVLRTDSSHQAWYLLQPRDNGNKSSKTDDLGSLRLNICYTEDYVLPSEYYGPLKTLLLKSPDVQPISASAAYILSEICRDKNDAVLPLVRLLLHHDKLVPFATAVAELDLKDTQDANTIFRGNSLATRCLDEMMKIVGGHYLKVTLKPILDEICDSSKSCEIDPIKLKEGDNVENNKENLRYYVDKLFNTIVKSSMSCPTVMCDIFYSLRQMATQRFPNDPHVQYSAVSSFVFLRFFAVAVVSPHTFHLRPHHPDAQTIRTLTLISKTIQTLGSWGSLSKSKSSFKETFMCEFFKMFQEEGYIIAVKKFLDEISSTETKESSGTSEPVHLKEGEMYKRAQGRTRIGKKNFKKRWFCLTSRELTYHKQPGSKDAIYTIPVKNILAVEKLEESSFNKKNMFQVIHTEKPLYVQANNCVEANEWIDVLCRVSRCNQNRLSFYHPSVYLNGNWLCCQETGENTLGCKPCTAGVPADIQIDIDEDRETERIYSLFTLSLLKLQKMEEACGTIAVYQGPQKEPDDYSNFVIEDSVTTFKTIQQIKSIIEKLDEPHEKYRKKRSSSAKYGSKENPIVGKAS

SEQ ID NO: 115055 - DNA, 2553 bp, Artificial Sequence
  derived and/or modified sequence
atggccgcagcggcccctgccgcagcagctgctagcagtgaggcacccgctgccagtgctactgctgaacctgaagccggtgaccaggacagtcgggaggtccgagtgctgcagagtctgcggggaaaaatctgcgaggcaaagaatctgcttccttatctcgggccgcataagatgagagattgtttctgtaccatcaatctggaccaggaggaagtgtacaggacacaggttgtcgagaagagcctgtcccccttcttctcagaggaattctacttcgaaatcccgcgcacatttcagtacctgagcttttacgtctatgataagaatgtgcttcagcgtgatctgcgcataggaaaggtggccatcaaaaaagaggatctctgtaaccactctggtaaagaaacctggttttctctccagcctgttgacagtaatagtgaggttcagggaaaagtgcacctggaactgaagctcaacgagctcatcacagagaacggtacggtttgccaacaactcgtggtccacattaaggcatgtcacggattacccttgattaatggccagtcttgtgacccctacgctactgtttcactggtgggcccttcccggaacgaccaaaaaaagactaaagttaagaagaagacctccaacccgcagtttaatgagattttttatttcgaagtcactcgatcatccagctacaccaggaagtcccaatttcaggtggaagaagaagatattgaaaagctggaaattaggattgatctttggaacaacggcaatttggtgcaggatgtctttcttggagaaattaaggtccccgtcaatgttctccgcacggactctagtcaccaggcctggtacttgctgcaacctagggacaatggaaataaatcatctaagacagatgaccttgggtccttgagattaaatatttgttatacagaagactacgtgttgccttcagagtactatggcccattgaagacccttctgctcaagagccccgacgttcaaccgatctctgccagcgccgcttacattctgagcgagatttgcagagacaagaacgacgctgtccttcccctggtgcgactgctgctgcaccacgacaaattggtcccttttgccactgctgtagcagaactggacttgaaggacacccaggacgcaaacaccatttttagggggaactccctcgccacccggtgcttagacgagatgatgaagatcgtggggggccactacttaaaggtaactctaaaacccatcttggacgagatatgcgactcttctaagtcatgcgaaattgaccccatcaaactgaaggagggggataatgttgagaataacaaggagaacctccgatactatgtagacaagctcttcaacactatagttaagagcagtatgagttgccctaccgttatgtgcgacattttctacagcttgcgccagatggccacgcaaaggtttcccaatgacccccacgtgcagtacagcgccgtgtcctcgttcgtctttttgcggtttttcgcagtcgcagtggtgtcccctcatacttttcatctcaggccccatcatccagacgcacagaccatccgaacattaaccctgatctccaaaaccatccaaacactaggttcttggggaagccttagtaaatccaagtccagtttcaaggaaacatttatgtgcgaattctttaagatgtttcaggaagagggctacatcatcgccgtgaaaaaattcctagacgaaatttcttcaaccgagaccaaagaaagtagtgggacctccgaacccgttcacctgaaagaaggggaaatgtacaaaagagcccaggggagaacaagaatcgggaaaaagaactttaagaagaggtggttttgtctgacctctagggaactaacctatcataaacagcccggatccaaggacgccatttacaccataccagtgaagaacattctggcggtcgagaagctggaggaaagtagcttcaataagaaaaatatgtttcaggtcatccacaccgaaaagcctctctatgtccaggctaacaattgtgtcgaggctaatgaatggatcgatgtactgtgcagggtgagccgatgtaaccagaatcgactcagtttctaccacccatccgtttatctgaatggcaactggctgtgctgccaggagacaggagagaacactctggggtgtaaaccctgtaccgcgggcgtacccgctgacatccagatcgacattgatgaggaccgggagacagaaaggatctatagcttgtttacgctttccctgttgaagctccagaagatggaagaggcgtgcggtacgatcgccgtctatcagggaccgcagaaagaacccgacgactatagcaacttcgtcattgaagactctgttacgacgtttaagaccatacagcaaataaagtcaattatcgagaagctggacgaaccccatgaaaagtacagaaaaaagaggagttccagtgccaaatacgggtctaaagagaatccaattgttggcaaggcttcttag

SEQ ID NO: 115056 - DNA, 2553 bp, Artificial Sequence
  derived and/or modified sequence
atggctgctgctgccccagctgctgctgctgccagcagcgaggccccagctgccagcgccacagctgagcctgaggccggggaccaggacagccgggaggtgcgggtgctgcagagcctgcggggcaagatctgtgaggccaagaacctgctgccctacctgggcccccacaagatgagggactgcttctgcaccatcaacctggaccaggaggaggtgtaccgcacccaggtggtggagaagagcctgagccccttcttcagcgaggagttctactttgagatccccaggaccttccagtacctgtccttctacgtgtatgacaagaatgtgctgcagagggacctgcgcatcggcaaggtggccatcaagaaggaggacctgtgcaaccacagcggcaaggagacctggttcagcctgcagcctgtggacagcaacagcgaggtgcagggcaaggtgcacctggagctgaagctgaatgagctgatcacagaaaatggcaccgtgtgccagcagctggtggtgcacatcaaggcctgccacggcctgcccctcatcaatggccagagctgtgacccctatgccaccgtgtccctggtgggccccagcagaaatgaccagaagaagaccaaggtgaagaagaagaccagcaacccccagttcaatgagatcttctactttgaggtgaccaggagcagcagctacaccaggaagagccagttccaggtggaggaggaggacatcgagaagctggagatcagaattgacctgtggaacaacggcaacctggtgcaggatgtgttcctgggggagatcaaggtgcctgtgaatgtgctgaggacagacagcagccaccaggcctggtacctgctgcagccccgggacaatggaaacaagagcagcaagacagatgacctgggcagcctgcggctgaacatctgctacacagaagattatgtgctgcccagcgagtactacggccccctgaagaccctgctgctgaagagcccagatgtgcagcccatcagcgccagcgctgcctacatcctgtctgagatctgccgggacaagaatgatgctgtgctgcccctggtgcggctgctgctgcaccacgacaagctggtgccctttgccacagctgtggccgagctggacctgaaggacacccaggatgccaacaccatcttccggggcaacagcctggccacccgctgcctggatgagatgatgaagatcgtgggcggccactacctgaaggtgaccctgaagcccatcctggatgagatctgtgacagcagcaagagctgtgaaattgaccccatcaagctgaaggagggggacaacgtggagaacaacaaggagaacctgcgctactacgtggacaagctgttcaacaccatcgtgaagagctccatgagctgccccaccgtgatgtgtgacatcttctacagcctgcggcagatggccacccagcgcttccccaatgacccccacgtgcagtacagcgctgtgagcagctttgtgttcctgcgcttctttgctgtggccgtggtgagcccccacaccttccacctgcggccccaccacccagatgcccagaccatccgcaccctgaccctcatcagcaagaccatccagaccctgggctcctggggcagcctgagcaagagcaagagcagcttcaaggagaccttcatgtgtgagttcttcaagatgttccaggaggagggctacatcatcgctgtgaagaagttcctggatgagatcagcagcacagagaccaaggagagcagcggcaccagcgagcctgtgcacctgaaggagggggagatgtacaagagggcccagggccgcaccagaattggcaagaagaacttcaagaagcgctggttctgcctgaccagccgggagctgacctaccacaagcagcccggcagcaaggatgccatctacaccatccctgtgaagaacatcctggccgtggagaagctggaggagagcagcttcaacaagaagaacatgttccaggtgatccacacagagaagcccctgtatgtgcaggccaacaactgtgtggaggccaatgagtggattgatgtgctgtgccgggtgagccgctgcaaccagaaccggctgtccttctaccaccccagcgtgtacctgaatggaaactggctgtgctgccaggagactggagagaacaccctgggctgcaagccctgcacagctggggtgcctgctgacatccagattgatattgatgaagatcgggagacagagcgcatctacagcctcttcaccctgagcctgctgaagctgcagaagatggaggaggcctgtggcaccatcgctgtgtaccagggcccccagaaggagccagatgactacagcaactttgtgattgaggacagcgtgaccaccttcaagaccatccagcagatcaagagcatcatcgagaagctggatgagccccatgagaagtacaggaagaagaggagcagcagcgccaagtatggcagcaaggagaaccccatcgtgggcaaggccagctag

SEQ ID NO: 115057 - DNA, 2553 bp, Artificial Sequence
  derived and/or modified sequence
atggccgccgccgcccccgccgccgccgccgccagcagcgaggccccagccgcctccgcaacagcagagcccgaggccggggatcaggattcacgggaggtccgcgtattacagtcgttgcgaggaaagatctgtgaagcgaaaaacctgttgccttatcttgggccccataaaatgcgtgactgtttttgcaccattaacctggatcaggaagaggtgtaccggacccaggtagttgagaaaagcctgagcccattcttttccgaggaattttattttgaaatcccccgcacctttcagtacctctctttctacgtctatgacaaaaatgttctgcagcgggaccttcggatcgggaaggtggctattaagaaggaggacctgtgcaatcatagcgggaaggagacatggttttcactgcaacctgtcgacagtaattctgaggttcagggaaaagtccacctagaactgaaactgaatgagctgattactgaaaacggcaccgtctgtcagcagctagtggtgcacatcaaggcatgccacggattaccgttaattaatggccaaagttgcgacccgtacgccaccgtaagccttgtcggcccctccagaaatgatcagaagaagactaaagttaagaaaaagacgtccaaccctcagtttaatgagatcttctactttgaggtgactcggagttcttcatacaccaggaagtcccagtttcaggtggaggaagaggacattgagaagctcgaaatacgcatcgacctgtggaataacgggaacctagtccaggacgtcttcctgggcgaaatcaaggtacctgtgaacgtgcttaggacggattcttcccatcaggcctggtatcttctgcagccccgggataacggcaataaatccagtaaaacagatgatctaggctctctgcggttgaacatctgttatactgaggactatgtgctgccatccgaatactacggtcccctgaagacactgctcctcaaaagcccagatgtacagcccatcagcgcatcagccgcctacatcctgagtgagatctgccgagataagaacgacgccgttctgcctctggtccgcttgctcctgcatcatgataagctggtaccgtttgcaacggccgtggctgagttggacctcaaggacactcaggacgccaatactatcttccgagggaactctcttgccactcgctgtctcgacgagatgatgaaaattgtaggcgggcattatttgaaggtgacattgaaacccattctcgatgaaatttgcgattcttccaaatcgtgtgagattgatccaattaagctgaaagagggtgacaacgttgagaacaacaaagagaatcttcgttactacgtggataagctgtttaacaccattgtcaaatcttccatgtcctgccccacagtaatgtgtgatattttctacagccttagacagatggctactcaacggttccccaacgacccccacgtgcagtactctgcagtttcgtcctttgtttttttacgattcttcgcagttgctgtcgtgagtccgcatacattccacttgcgtccccaccatcccgacgcccagaccatacggacactgacgcttattagcaaaactatccagactttaggaagctggggtagtttgagcaagtccaagagctccttcaaggaaacctttatgtgcgagttcttcaaaatgttccaggaggaaggatatataatcgcggttaaaaagtttttggatgagattagttcaaccgagaccaaggagagctcgggaaccagcgaaccggtgcacttgaaggagggggaaatgtataagcgggcgcaggggagaactaggataggcaaaaagaatttcaaaaagagatggttctgtctgacttcgagggagctgacctatcacaagcaacccggctcaaaggatgctatatacacaataccagtgaaaaacattctcgctgttgagaaactggaggagtccagctttaataaaaaaaatatgtttcaggtgattcacacagagaagcccctctatgtgcaagcaaacaactgtgtcgaggccaatgaatggattgacgttctctgtagggtgtcacgctgtaatcagaatagactgagtttttaccatccctccgtttacctgaacggcaactggctctgttgccaggaaaccggcgaaaataccttaggctgcaagccatgcacggctggagtcccagccgacattcaaatcgacatcgatgaagatcgcgagactgagaggatctattccctcttcacattgtcgctcctcaaattgcagaaaatggaggaggcctgcggtacaatcgcagtttaccaggggccccagaaggagcccgatgattatagtaactttgtgatcgaggattccgtcacaaccttcaaaaccatccagcagattaagtcgatcattgagaagctggatgaaccccatgaaaagtatcgtaagaaaagatcttcttctgctaagtatggctccaaggagaacccaatcgtgggaaaagcaagttag

SEQ ID NO: 115058 - DNA, 2553 bp, Artificial Sequence
  derived and/or modified sequence
atggcagccgctgccccagctgccgcagcagcaagcagtgaggcaccagctgcctccgcgacggccgagcccgaggccggagaccaggacagcagggaagtccgcgtcctgcagtccctgcggggaaagatctgtgaggctaaaaacttgttgccatacttggggcctcacaaaatgcgcgactgcttctgtacaataaacctggaccaagaagaagtgtatcgtacccaggtcgtggagaagagcctgtcaccctttttttctgaggagttctactttgaaatacctcggacgtttcagtatctgtctttctacgtgtatgacaaaaacgttctccagagagatctcagaatcggaaaggtggccattaaaaaggaggacctctgcaatcattccggaaaagagacttggtttagcctgcagcccgttgattctaattccgaagtgcaaggtaaggtacatttggagttgaagctgaatgagctaattactgagaatggaacagtgtgtcagcaacttgtggtgcatataaaagcctgccacggactacccctcattaacggccagagctgtgatccttatgcaactgtgagcctcgttggcccttccagaaacgaccagaaaaaaaccaaggttaagaaaaagacctctaatccccagtttaatgagattttttatttcgaagtcaccagatcttcgtcgtatacacgaaagtcacaattccaggtcgaagaagaggatattgaaaagctcgagatcaggattgatttgtggaataatggcaatctggtgcaggatgtcttcctgggtgagattaaggtgcccgtcaatgttctgagaaccgattcttctcatcaggcctggtacctgctacagccacgagacaatggtaacaagtctagcaaaacagatgacctgggaagtcttcgcctaaatatttgttataccgaagattacgtacttccgtctgagtactatggtccacttaagacacttcttttaaagagcccagacgtgcagcctatcagcgcctcagccgcttacatcctgtcagagatttgcagagacaaaaacgacgcggtgttacctctcgttaggctcttgttgcaccacgacaagctggttcctttcgccactgccgtcgcagagctggatctgaaggacacccaggacgctaatactattttccgaggcaactctctggccaccaggtgtctcgacgaaatgatgaagatcgttggcggtcattaccttaaagtgacgcttaagccgatccttgatgaaatatgcgattcttcgaagagttgtgagatcgaccccatcaaattgaaagagggtgataatgtagaaaataacaaggaaaacctacgctattacgttgataagctattcaacacaatagttaaaagcagtatgtcctgtcctaccgtcatgtgtgacattttctacagtcttagacagatggccacccagcgattccccaacgatccacacgtacagtactctgcggtatcctcttttgtctttcttaggttcttcgcagtggcagtggtcagtccccacacctttcatctccggccacatcacccagatgcgcagaccattaggactctgactttaatctccaagaccatccagacactaggctcctggggctcactgtctaagagtaagtccagttttaaagaaaccttcatgtgtgaattttttaagatgttccaggaggaagggtatatcatcgccgtcaagaagtttttagatgaaattagtagtactgaaactaaggagtctagcggcacctccgaaccggtccatctgaaggagggcgaaatgtacaagcgtgcccagggtagaactagaatcggcaagaagaacttcaaaaagagatggttctgcctgacgtctcgcgagttgacttatcacaagcaaccgggttctaaagacgccatctacaccatacccgtaaagaacatcctggccgtggagaaactcgaggaatcatcctttaacaagaagaacatgttccaggtgattcacaccgaaaaaccgttgtacgtgcaggcaaacaattgcgtcgaggccaacgaatggattgatgtgttgtgtagggtctctagatgcaatcaaaaccggttatcgttttatcacccctccgtgtatctgaatggcaactggctgtgctgccaagagaccggtgagaatacactcgggtgcaaaccctgcaccgccggagtgcccgctgacattcagatcgatatagatgaggaccgagaaaccgagcgcatctacagtctgtttactctgtccctcttgaagctccagaagatggaggaggcatgcggaacaattgccgtttaccaggggccacagaaagagcctgatgactattcaaacttcgtcattgaggattcagtgaccacatttaagaccatacaacagatcaagtccatcatcgaaaagctggatgaacctcacgaaaagtatcgaaaaaaaaggtcttcgtcagctaagtatggatccaaggaaaaccccatcgtgggcaaagctagctag

SEQ ID NO: 115059 - DNA, 2119 bp, Artificial Sequence
  derived and/or modified sequence
aggcggcagggctgcggcacgggccgggcggcaccatggcggcggcggcgcctgctgctgcggcggcttcttccgaggcgccagcggcgagtgcgactgcagagcccgaggccggggaccaggacagtcgcgaggttcgagtgttgcagagcctgcggggcaagatctgtgaagcaaaaaatttattgccatatcttggaccccacaaaatgagagattgtttctgtaccataaatttggaccaggaagaagtttatcgtacccaagttgtggaaaaatctttaagcccatttttcagtgaagaatgttttacaaagagatctccgtataggaaaagtagccatcaaaaaagaagacttgtgtaatcacagtggcaaagaaacttggttttcattacagcctgttgactccaattcagaggttcagggtaaagttcaccttgaattaaaactgaatgaactgataacggagaatggaactgtatgccagcagcttgttgtacacatcaaggcatgccatgggttgcctctcataaatggccaaagctgtgacccttatgcaacagtttctctagtgggcccttctaggaatgaccaaaagaagacaaaagtaaagaagaaaacaagcaatccgcagtttaatgaaatcttttattttgaggtaaccagatccagtagttacaccagaaagtcccagttccaggtagaagaggaggacattgaaaagctagaaatcaggatcgacttgtggaacaatggaaacctagtccaagatgttttcctaggtgagattaaggttcctgtgaacgtattaagaactgattcctctcatcaagcctggtacttgctacagccaagagacaatggaaacaagtcatccaaaactgatgacctggggtctcttcgattaaatatatgttatacagaagactacgtgcttccttcagagtactatggtcctttgaaaactttgctgctaaaatcaccagatgttcaaccaatatctgcctcagctgcttacattttgagtgaaatatgtcgagataaaaatgatgctgttttgccccttgtacgactgctgctgcaccatgataaacttgttccttttgccactgctgtggctgaattagacttgaaggatacacaagatgcaaacacaatttttagaggaaattccctggctacccgatgtctggatgagatgatgaaaatagtgggagggcactacctgaaagtaacattaaaacctattcttgatgagatatgtgactcctcaaaatcctgtgaaatcgatcctattaaattgaaagagggagataatgtagaaaataataaggagaatctgcgctactatgtagacaagttattcaatacaattgtaaaatcaagtatgagctgccccactgtaatgtgtgatatcttttattctctaaggcagatggctactcagagatttcctaatgaccctcatgttcagtattctgcagtgagcagctttgtatttcttcgtttctttgctgtagccgtagtatcacctcatacttttcatttgcgacctcatcatccagatgcacagacaattagaacattaactctcatctcaaaaactatacaaactttgggaagctgggggagtctgtccaaaagcaagtcaagtttcaaagagacattcatgtgtgaatttttcaaaatgtttcaagaagaaggatatattatagcagttaaaaagttcttggatgaaatttcatctactgaaactaaagagtccagtggtacgagtgagcctgtgcacctgaaagaaggtgagatgtataaaagagctcaaggaagaactcggattggaaaaaagaattttaagaaacgatggttctgcttaacaagcagagagctcacctaccacaaacagccaggtagttgtgtttatgctttattgtggggtttttcctggttctcagtgaaggtttctttgccgcttattgtgactctagtgaatcctttcagtaatattactgtagtttatggtttctcacactgatacatacgtactaagaatgaaaaaatatttgacagtaaccccatgtatattatgtttttctcacattaaatttcttgagtttctg

SEQ ID NO: 115060 - DNA, 3054 bp, Artificial Sequence
  derived and/or modified sequence
aggcggcagggctgcggcacgggccgggcggcaccatggcggcggcggcgcctgctgctgcggcggcttcttccgaggcgccagcggcgagtgcgactgcagagcccgaggccggggaccaggacagtcgcgaggttcgagtgttgcagagcctgcggggcaagatctgtgaagcaaaaaatttattgccatatcttggaccccacaaaatgagagattgtttctgtaccataaatttggaccaggaagaagtttatcgtacccaagttgtggaaaaatctttaagcccatttttcagtgaagaattttactttgagattccaagaactttccagtatttgtctttctatgtttatgataagaatgttttacaaagagatctccgtataggaaaagtagccatcaaaaaagaagacttgtgtaatcacagtggcaaagaaacttggttttcattacagcctgttgactccaattcagaggttcagggtaaagttcaccttgaattaaaactgaatgaactgataacggagaatggaactgtatgccagcagcttgttgtacacatcaaggcatgccatgggttgcctctcataaatggccaaagctgtgacccttatgcaacagtttctctagtgggcccttctaggaatgaccaaaagaagacaaaagtaaagaagaaaacaagcaatccgcagtttaatgaaatcttttattttgaggtaaccagatccagtagttacaccagaaagtcccagttccaggtagaagaggaggacattgaaaagctagaaatcaggatcgacttgtggaacaatggaaacctagtccaagatgttttcctaggtgagattaaggttcctgtgaacgtattaagaactgattcctctcatcaagcctggtacttgctacagccaagagacaatggaaacaagtcatccaaaactgatgacctggggtctcttcgattaaatatatgttatacagaagactacgtgcttccttcagagtactatggtcctttgaaaactttgctgctaaaatcaccagatgttcaaccaatatctgcctcagctgcttacattttgagtgaaatatgtcgagataaaaatgatgctgttttgccccttgtacgactgctgctgcaccatgataaacttgttccttttgccactgctgtggctgaattagacttgaaggatacacaagatgcaaacacaatttttagaggaaattccctggctacccgatgtctggatgagatgatgaaaatagtgggagggcactacctgaaagtaacattaaaacctattcttgatgagatatgtgactcctcaaaatcctgtgaaatcgatcctattaaattgaaagagggagataatgtagaaaataataaggagaatctgcgctactatgtagacaagttattcaatacaattgtaaaatcaagtatgagctgccccactgtaatgtgtgatatcttttattctctaaggcagatggctactcagagatttcctaatgaccctcatgttcagtattctgcagtgagcagctttgtatttcttcgtttctttgctgtagccgtagtatcacctcatacttttcatttgcgacctcatcatccagatgcacagacaattagaacattaactctcatctcaaaaactatacaaactttgggaagctgggggagtctgtccaaaagcaagtcaagtttcaaagagacattcatgtgtgaatttttcaaaatgtttcaagaagaaggatatattatagcagttaaaaagttcttggatgaaatttcatctactgaaactaaagagtccagtggtacgagtgagcctgtgcacctgaaagaaggtgagatgtataaaagagctcaaggaagaactcggattggaaaaaagaattttaagaaacgatggttctgcttaacaagcagagagctcacctaccacaaacagccaggtagcaaagatgcaatctacacaatcccagtaaaaaacattcttgctgtggaaaaactggaagagagctctttcaacaagaaaaatatgttccaagtaatacatacggagaaaccactctatgtccaggcaaataactgtgtagaagctaatgaatggatagacgtactctgcagggtgagccgatgcaatcaaaacaggctcagtttttatcatccctctgtgtatctgaacggaaattggctctgctgtcaggagactggtgaaaacactctcggctgcaagccatgtactgcaggtgtccctgcagacatccaaatagatattgatgaagacagagaaacagaaagaatttattccctttttaccctcagtttacttaagctgcagaagatggaagaggcttgtggaactattgcagtctatcaaggaccacagaaagagcctgatgattattctaactttgtaatcgaggattctgtaacaacctttaagacaattcagcaaataaaaagcataattgagaagctggatgaacctcatgaaaaatataggaagaaaagatccagtagtgcaaaatatgggagcaaggaaaatccaattgttgggaaagcatcttagagtttaacagattggttcagaagaactggaaaatattatttttcttggagcttttcaattcatcatgtattttgttcatggtatttaagaatgagcatccgcttcaatgtcatctgcctccacattgtatttaatatttaataattgaaattaattgtttgggaatcctggtattgatgtattactagagaatttaaagcccaagattcccttcatacctgtgtgaccaaatccatgtttctgcaacttctttttaatcgaaagaatcttcctagaaaagctttgtaacaaagggagaactcctccgtagcaagaaaccatctcttcttgtaacactctgttctgtggacttgttttcactaccatcagtgcctgctctatactgccaacattgtgttttactagaaaattccaattcatgacagttcagagcttttcatttagttcatgtagaccctcccacttt

SEQ ID NO: 115061 - DNA, 2553 bp, Artificial Sequence
  derived and/or modified sequence
atggccgccgccgcccccgccgccgccgccgccagcagcgaggcccccgccgccagcgccaccgccgagcccgaggccggcgaccaggacagcagagaggtgagagtgctgcagagcctgagaggcaagatctgcgaggccaagaacctgctgccctacctgggcccccacaagatgagagactgcttctgcaccatcaacctggaccaggaggaggtgtacagaacccaggtggtggagaagagcctgagccccttcttcagcgaggagttctacttcgagatccccagaaccttccagtacctgagcttctacgtgtacgacaagaacgtgctgcagagagacctgagaatcggcaaggtggccatcaagaaggaggacctgtgcaaccacagcggcaaggagacctggttcagcctgcagcccgtggacagcaacagcgaggtgcagggcaaggtgcacctggagctgaagctgaacgagctgatcaccgagaacggcaccgtgtgccagcagctggtggtgcacatcaaggcctgccacggcctgcccctgatcaacggccagagctgcgacccctacgccaccgtgagcctggtgggccccagcagaaacgaccagaagaagaccaaggtgaagaagaagaccagcaacccccagttcaacgagatcttctacttcgaggtgaccagaagcagcagctacaccagaaagagccagttccaggtggaggaggaggacatcgagaagctggagatcagaatcgacctgtggaacaacggcaacctggtgcaggacgtgttcctgggcgagatcaaggtgcccgtgaacgtgctgagaaccgacagcagccaccaggcctggtacctgctgcagcccagagacaacggcaacaagagcagcaagaccgacgacctgggcagcctgagactgaacatctgctacaccgaggactacgtgctgcccagcgagtactacggccccctgaagaccctgctgctgaagagccccgacgtgcagcccatcagcgccagcgccgcctacatcctgagcgagatctgcagagacaagaacgacgccgtgctgcccctggtgagactgctgctgcaccacgacaagctggtgcccttcgccaccgccgtggccgagctggacctgaaggacacccaggacgccaacaccatcttcagaggcaacagcctggccaccagatgcctggacgagatgatgaagatcgtgggcggccactacctgaaggtgaccctgaagcccatcctggacgagatctgcgacagcagcaagagctgcgagatcgaccccatcaagctgaaggagggcgacaacgtggagaacaacaaggagaacctgagatactacgtggacaagctgttcaacaccatcgtgaagagcagcatgagctgccccaccgtgatgtgcgacatcttctacagcctgagacagatggccacccagagattccccaacgacccccacgtgcagtacagcgccgtgagcagcttcgtgttcctgagattcttcgccgtggccgtggtgagcccccacaccttccacctgagaccccaccaccccgacgcccagaccatcagaaccctgaccctgatcagcaagaccatccagaccctgggcagctggggcagcctgagcaagagcaagagcagcttcaaggagaccttcatgtgcgagttcttcaagatgttccaggaggagggctacatcatcgccgtgaagaagttcctggacgagatcagcagcaccgagaccaaggagagcagcggcaccagcgagcccgtgcacctgaaggagggcgagatgtacaagagagcccagggcagaaccagaatcggcaagaagaacttcaagaagagatggttctgcctgaccagcagagagctgacctaccacaagcagcccggcagcaaggacgccatctacaccatccccgtgaagaacatcctggccgtggagaagctggaggagagcagcttcaacaagaagaacatgttccaggtgatccacaccgagaagcccctgtacgtgcaggccaacaactgcgtggaggccaacgagtggatcgacgtgctgtgcagagtgagcagatgcaaccagaacagactgagcttctaccaccccagcgtgtacctgaacggcaactggctgtgctgccaggagaccggcgagaacaccctgggctgcaagccctgcaccgccggcgtgcccgccgacatccagatcgacatcgacgaggacagagagaccgagagaatctacagcctgttcaccctgagcctgctgaagctgcagaagatggaggaggcctgcggcaccatcgccgtgtaccagggcccccagaaggagcccgacgactacagcaacttcgtgatcgaggacagcgtgaccaccttcaagaccatccagcagatcaagagcatcatcgagaagctggacgagccccacgagaagtacagaaagaagagaagcagcagcgccaagtacggcagcaaggagaaccccatcgtgggcaaggccagctag

SEQ ID NO: 115062 - protein, 337 aa, Artificial Sequence
  derived and/or modified sequence
MHPRRPDGFDGLGYRGGARDEQGFGGAFPARSFSTGSDLGHWVTTPPDIPGSRNLHWGEKSPPYGVPTTSTPYEGPTEEPFSSGGGGSVQGQSSEQLNRFAGFGIGLASLFTENVLAHPCIVLRRQCQVNYHAQHYHLTPFTVINIMYSFNKTQGPRALWKGMGSTFIVQGVTLGAEGIISEFTPLPREVLHKWSPKQIGEHLLLKSLTYVVAMPFYSASLIETVQSMLDAYFPELIANFAASLCSDVILYPLETVLHRLHIQGTRTIIDNTDLGYEVLPINTQYEGMRDCINTIRQEEGVFGFYKGFGAVIIQYTLHAAVLQITKIIYSTLLQNNI

SEQ ID NO: 115063 - DNA, 1014 bp, Artificial Sequence
  derived and/or modified sequence
atgcatccacgccggccggatggcttcgatgggctggggtacaggggtggcgccagagacgaacaagggtttgggggcgcctttcctgcacgatctttctctactggctctgacttgggacactgggtgactacaccacccgatatccccggctcccggaacttacattggggagaaaaaagtcccccctacggtgtgcccaccacttcaactccctacgaaggtcctactgaagagcccttcagcagcggtggtgggggatccgttcagggccaaagctccgaacaactgaacagattcgcaggttttggcattggtctcgcaagtctctttaccgagaatgttctggcgcacccatgtatcgtgttgcggcgacaatgccaggtgaactaccatgctcaacactatcatctcacgccattcactgtcatcaacattatgtactcttttaacaaaacccaaggacccagggcactgtggaagggcatggggagtacatttatcgttcagggagtgacacttggggctgagggcatcatctcagagttcaccccactcccccgggaggtcttgcacaagtggagtccaaagcagattggtgaacatctactgttgaagagcctcacttacgttgtcgcaatgccattttatagcgcctcactgatagagaccgtgcaaagcatgttggacgcctatttccctgagctgatagctaatttcgctgcctccctttgctctgatgtcatactgtatccactcgaaaccgtcctccatagattgcacatacaaggtaccagaaccattatcgacaacacagatttagggtatgaggtactaccgataaatacccagtacgagggcatgcgcgattgcattaataccattcgccaggaggagggtgtctttggcttctataaaggattcggtgctgtgatcattcagtacactctgcatgccgcggtgctccagattaccaaaattatctacagtactctgctgcaaaacaatatttag

SEQ ID NO: 115064 - DNA, 1014 bp, Artificial Sequence
  derived and/or modified sequence
atgcacccccggcggccagatggctttgatggcctgggctaccggggcggggccagagatgagcagggctttggaggagccttccctgcccggagcttcagcactggaagtgacctgggccactgggtgaccaccccaccagacatccctggcagcaggaacctgcactggggcgagaagagccccccctacggcgtgcccaccaccagcaccccctatgagggccccacagaggagcccttcagcagcggcggcggcggctctgtgcagggccagagcagcgagcagctgaacagatttgctggctttggaattggcctggccagcctcttcacagaaaatgtgctggcccacccctgcatcgtgctgcggcggcagtgccaggtgaactaccacgcccagcactaccacctgacccccttcaccgtcatcaacatcatgtacagcttcaacaagacccagggcccccgggccctgtggaagggcatgggcagcaccttcatcgtgcagggcgtgaccctgggcgctgagggcatcatcagcgagttcacccccctgccccgggaggtgctgcacaagtggagccccaagcagattggagagcacctgctgctgaagagcctgacctacgtggtggccatgcccttctacagcgccagcctcatcgagaccgtgcagagcatgctggatgcctacttccctgagctgattgccaactttgctgccagcctgtgcagtgatgtgatcctgtaccccctggagaccgtgctgcaccggctgcacatccagggcaccaggaccatcatcgacaacacagacctgggctatgaggtgctgcccatcaacacccagtatgagggcatgagggactgcatcaacaccatccggcaggaggagggcgtgtttggcttctacaagggctttggagctgtgatcatccagtacaccctgcatgctgctgtgctgcagatcaccaagatcatctacagcaccctgctgcagaacaacatctag

SEQ ID NO: 115065 - DNA, 1014 bp, Artificial Sequence
  derived and/or modified sequence
atgcacccccggcggcccgacggcttcgacggcctgggctaccggggtggtgcaagggatgaacaggggtttggtggtgcatttccagccagatcgttcagcactgggagcgatctggggcattgggttactacccccccggatataccaggctcccgcaatttgcactggggtgaaaaaagccctccatatggcgtgcctactacctcaactccatatgaaggccctacagaggaaccattctctagtggtggaggtgggtcagttcaggggcagtcttccgagcagctgaatagatttgctgggtttggaatcggattagcttcactatttactgagaatgtgttggctcacccatgtattgtgctccggaggcagtgtcaagtcaattaccacgcacagcactaccatctgactccattcacggtcattaatataatgtattcatttaacaaaacacaaggaccccgcgctctctggaaaggtatggggagcacatttatagtccagggtgtgaccttgggtgcagagggtataatctctgaattcacccccctgccacgggaggtcctccataagtggagtcccaaacagattggagagcacctcttattaaagtctctcacatatgtggtggccatgccattctattccgcttcacttatcgaaacagtccagagtatgctggatgcctactttcctgaactgatcgcgaattttgctgcctcactgtgcagtgatgtaattctctaccccctagaaactgtcctgcaccgtctgcatatccaaggtacaaggacaatcatcgacaacaccgacttgggttatgaagtcctacccatcaacacacaatatgagggaatgcgcgattgcattaacacgattcgccaggaagaaggcgtgttcggcttctacaagggctttggagcggtgatcattcagtacactttacacgctgctgtgctccagattaccaaaattatctactcgacactgttacagaacaatatctag

SEQ ID NO: 115066 - DNA, 1014 bp, Artificial Sequence
  derived and/or modified sequence
atgcacccgaggcgtcctgatggattcgacgggttagggtaccgcggtggcgcaagagacgaacagggttttggcggtgctttccccgcaagatcctttagcacagggtcggatcttgggcattgggttactacgcctcccgacatccccggtagccggaatctgcattggggcgaaaaatcccccccatacggtgtgcctactactagtacgccctacgagggtccaacggaagaacccttttctagcggtgggggaggatccgtgcaagggcaatcttctgagcagctaaacaggttcgccggatttggaattggcttggccagtttatttaccgagaatgttctggcgcatccctgcatagtccttaggcgacagtgccaggtcaactatcacgcccagcattatcatctcaccccttttactgttatcaatattatgtattcattcaataaaactcaaggtcctagagcattgtggaaggggatgggctctacgtttattgtgcagggtgtgaccctcggagccgaggggattattagcgagtttacccccctgcctcgggaagtactgcacaagtggtctccaaaacagattggagagcatctcctgctgaaaagcctgacctacgttgtggccatgccattttattccgcctctttaatcgagacggtgcaatctatgctggatgcttactttcccgagctaatagcaaatttcgccgcttctttgtgttccgatgtgatattatacccgcttgagacagtcctgcatagattgcacatacagggtactcgcacaatcattgacaataccgatttgggctacgaggttctacctataaatactcagtatgagggaatgcgggattgcatcaatactatccgccaagaggagggtgtatttggcttttataaggggttcggggctgtgattattcagtacaccctccatgctgctgtcctgcaaataaccaaaatcatctattcgactctgctccagaacaacatctag

SEQ ID NO: 115067 - DNA, 1575 bp, Artificial Sequence
  derived and/or modified sequence
aagctgtgtgtgcttaggtcgtggtggccccggtggtggtgggctccgggcgggctcgcgtcatcctgcccccgctgcgatgcatccgcggcgcccggacggatttgatggcttgggctaccggggtggtgcccgggacgagcagggctttggcggcgccttccctgcaaggtccttcagcaccgggtcggacctgggccactgggtgacgactcccccagatatccccggcagccgcaacctgcactggggcgagaagagcccgccctacggcgtgcccaccacctccaccccgtacgaaggccccacggaggaacccttttccagtggcggcggcggcagtgtgcaggggcagagcagtgaacagctgaatagatttgctggatttggtattggacttgcaagtctctttacagaaaatgtattggcacatccttgcattgttctacgccgccaatgtcaggttaattaccatgctcagcattaccatctcactccatttacagtcatcaatattatgtacagtttcaacaaaactcagggacctagagccctgtggaaaggaatgggaagtacatttattgtccagggagtcacacttggagcagaaggcataattagtgaatttacacctttgccaagggaggttttacataaatggagtcctaaacaaataggagaacaccttctactgaaatccctaacttacgtggtggcaatgcctttttattcagcaagtctgattgaaacagtgcagagtatgttggatgcttattttccagaacttattgctaactttgctgccagtctttgttctgacgttatactttacccattggaaacagttttgcaccgccttcacattcaaggaacacgcacaataattgacaatacagaccttggctatgaagtgcttccaattaatacacaatatgagggaatgagagactgtatcaataccataaggcaggaggaaggagtgtttggtttttataaagggtttggtgctgttataatacagtacacactgcatgcagctgttttacagattaccaaaattatttactctacacttcttcaaaataacatttgagatttaggttccttcactgagtagtctggaagatataatctggataatttgctatgaagttatgagggatacaagtgaaatactggggaagaaaatggattggaaagtaaaattggtactaaagcccatactgattatcttgactttgttttttaaggcataggtatatattttggatcaaaatccttccaaatttgaaaactcaataaaaataacacttattaaattctagttagtgtagcactcatgctgaagtaaacatgatcgtaggcagaagcaaaattttattataaaatctaaaacaaaactttatagagttgaatctattccatctgacttcaatatttgccaaacgtttattttacctcctagattgatgttggtatagtatccttaatacagtgtagtatattaatgtccttaatacaatcaggaggtttttacctttaagcaaataaattatgtcattattgaaaaagact

SEQ ID NO: 115068 - DNA, 1014 bp, Artificial Sequence
  derived and/or modified sequence
atgcaccccagaagacccgacggcttcgacggcctgggctacagaggcggcgccagagacgagcagggcttcggcggcgccttccccgccagaagcttcagcaccggcagcgacctgggccactgggtgaccaccccccccgacatccccggcagcagaaacctgcactggggcgagaagagccccccctacggcgtgcccaccaccagcaccccctacgagggccccaccgaggagcccttcagcagcggcggcggcggcagcgtgcagggccagagcagcgagcagctgaacagattcgccggcttcggcatcggcctggccagcctgttcaccgagaacgtgctggcccacccctgcatcgtgctgagaagacagtgccaggtgaactaccacgcccagcactaccacctgacccccttcaccgtgatcaacatcatgtacagcttcaacaagacccagggccccagagccctgtggaagggcatgggcagcaccttcatcgtgcagggcgtgaccctgggcgccgagggcatcatcagcgagttcacccccctgcccagagaggtgctgcacaagtggagccccaagcagatcggcgagcacctgctgctgaagagcctgacctacgtggtggccatgcccttctacagcgccagcctgatcgagaccgtgcagagcatgctggacgcctacttccccgagctgatcgccaacttcgccgccagcctgtgcagcgacgtgatcctgtaccccctggagaccgtgctgcacagactgcacatccagggcaccagaaccatcatcgacaacaccgacctgggctacgaggtgctgcccatcaacacccagtacgagggcatgagagactgcatcaacaccatcagacaggaggagggcgtgttcggcttctacaagggcttcggcgccgtgatcatccagtacaccctgcacgccgccgtgctgcagatcaccaagatcatctacagcaccctgctgcagaacaacatctag

SEQ ID NO: 115069 - protein, 272 aa, Artificial Sequence
  derived and/or modified sequence
MYSFNKTQGPRALWKGMGSTFIVQGVTLGAEGIISEFTPLPREVLHKWSPKQIGEHLLLKSLTYVVAMPFYSASLIETVQSEIIRDNTGILECVKEGIGRVIGMGVPHSKRLLPLLSLIFPTVLHGVLHYIISSVIQKFVLLILKRKTYNSHLAESTSPVQSMLDAYFPELIANFAASLCSDVILYPLETVLHRLHIQGTRTIIDNTDLGYEVLPINTQYEGMRDCINTIRQEEGVFGFYKGFGAVIIQYTLHAAVLQITKIIYSTLLQNNI

SEQ ID NO: 115070 - protein, 205 aa, Artificial Sequence
  derived and/or modified sequence
MPFYSASLIETVQSEIIRDNTGILECVKEGIGRVIGMGVPHSKRLLPLLSLIFPTVLHGVLHYIISSVIQKFVLLILKRKTYNSHLAESTSPVQSMLDAYFPELIANFAASLCSDVILYPLETVLHRLHIQGTRTIIDNTDLGYEVLPINTQYEGMRDCINTIRQEEGVFGFYKGFGAVIIQYTLHAAVLQITKIIYSTLLQNNI

SEQ ID NO: 115071 - protein, 327 aa, Artificial Sequence
  derived and/or modified sequence
MKTEQLNRFAGFGIGLASLFTENVLAHPCIVLRRQCQVNYHAQHYHLTPFTVINIMYSFNKTQGPRALWKGMGSTFIVQGVTLGAEGIISEFTPLPREVLHKWSPKQIGEHLLLKSLTYVVAMPFYSASLIETVQSEIIRDNTGILECVKEGIGRVIGMGVPHSKRLLPLLSLIFPTVLHGVLHYIISSVIQKFVLLILKRKTYNSHLAESTSPVQSMLDAYFPELIANFAASLCSDVILYPLETVLHRLHIQGTRTIIDNTDLGYEVLPINTQYEGMRDCINTIRQEEGVFGFYKGFGAVIIQYTLHAAVLQITKIIYSTLLQNNI

SEQ ID NO: 115072 - protein, 256 aa, Artificial Sequence
  derived and/or modified sequence
MGSTFIVQGVTLGAEGIISEFTPLPREVLHKWSPKQIGEHLLLKSLTYVVAMPFYSASLIETVQSEIIRDNTGILECVKEGIGRVIGMGVPHSKRLLPLLSLIFPTVLHGVLHYIISSVIQKFVLLILKRKTYNSHLAESTSPVQSMLDAYFPELIANFAASLCSDVILYPLETVLHRLHIQGTRTIIDNTDLGYEVLPINTQYEGMRDCINTIRQEEGVFGFYKGFGAVIIQYTLHAAVLQITKIIYSTLLQNNI

SEQ ID NO: 115073 - DNA, 819 bp, Artificial Sequence
  derived and/or modified sequence
atgtattcgtttaataagacacagggccctagggccttatggaaaggcatgggctcaacatttatagtccaaggggttacactgggtgctgaggggataatcagcgaattcacccccctgccgcgggaggtattacacaagtggagtcctaagcagattggagagcacctcctgttaaaaagtctgacctacgtggtggcaatgccattctactctgcaagccttatagagactgttcagtctgaaattattcgcgacaacacaggcattctcgagtgcgtcaaggaaggcattggacgggtcatcggcatgggcgtgccacacagcaagagattactccccttactgtcacttatcttccctacggtcctgcacggtgtgctgcactatattattagctccgtcatccagaagtttgtgctgttaattctgaagaggaagacctacaactcccacctagccgaaagtacctcacctgtgcagtctatgttagacgcgtatttccccgaattaattgctaacttcgccgcgagtttatgctctgatgtgattctgtatcctttagaaacagtcctccatagactacacattcaaggtacccgcaccatcattgacaatacagatctgggctacgaagtcctccccattaacacccagtacgagggcatgagggattgcatcaacaccatccggcaggaagaaggcgtctttgggttctataaagggttcggagctgttattatccagtacacattgcacgctgcggtgttgcagataactaaaatcatctacagtaccctgcttcaaaataatatttag

SEQ ID NO: 115074 - DNA, 618 bp, Artificial Sequence
  derived and/or modified sequence
atgccattctacagtgcctccttgatcgagaccgtgcaatcggagattatccgggataacaccgggatcttagagtgcgtgaaggagggaattggacgagttatcggcatgggagtaccccattctaaaaggttgcttcccctgctctccctgatctttccaacggtcctccacggggtgctgcactatattatttcatcggtgattcagaagttcgtattactgatcctgaaaaggaagacatataactcccacctggccgaaagtacaagtccagtccaatcaatgctggatgcttacttcccagagttgatcgcgaatttcgcggccagtctgtgtagtgacgtgatactatatccactggagacggtgctgcatcgtctgcatattcaaggaaccagaacaatcatcgacaatactgacctcggctatgaagtgctgcctatcaacacccagtatgagggtatgcgagattgcataaacaccatccgtcaggaggagggcgtcttcggtttctacaagggctttggagctgtgatcatacagtacacattacacgccgctgtcctccagattaccaagatcatctattccaccctgctgcaaaacaacatatag

SEQ ID NO: 115075 - DNA, 984 bp, Artificial Sequence
  derived and/or modified sequence
atgaagaccgagcagctcaatcgcttcgcaggctttgggatcggactcgcttccttgttcactgaaaatgtcctcgcccacccctgtatcgtgctgagaaggcagtgccaggttaactaccatgcccagcactatcacctgactccttttacagtgattaatatcatgtatagttttaacaagacgcagggacccagagccttgtggaagggcatgggatcaaccttcattgtccagggggtgacgctgggcgccgaaggcatcataagtgaattcaccccactgccgcgggaggtactacacaagtggagccccaaacaaataggagaacatttactgctgaagtctctgacgtatgtggtggcgatgcctttttattcagccagcttgattgagactgttcagtcggaaattatccgggacaataccggcatcttggagtgcgtgaaagaggggatcgggagagtcatcgggatgggcgtgccccattcaaaacggctccttcccttgctgtcgctgatcttccctaccgtgctccatggggtcctgcactatataatttcttcagtcatccagaaatttgtcctcttgattctgaaaaggaagacttacaactctcacctcgccgaatcaacatccccagttcagagcatgttggatgcctatttccccgaactcatagccaacttcgctgcctctctgtgctctgacgtcatcctttaccccctggagactgtgctgcaccggctgcatattcaggggacaagaacaataattgacaatactgatctcggttatgaagtgttgcccatcaatacccagtacgaaggcatgcgggattgcataaacacaatccgccaggaagagggcgtcttcgggttttacaagggattcggagcagtaatcattcaatacactctccacgcagccgtgctccagattacgaaaatcatttactccacactgcttcagaataacatctag

SEQ ID NO: 115076 - DNA, 771 bp, Artificial Sequence
  derived and/or modified sequence
atggggtccactttcattgttcagggtgtaacattaggggccgaaggaatcattagcgagttcaccccactgcctagagaggttcttcataagtggtcacccaagcagattggagagcacctattgctgaaatcattgacctacgttgtagccatgcctttctactcagcatcactgattgagacggtgcagagcgagatcatacgggacaacactggcatcctggaatgcgtcaaagagggcatcggcagggtgatcggtatgggtgtgcctcattccaagcgccttcttcccctgttgagcttgattttccctactgtactccacggcgtactgcattatataatttcgagtgttatccagaaatttgtcctgctgatactgaagcgtaaaacatacaattcacacctagccgaatccaccagtcctgtccaatcgatgttagacgcttatttccccgagctgatcgcaaacttcgctgcatctttgtgttcggacgtgatcttgtatcccctggagacagtgttacaccgcttgcatatccagggcacacggaccattatagacaatacagatctggggtatgaggttctgccgatcaacactcagtatgagggcatgagagattgtattaatactattagacaggaagagggggtgtttggcttttataagggctttggagcagtaatcatccagtatacccttcatgcagctgtgctacagatcacgaagatcatttattctaccttgcttcagaacaacatctag

SEQ ID NO: 115077 - DNA, 819 bp, Artificial Sequence
  derived and/or modified sequence
atgtattcgtttaacaaaacccaaggtccacgcgcgctgtggaaggggatggggtccacttttatcgtccagggagtgacgcttggtgctgaaggcatcattagcgaatttaccccattgccgagagaagtgcttcataagtggagccccaagcagatcggcgaacacctgctcctgaaatccctgacttacgtggtggcaatgccgttctactccgcctccttgatagagaccgtccagtcagaaatcattcgagataacactggcattctggaatgcgtaaaagaggggatcggccgcgtgattggcatgggagtgccacattcgaagcgactgttgcccctcttgtcactcatctttccaaccgtactccatggggtgctacactacattatttcctcagtgattcagaaatttgtacttctgattttaaagcgcaagacctacaacagccacttagctgagagcacttcacccgtgcagagcatgctcgacgcctactttccagagcttatcgctaacttcgctgcatcactgtgctcagatgtaatcctgtatcccctggaaacagtgctgcatcgtctgcatatccaggggacgaggactattattgacaatactgatttaggctacgaggtgctcccaatcaacacccaatatgagggaatgcgcgactgcatcaacacaatcaggcaagaggagggagtgttcggcttctacaaaggctttggagccgtaatcatccaatatactctgcatgccgccgtgctgcaaattaccaagattatctactcaactctcttacagaacaacatttag

SEQ ID NO: 115078 - DNA, 819 bp, Artificial Sequence
  derived and/or modified sequence
atgtacagcttcaacaagacccagggcccccgggccctgtggaagggcatgggcagcaccttcatcgtgcagggcgtgaccctgggcgctgagggcatcatcagcgagttcacccccctgccccgggaggtgctgcacaagtggagccccaagcagattggagagcacctgctgctgaagagcctgacctacgtggtggccatgcccttctacagcgccagcctcatcgagaccgtgcagagcgagatcatccgggacaacacaggcatcctggagtgtgtgaaggagggcatcggccgggtcatcggcatgggcgtgccccacagcaagaggctgctgcccctgctgagcctcatcttccccaccgtgctgcatggagtgctgcactacatcatcagcagcgtcatccagaagtttgtgctgctgatcctgaagaggaagacctacaacagccacctggccgagagcaccagccctgtgcagagcatgctggatgcctacttccctgagctgattgccaactttgctgccagcctgtgcagtgatgtgatcctgtaccccctggagaccgtgctgcaccggctgcacatccagggcaccaggaccatcatcgacaacacagacctgggctatgaggtgctgcccatcaacacccagtatgagggcatgagggactgcatcaacaccatccggcaggaggagggcgtgtttggcttctacaagggctttggagctgtgatcatccagtacaccctgcacgccgctgtgctgcagatcaccaagatcatctacagcaccctgctgcagaacaacatctag

SEQ ID NO: 115079 - DNA, 618 bp, Artificial Sequence
  derived and/or modified sequence
atgcccttctacagcgccagcctgattgaaacagtgcagagcgagatcatccgggacaacacaggcatcctggagtgtgtgaaggagggcatcggccgggtgattggcatgggcgtgccccacagcaagaggctgctgcccctgctgagcctcatcttccccaccgtgctgcacggcgtgctgcactacatcatcagcagcgtcatccagaagtttgtgctgctgatcctgaagaggaagacctacaacagccacctggccgagagcaccagccctgtgcagagcatgctggatgcctacttccctgagctgattgccaactttgctgccagcctgtgcagtgatgtgatcctgtaccccctggagaccgtgctgcaccggctgcacatccagggcaccaggaccatcatcgacaacacagacctgggctatgaggtgctgcccatcaacacccagtatgagggcatgagggactgcatcaacaccatccggcaggaggagggcgtgtttggcttctacaagggctttggagctgtgatcatccagtacaccctgcatgctgctgtgctgcagatcaccaagatcatctacagcaccctgctgcagaacaacatctag

SEQ ID NO: 115080 - DNA, 984 bp, Artificial Sequence
  derived and/or modified sequence
atgaagacagagcagctgaacagatttgctggcttcggcatcggcctggccagcctcttcacagaaaatgtgctggcccacccctgcatcgtgctgcggcggcagtgccaggtgaactaccacgcccagcactaccacctgacccccttcaccgtcatcaacatcatgtacagcttcaacaagacccagggcccccgggccctgtggaagggcatgggcagcaccttcatcgtgcagggcgtgaccctgggcgctgagggcatcatcagcgagttcacccccctgccccgggaggtgctgcacaagtggagccccaagcagatcggggagcacctgctgctgaagagcctgacctacgtggtggccatgcccttctacagcgccagcctgattgaaacagtgcagagcgagatcatccgggacaacacaggcatcctggagtgtgtgaaggagggcatcggccgggtgattggcatgggcgtgccccacagcaagaggctgctgcccctgctgagcctcatcttccccaccgtgctgcacggcgtgctgcactacatcatcagcagcgtcatccagaagtttgtgctgctgatcctgaagaggaagacctacaacagccacctggccgagagcaccagccctgtgcagagcatgctggatgcctacttccctgagctgattgccaactttgctgccagcctgtgcagtgatgtgatcctgtaccccctggagaccgtgctgcaccggctgcacatccagggcaccaggaccatcatcgacaacacagacctgggctatgaggtgctgcccatcaacacccagtatgagggcatgagggactgcatcaacaccatccggcaggaggagggcgtgtttggcttctacaagggctttggagctgtgatcatccagtacaccctgcatgctgctgtgctgcagatcaccaagatcatctacagcaccctgctgcagaacaacatctag

SEQ ID NO: 115081 - DNA, 771 bp, Artificial Sequence
  derived and/or modified sequence
atgggcagcaccttcatcgtgcagggcgtgaccctgggcgctgagggcatcatcagcgagttcacccccctgccccgggaggtgctgcacaagtggagccccaagcagattggagagcacctgctgctgaagagcctgacctacgtggtggccatgcccttctacagcgccagcctcatcgagaccgtgcagagcgagatcatccgggacaacacaggcatcctggagtgtgtgaaggagggcatcggccgggtcatcggcatgggcgtgccccacagcaagaggctgctgcccctgctgagcctcatcttccccaccgtgctgcatggagtgctgcactacatcatcagcagcgtcatccagaagtttgtgctgctgatcctgaagaggaagacctacaacagccacctggccgagagcaccagccctgtgcagagcatgctggatgcctacttccctgagctgattgccaactttgctgccagcctgtgcagtgatgtgatcctgtaccccctggagaccgtgctgcaccggctgcacatccagggcaccaggaccatcatcgacaacacagacctgggctatgaggtgctgcccatcaacacccagtatgagggcatgagggactgcatcaacaccatccggcaggaggagggcgtgtttggcttctacaagggctttggagctgtgatcatccagtacaccctgcacgccgctgtgctgcagatcaccaagatcatctacagcaccctgctgcagaacaacatctag

SEQ ID NO: 115082 - DNA, 819 bp, Artificial Sequence
  derived and/or modified sequence
atgtacagcttcaacaagacccagggcccccgggccctgtggaaggggatgggaagcaccttcatcgtacagggagtcactctgggagccgaaggcataatttcagagtttacaccccttcctagagaagttctccataagtggagtcctaagcaaatcggggagcatctgttactgaaatcactcacctacgtggtggcaatgcccttctattctgcatccctcatcgaaactgtgcagtccgaaattatcagggataacaccgggattctggagtgcgtgaaggagggcattggccgcgtgatcggcatgggcgtgccccactcaaaacgcttattacccttgctgtccttaatctttccgacagtactccatggtgttctacactacatcatctcatccgttatccagaaatttgtgctccttatcttgaaaagaaagacatataacagtcacctcgccgagagcacctcgccagtccagagcatgttggatgcctattttcctgagttgattgccaacttcgctgcctctttgtgcagcgacgtgattctatatcccctggaaaccgtcctgcataggctgcacatccagggaacccgcaccatcatcgataacaccgatctgggatatgaggtcctgccgatcaatactcagtacgaaggcatgcgtgactgcattaatacgattcggcaggaagaaggtgtgtttggcttctataagggatttggagccgtgattatacagtatacacttcacgctgcggtcctccagatcactaaaatcatctattccacgctgttgcaaaacaacatctag

SEQ ID NO: 115083 - DNA, 618 bp, Artificial Sequence
  derived and/or modified sequence
atgcccttctacagcgccagcctgatcgagaccgtgcagagcgagatcattcgggacaatacgggcatattggagtgtgtgaaggagggaatcggaagggtaatcgggatgggcgtgccccactccaagagactactccctttactgtctttgatctttcctaccgtactacacggggtgctacattacataatcagcagcgtgatccagaagttcgtgttactcatactgaagagaaaaacctacaattctcacctggccgagtccaccagccccgttcaatctatgctggacgcctactttcccgaactgatagccaacttcgccgccagcctctgctcagacgttatcctctaccctctggagacagtcctgcatcgccttcacatccaggggacacggacgattatcgataacactgacctcggctacgaagtcctgcccataaacactcaatatgagggtatgagggattgtatcaacacaatacggcaggaggagggagtgttcggattttacaagggttttggcgccgttatcatccagtatacactgcatgccgctgttctgcagataaccaagattatttatagcacacttctgcaaaacaatatctag

SEQ ID NO: 115084 - DNA, 984 bp, Artificial Sequence
  derived and/or modified sequence
atgaagaccgagcagctgaaccggttcgccggcttcggcatcggccttgcctctctgtttaccgagaacgtgctggcccatccatgtattgtacttcggagacagtgtcaagtcaattatcacgcccagcattatcacctgactccttttaccgtcattaatattatgtattccttcaacaaaacccaggggcctcgggctttgtggaagggcatgggaagtacatttatagttcagggtgtcactctgggtgccgagggtattataagcgaattcaccccacttccgagagaggtgctgcacaaatggtcacctaagcagattggcgagcacttactgctgaagagcctgacttacgttgttgctatgccgttttactcagcatccctaatagagaccgtgcaatctgagattatcagggacaatacgggaattcttgagtgtgtcaaggaagggattggacgagtcatcgggatgggggtacctcacagcaagcgtttgctgccactcttatcccttatcttcccaacagtgctgcacggcgtgctccattatataatctctagtgtcatccagaaattcgtgctactaatcctgaagcgtaagacatataactctcacctggctgaatccacctcacctgtgcagtcaatgctggacgcttactttccagagttaatcgcaaactttgcagcctcgctgtgctcagacgtgattctgtatcctctcgagactgtgttacacagactgcacattcaaggaacccgaaccatcattgataacactgatctaggttatgaggtcctgccgattaacactcagtatgaagggatgagagactgtattaacacaattcggcaggaggaaggcgtgttcggattttataagggctttggagcggtgattattcagtacacactccacgcggctgtcctgcagattaccaagattatatactcaacgcttttgcagaataacatatag

SEQ ID NO: 115085 - DNA, 771 bp, Artificial Sequence
  derived and/or modified sequence
atgggcagcaccttcatcgtgcagggcgtgaccctgggcgccgagggaattatcagtgaattcactccactgcccagggaggtgttacataaatggagtcccaagcaaatcggcgaacacctgctcttgaaaagcctgacctatgtggttgcaatgccgttttattccgccagtcttattgaaaccgtccagtccgaaatcatccgagataatactggaattttggagtgcgtgaaagaaggcatcggccgtgttatcggtatgggcgtgccacatagtaagcgcctgctgccactgctatccttgattttccccacggtacttcatggagtccttcattacatcatcagcagcgttattcaaaaatttgtgctcctgatactcaaacgcaaaacttacaattctcatcttgccgagagtacctcccccgtccagtcaatgttggacgcttattttcccgaactgattgccaacttcgcagccagcctgtgctcagatgttatactttatccattggaaactgtgctgcacagactgcatatccaaggaacccggaccatcattgacaacaccgatctcggatatgaagtgctccccatcaatacgcagtatgaagggatgcgggactgtattaacactatcagacaggaggagggcgtgtttgggttctataaaggattcggtgctgtgataatacagtacacactccacgcggccgtccttcagattacaaagattatatattcaaccttgctccagaataatatatag

SEQ ID NO: 115086 - DNA, 819 bp, Artificial Sequence
  derived and/or modified sequence
atgtacagcttcaacaagacccagggcccccgggccctgtggaaggggatgggaagcacgttcattgttcagggagtcacactcggtgctgagggaattattagcgagtttaccccactccccagagaggtgttgcataagtggagtcccaagcagattggagaacatctcctccttaagtctctgacatacgtcgtggctatgcctttctactcggccagccttattgaaacagtacagagcgagataatccgagataacactgggatccttgagtgcgtgaaggaaggcatcggacgggtgatcggcatgggagtacctcattccaagcggctcctgcccttactatccctgatcttccccacagtgcttcacggtgtgctgcactacatcatatcttctgtgatacagaaattcgtgctgctgatcctgaaacggaagacgtacaacagccatctggcagaatccacctctcccgttcagtctatgttggatgcctacttcccagagctgattgccaatttcgccgcctccctttgcagtgacgtcattctttaccctcttgagacagtgttgcatcggctgcacattcagggcacacgcactataattgataacactgacttggggtacgaagtactgcccataaacactcagtatgagggaatgagggactgcatcaatacaataagacaggaggagggcgttttcggcttctataagggctttggggctgtgataatacaatatacccttcatgcggcagtcctgcagattacaaagattatatactccactctgttacagaacaacatatag

SEQ ID NO: 115087 - DNA, 819 bp, Artificial Sequence
  derived and/or modified sequence
atgtactcttttaacaagacccaagggccacgagcgctgtggaagggtatgggatcaacgtttatcgtccagggtgttacgctgggcgctgaagggataatcagtgagttcacccccttaccacgagaggtgcttcataaatggtcgccaaagcagataggcgagcacttgctgcttaagtctctcacctatgtagttgcgatgcccttctactcagccagcttgatcgagacagtgcagtccgagattatacgcgacaataccggcattctggaatgtgtcaaagagggcatagggagggttattggcatgggagtgccacacagcaaaaggttactgcctctgctcagcctgatatttccaaccgtgttgcacggggtcctgcactacattatcagctccgtcatccagaagtttgtgctgctgattctgaagaggaagacctacaatagtcacctggctgagtccacttcaccggttcagtcgatgcttgacgcctactttccagaattgattgcaaacttcgccgcttcgttgtgctccgacgtcattttgtaccctctggagacagtcctgcaccgactccacatccagggcacaaggactatcatcgacaacacggacctcggctacgaagtcctacctatcaacactcagtacgaagggatgcgggactgtataaataccatcaggcaggaggagggcgtgttcgggttttacaaagggttcggagctgtgatcattcagtatacgcttcatgcagcagtgctgcagataaccaagattatctatagcacattactccaaaacaatatctag

SEQ ID NO: 115088 - DNA, 618 bp, Artificial Sequence
  derived and/or modified sequence
atgcctttctacagtgcttctctgatcgagactgtacaatcagaaatcatccgtgataacacaggcattctcgaatgcgttaaagagggaatcggcagagttataggaatgggggttccccatagcaagcgcctccttccgttgcttagcctaatatttccaaccgttctacatggggtgctgcattacatcatttcctccgtgatccagaagttcgtactgttaatcctgaagcggaagacttacaactctcatctcgctgaatccacctcccccgtgcagtccatgctcgacgcttatttccctgaactgattgcaaacttcgccgcatctttgtgctctgatgtgattctgtacccgctcgagactgtgctgcatagattacatattcagggcacgcggactataattgacaacacagatctcggctacgaggtgctacccataaacacccagtatgagggtatgcgcgactgcattaatacgattagacaagaggagggggtgtttggcttctataaaggattcggcgcagtgattatccaatacacgttacatgccgcagttctccaaatcaccaaaatcatctattctactctgctccagaataacatttag

SEQ ID NO: 115089 - DNA, 984 bp, Artificial Sequence
  derived and/or modified sequence
atgaagactgagcaactcaatcgctttgccggtttcggaattggattggcttctctgttcaccgaaaacgtcctggcccatccatgtattgtgctgcggagacagtgccaagtgaactatcacgcacagcattaccatttgactcccttcactgttatcaatatcatgtactcattcaacaaaacacagggaccccgtgccttgtggaaaggaatgggtagtacattcatcgtgcagggtgtgactctgggtgccgagggcattatttctgaattcaccccattgccgagagaggtgctgcacaaatggagccccaaacaaataggtgaacatctattgctgaagagtttaacgtatgtcgtcgcgatgccattttacagcgcaagccttatcgagactgtgcagtctgaaataatccgcgacaatacgggtatcttggagtgcgtaaaggaaggaatcggacgtgtaataggaatgggcgtaccacactccaaacgactcctgcctttgctgtctctcatttttccaactgtgctgcacggggtcctgcactacatcatctcgtcagtgatacagaagttcgtgctgctcatcctgaaacggaaaacatataattcacacctggccgagtccacatctcccgtccaaagcatgttggatgcctatttccctgaactcattgccaacttcgccgcatctttgtgttccgatgtgatcctgtaccccctagaaactgtactccaccgcctgcacatccagggcacccgaacaatcattgacaataccgacttgggttatgaagtgctgcctatcaacacacagtatgagggtatgcgggactgcattaacaccattagacaggaggagggtgtgttcggcttttacaaagggttcggagccgttatcatccagtacaccctgcacgctgccgtccttcagataaccaagatcatttactctaccctgctgcaaaataacatctag

SEQ ID NO: 115090 - DNA, 771 bp, Artificial Sequence
  derived and/or modified sequence
atgggctccaccttcatcgtgcagggcgtaacgctgggcgcagagggtatcatttccgaatttacccctctgccccgagaggtgctgcacaaatggtccccaaagcaaataggcgagcatttgcttctgaagtcgctcacttatgtagtcgcaatgcccttctatagtgcatccctgatagagactgtgcaaagcgagatcatccgcgacaatacgggaatcctagagtgtgtgaaggagggcatcggacgggtgattggcatgggagtacctcactctaagagattgttgcctctcttatcgctcattttccccacggtgttacatggcgtcctccactatatcatctcctccgtcatccagaaatttgtgctgctgatcctgaaacgcaaaacctacaattctcatcttgcagagagtacctctcctgtgcagagtatgctggatgcttacttcccagagcttattgcaaatttcgcagctagcttgtgctccgatgtgatactttacccgctagaaacagtgctgcatcgtttgcacattcagggcacgaggaccataatcgataacactgatctgggctatgaggttctgcctatcaatacacaatacgaaggaatgcgcgactgcatcaataccattcggcaggaagagggagtgttcggtttttacaagggttttggagccgtcataattcagtatacccttcatgccgcagttctgcagattacaaagatcatctattcaacgctgttacagaacaacatctag

SEQ ID NO: 115091 - DNA, 819 bp, Artificial Sequence
  derived and/or modified sequence
atgtactccttcaataagacacagggacccagagcgctctggaagggcatggggtctactttcatcgtgcagggggtgacattgggagccgagggcatcattagtgagtttacacctctgccacgtgaagtgctgcacaaatggtcccctaagcagattggtgagcacctgctcctcaagtccttaacctacgtggtcgcaatgccattctattctgccagcctcatcgagacagtacagagcgagattatacgcgacaatactggtattctcgagtgcgtgaaggaaggtatcggcagagtgatcggcatgggcgttccccatagcaaacgtctgctccccctgcttagcctgatatttcctacagtattgcatggagtcctgcactatataatttcttcagttatccaaaagtttgtgctgttgatcttaaaaaggaagacctacaattcccatttggccgagtcgacgtcccctgtgcagtccatgctggatgcttattttcctgaactcattgcgaatttcgctgcttctctgtgtagtgatgtgatcctgtacccccttgagacagtcctgcatcgcctgcacatccagggcacccgaaccatcatcgacaacacggacttaggctacgaagtgctgccaattaacacccagtacgagggaatgcgagattgtatcaacacgatccgacaggaggaaggggtgttcgggttttataagggattcggagcagtgataattcagtatacactccatgcagctgtcctccagataacaaagattatctattcaacactgctgcaaaacaacatctag

SEQ ID NO: 115092 - DNA, 2345 bp, Artificial Sequence
  derived and/or modified sequence
acagtttttgaaatagttgtccaggactttaaaattggaagcttttatataaaatgagaatatctttttttgaaaaaattacaacttcaaaaccctgggcccacactctaatgtggcaacaatgaattggagtgaaagcgtaattgtgctttaaacactctacaccttgcaatttgccacagaccccagcagagtccttcattcatttaaattatttacctggcccctatcagaatttgactttgaggtttaaatgaacagcaggttaataaaataaattttttaaaattgttttgagactaaacctaaattgtcagtaattggttatcagtaatcttatttttttatttctatttttttttactttagaacagctgaatagatttgctggatttggtattggacttgcaagtctctttacagaaaatgtattggcacatccttgcattgttctacgccgccaatgtcaggttaattaccatgctcagcattaccatctcactccatttacagtcatcaatattatgtacagtttcaacaaaactcagggacctagagccctgtggaaaggaatgggaagtacatttattgtccagggagtcacacttggagcagaaggcataattagtgaatttacacctttgccaagggaggttttacataaatggagtcctaaacaaataggagaacaccttctactgaaatccctaacttacgtggtggcaatgcctttttattcagcaagtctgattgaaacagtgcagagtgagataattcgagataatactggcattttggagtgtgttaaagaaggaattggaagagtgataggcatgggagtgcctcatagcaaacgacttcttccgcttctttccttgatcttccctacggtgcttcatggagttcttcattacatcatcagctcagttattcagaagtttgtcctactaattctaaagagaaagacttacaatagccacctagctgagagcactagccctgtgcagagtatgttggatgcttattttccagaacttattgctaactttgctgccagtctttgttctgacgttatactttacccattggaaacagttttgcaccgccttcacattcaaggaacacgcacaataattgacaatacagaccttggctatgaagtgcttccaattaatacacaatatgagggaatgagagactgtatcaataccataaggcaggaggaaggagtgtttggtttttataaagggtttggtgctgttataatacagtacacactgcatgcagctgttttacagattaccaaaattatttactctacacttcttcaaaataacatttgagatttaggttccttcactgagtagtctggaagatataatctggataatttgctatgaagttatgagggatacaagtgaaatactggggaagaaaatggattggaaagtaaaattggtactaaagcccatactgattatcttgactttgttttttaaggcataggtatatattttggatcaaaatccttccaaatttgaaaactcaataaaaataacacttattaaattctagttagtgtagcactcatgctgaagtaaacatgatcgtaggcagaagcaaaattttattataaaatctaaaacaaaactttatagagttgaatctattccatctgacttcaatatttgccaaacgtttattttacctcctagattgatgttggtatagtatccttaatacagtgtagtatattaatgtccttaatacaatcaggaggtttttacctttaagcaaataaattatgtcattattgaaaaagacttaagggatgattagacttggcaatctgtaagcaggagtataaatgttttaaattgcattgtccctatgtaactatcttaatggctatatatatgtattttataaagccatttatgtatacacatgtaacttggaatttccttcatccctacacattttctacacttacatcaccttattgcataaaacaaagtcacgcgctttctgcttgaacatcaaaatatcaaaaaccaaggtacccaaaagatacaagtcagagacaacatccttgtccatatccaaacccagtgtttcagtgctagcaacttaatttctcatacatttatagagtttggtttgctttgctagttgtgtgaatcattgggctgtttttagagccactgttaagagagaatataaaataatcatgacaattactactgtttccacatttacaaattgtgtacttaaatgaacctcatttcccttttatttctgaatggcttgtctgagaggaaacaaaattaaaattcatctgggaa

SEQ ID NO: 115093 - DNA, 1596 bp, Artificial Sequence
  derived and/or modified sequence
ttttaatcctgttctttgtttccatatctattctctttcttttaaccaatcatcttaattttcttcctttaatttctcatgtttactttcataatcagttgtgcctcttgcttctctgccagccccttctatcagcacgtatgaaaacaccttgtatttttttctctcaaaccatcacagttgtttacactgtgttctagaaaagaaaatgttcaccattagaatatatttctcctacagattgaaaaaaattagaagttgattactgttttgaaaattgggctaattccagatgttttaaataacatggcttttgttttatttaagtttatttttatgttttagggaggttttacataaatggagtcctaaacaaataggagaacaccttctactgaaatcattgtgaattggaaatcccccagcttgctggctccctcagtgggacattccagcacattattacttagtgatgttccattcaccttgaaaaccactacttgccaggacctggcccataagggttagcctaacttacgtggtggcaatgcctttttattcagcaagtctgattgaaacagtgcagagtgagataattcgagataatactggcattttggagtgtgttaaagaaggaattggaagagtgataggcatgggagtgcctcatagcaaacgacttcttccgcttctttccttgatcttccctacggtgcttcatggagttcttcattacatcatcagctcagttattcagaagtttgtcctactaattctaaagagaaagacttacaatagccacctagctgagagcactagccctgtgcagagtatgttggatgcttattttccagaacttattgctaactttgctgccagtctttgttctgacgttatactttacccattggaaacagttttgcaccgccttcacattcaaggaacacgcacaataattgacaatacagaccttggctatgaagtgcttccaattaatacacaatatgagggaatgagagactgtatcaataccataaggcaggaggaaggagtgtttggtttttataaagggtttggtgctgttataatacagtacacactgcatgcagctgttttacagattaccaaaattatttactctacacttcttcaaaataacatttgagatttaggttccttcactgagtagtctggaagatataatctggataatttgctatgaagttatgagggatacaagtgaaatactggggaagaaaatggattggaaagtaaaattggtactaaagcccatactgattatcttgactttgttttttaaggcataggtatatattttggatcaaaatccttccaaatttgaaaactcaataaaaataacacttattaaattctagttagtgtagcactcatgctgaagtaaacatgatcgtaggcagaagcaaaattttattataaaatctaaaacaaaactttatagagttgaatctattccatctgacttcaatatttgccaaacgtttattttacctcctagattgatgttggtatagtatccttaatacagtgtagtatattaatgtccttaatacaatc

SEQ ID NO: 115094 - DNA, 1534 bp, Artificial Sequence
  derived and/or modified sequence
gaaggaacataggatgaaaccatggaagtcttcctcagatctggggagggagcctggcccaagagcccgtggagctaatgaaaacagaacagctgaatagatttgctggatttggtattggacttgcaagtctctttacagaaaatgtattggcacatccttgcattgttctacgccgccaatgtcaggttaattaccatgctcagcattaccatctcactccatttacagtcatcaatattatgtacagtttcaacaaaactcagggacctagagccctgtggaaaggaatgggaagtacatttattgtccagggagtcacacttggagcagaaggcataattagtgaatttacacctttgccaagggaggttttacataaatggagtcctaaacaaataggagaacaccttctactgaaatccctaacttacgtggtggcaatgcctttttattcagcaagtctgattgaaacagtgcagagtgagataattcgagataatactggcattttggagtgtgttaaagaaggaattggaagagtgataggcatgggagtgcctcatagcaaacgacttcttccgcttctttccttgatcttccctacggtgcttcatggagttcttcattacatcatcagctcagttattcagaagtttgtcctactaattctaaagagaaagacttacaatagccacctagctgagagcactagccctgtgcagagtatgttggatgcttattttccagaacttattgctaactttgctgccagtctttgttctgacgttatactttacccattggaaacagttttgcaccgccttcacattcaaggaacacgcacaataattgacaatacagaccttggctatgaagtgcttccaattaatacacaatatgagggaatgagagactgtatcaataccataaggcaggaggaaggagtgtttggtttttataaagggtttggtgctgttataatacagtacacactgcatgcagctgttttacagattaccaaaattatttactctacacttcttcaaaataacatttgagatttaggttccttcactgagtagtctggaagatataatctggataatttgctatgaagttatgagggatacaagtgaaatactggggaagaaaatggattggaaagtaaaattggtactaaagcccatactgattatcttgactttgttttttaaggcataggtatatattttggatcaaaatccttccaaatttgaaaactcaataaaaataacacttattaaattctagttagtgtagcactcatgctgaagtaaacatgatcgtaggcagaagcaaaattttattataaaatctaaaacaaaactttatagagttgaatctattccatctgacttcaatatttgccaaacgtttattttacctcctagattgatgttggtatagtatccttaatacagtgtagtatattaatgtccttaatacaatcaggaggtttttacctttaagcaaataaattatgtcattattg

SEQ ID NO: 115095 - DNA, 1546 bp, Artificial Sequence
  derived and/or modified sequence
gaaggaacataggatgaaaccatggaagtcttcctcagatctggggagggagcctggcccaagagcccgtggagctaatgaaaacagaacagctgaatagatttgctggatttggtattggacttgcaagtctctttacagaaaatgtattggcacatccttgcattgttctacgccgccaatgtcaggttaattaccatgctcagcattaccatctcactccatttacagtcatcaatattatgtacagtttcaacaaaactcagggacctagagccctgtggaaaggaatgggaagtacatttattgtccagggagtcacacttggagcagaaggcataattagtgaatttacacctttgccaagggaggttttacataaatggagtcctaaacaaataggagaacaccttctactgaaatccctaacttacgtggtggcaatgcctttttattcagcaagtctgattgaaacagtgcagagtgagataattcgagataatactggcattttggagtgtgttaaagaaggaattggaagagtgataggcatgggagtgcctcatagcaaacgacttcttccgcttctttccttgatcttccctacggtgcttcatggagttcttcattacatcatcagctcagttattcagaagtttgtcctactaattctaaagagaaagacttacaatagccacctagctgagagcactagccctgtgcagagtatgttggatgcttattttccagaacttattgctaactttgctgccagtctttgttctgacgttatactttacccattggaaacagttttgcaccgccttcacattcaaggaacacgcacaataattgacaatacagaccttggctatgaagtgcttccaattaatacacaatatgagggaatgagagactgtatcaataccataaggcaggaggaaggagtgtttggtttttataaagggtttggtgctgttataatacagtacacactgcatgcagctgttttacagattaccaaaattatttactctacacttcttcaaaataacatttgagatttaggttccttcactgagtagtctggaagatataatctggataatttgctatgaagttatgagggatacaagtgaaatactggggaagaaaatggattggaaagtaaaattggtactaaagcccatactgattatcttgactttgttttttaaggcataggtatatattttggatcaaaatccttccaaatttgaaaactcaataaaaataacacttattaaattctagttagtgtagcactcatgctgaagtaaacatgatcgtaggcagaagcaaaattttattataaaatctaaaacaaaactttatagagttgaatctattccatctgacttcaatatttgccaaacgtttattttacctcctagattgatgttggtatagtatccttaatacagtgtagtatattaatgtccttaatacaatcaggaggtttttacctttaagcaaataaattatgtcattattgaaaaagacttaa

SEQ ID NO: 115096 - DNA, 819 bp, Artificial Sequence
  derived and/or modified sequence
atgtacagcttcaacaagacccagggccccagagccctgtggaagggcatgggcagcaccttcatcgtgcagggcgtgaccctgggcgccgagggcatcatcagcgagttcacccccctgcccagagaggtgctgcacaagtggagccccaagcagatcggcgagcacctgctgctgaagagcctgacctacgtggtggccatgcccttctacagcgccagcctgatcgagaccgtgcagagcgagatcatcagagacaacaccggcatcctggagtgcgtgaaggagggcatcggcagagtgatcggcatgggcgtgccccacagcaagagactgctgcccctgctgagcctgatcttccccaccgtgctgcacggcgtgctgcactacatcatcagcagcgtgatccagaagttcgtgctgctgatcctgaagagaaagacctacaacagccacctggccgagagcaccagccccgtgcagagcatgctggacgcctacttccccgagctgatcgccaacttcgccgccagcctgtgcagcgacgtgatcctgtaccccctggagaccgtgctgcacagactgcacatccagggcaccagaaccatcatcgacaacaccgacctgggctacgaggtgctgcccatcaacacccagtacgagggcatgagagactgcatcaacaccatcagacaggaggagggcgtgttcggcttctacaagggcttcggcgccgtgatcatccagtacaccctgcacgccgccgtgctgcagatcaccaagatcatctacagcaccctgctgcagaacaacatctag

SEQ ID NO: 115097 - DNA, 618 bp, Artificial Sequence
  derived and/or modified sequence
atgcccttctacagcgccagcctgatcgagaccgtgcagagcgagatcatcagagacaacaccggcatcctggagtgcgtgaaggagggcatcggcagagtgatcggcatgggcgtgccccacagcaagagactgctgcccctgctgagcctgatcttccccaccgtgctgcacggcgtgctgcactacatcatcagcagcgtgatccagaagttcgtgctgctgatcctgaagagaaagacctacaacagccacctggccgagagcaccagccccgtgcagagcatgctggacgcctacttccccgagctgatcgccaacttcgccgccagcctgtgcagcgacgtgatcctgtaccccctggagaccgtgctgcacagactgcacatccagggcaccagaaccatcatcgacaacaccgacctgggctacgaggtgctgcccatcaacacccagtacgagggcatgagagactgcatcaacaccatcagacaggaggagggcgtgttcggcttctacaagggcttcggcgccgtgatcatccagtacaccctgcacgccgccgtgctgcagatcaccaagatcatctacagcaccctgctgcagaacaacatctag

SEQ ID NO: 115098 - DNA, 984 bp, Artificial Sequence
  derived and/or modified sequence
atgaagaccgagcagctgaacagattcgccggcttcggcatcggcctggccagcctgttcaccgagaacgtgctggcccacccctgcatcgtgctgagaagacagtgccaggtgaactaccacgcccagcactaccacctgacccccttcaccgtgatcaacatcatgtacagcttcaacaagacccagggccccagagccctgtggaagggcatgggcagcaccttcatcgtgcagggcgtgaccctgggcgccgagggcatcatcagcgagttcacccccctgcccagagaggtgctgcacaagtggagccccaagcagatcggcgagcacctgctgctgaagagcctgacctacgtggtggccatgcccttctacagcgccagcctgatcgagaccgtgcagagcgagatcatcagagacaacaccggcatcctggagtgcgtgaaggagggcatcggcagagtgatcggcatgggcgtgccccacagcaagagactgctgcccctgctgagcctgatcttccccaccgtgctgcacggcgtgctgcactacatcatcagcagcgtgatccagaagttcgtgctgctgatcctgaagagaaagacctacaacagccacctggccgagagcaccagccccgtgcagagcatgctggacgcctacttccccgagctgatcgccaacttcgccgccagcctgtgcagcgacgtgatcctgtaccccctggagaccgtgctgcacagactgcacatccagggcaccagaaccatcatcgacaacaccgacctgggctacgaggtgctgcccatcaacacccagtacgagggcatgagagactgcatcaacaccatcagacaggaggagggcgtgttcggcttctacaagggcttcggcgccgtgatcatccagtacaccctgcacgccgccgtgctgcagatcaccaagatcatctacagcaccctgctgcagaacaacatctag

SEQ ID NO: 115099 - DNA, 771 bp, Artificial Sequence
  derived and/or modified sequence
atgggcagcaccttcatcgtgcagggcgtgaccctgggcgccgagggcatcatcagcgagttcacccccctgcccagagaggtgctgcacaagtggagccccaagcagatcggcgagcacctgctgctgaagagcctgacctacgtggtggccatgcccttctacagcgccagcctgatcgagaccgtgcagagcgagatcatcagagacaacaccggcatcctggagtgcgtgaaggagggcatcggcagagtgatcggcatgggcgtgccccacagcaagagactgctgcccctgctgagcctgatcttccccaccgtgctgcacggcgtgctgcactacatcatcagcagcgtgatccagaagttcgtgctgctgatcctgaagagaaagacctacaacagccacctggccgagagcaccagccccgtgcagagcatgctggacgcctacttccccgagctgatcgccaacttcgccgccagcctgtgcagcgacgtgatcctgtaccccctggagaccgtgctgcacagactgcacatccagggcaccagaaccatcatcgacaacaccgacctgggctacgaggtgctgcccatcaacacccagtacgagggcatgagagactgcatcaacaccatcagacaggaggagggcgtgttcggcttctacaagggcttcggcgccgtgatcatccagtacaccctgcacgccgccgtgctgcagatcaccaagatcatctacagcaccctgctgcagaacaacatctag

SEQ ID NO: 115100 - protein, 357 aa, Artificial Sequence
  derived and/or modified sequence
MSSPPPARSGFYRQEVTKTAWEVRAVYRDLQPVGSGAYGAVCSAVDGRTGAKVAIKKLYRPFQSELFAKRAYRELRLLKHMRHENVIGLLDVFTPDETLDDFTDFYLVMPFMGTDLGKLMKHEKLGEDRIQFLVYQMLKGLRDLKPGNLAVNEDCELKILDFGLARQADSEMTGYVVTRWYRAPEVILNWMRYTQTVDIWSVGCIMAEMITGKTLFKGSDHLDQLKEIMKVTGTPPAEFVQRLQSDEAKNYMKGLPELEKKDFASILTNASPLAVNLLEKMLVLDAEQRVTAGEALAHPYFESLHDTEDEPQVQKYDDSFDDVDRTLDEWKRVTYKEVLSFKPPRQLGARVSKETPL

SEQ ID NO: 115101 - DNA, 1074 bp, Artificial Sequence
  derived and/or modified sequence
atgagcagccccccccccgccagaagcggcttctacagacaggaggtgaccaagaccgcctgggaggtgagagccgtgtacagagacctgcagcccgtgggcagcggcgcctacggcgccgtgtgcagcgccgtggacggcagaaccggcgccaaggtggccatcaagaagctgtacagacccttccagagcgagctgttcgccaagagagcctacagagagctgagactgctgaagcacatgagacacgagaacgtgatcggcctgctggacgtgttcacccccgacgagaccctggacgacttcaccgacttctacctggtgatgcccttcatgggcaccgacctgggcaagctgatgaagcacgagaagctgggcgaggacagaatccagttcctggtgtaccagatgctgaagggcctgagagacctgaagcccggcaacctggccgtgaacgaggactgcgagctgaagatcctggacttcggcctggccagacaggccgacagcgagatgaccggctacgtggtgaccagatggtacagagcccccgaggtgatcctgaactggatgagatacacccagaccgtggacatctggagcgtgggctgcatcatggccgagatgatcaccggcaagaccctgttcaagggcagcgaccacctggaccagctgaaggagatcatgaaggtgaccggcaccccccccgccgagttcgtgcagagactgcagagcgacgaggccaagaactacatgaagggcctgcccgagctggagaagaaggacttcgccagcatcctgaccaacgccagccccctggccgtgaacctgctggagaagatgctggtgctggacgccgagcagagagtgaccgccggcgaggccctggcccacccctacttcgagagcctgcacgacaccgaggacgagccccaggtgcagaagtacgacgacagcttcgacgacgtggacagaaccctggacgagtggaagagagtgacctacaaggaggtgctgagcttcaagccccccagacagctgggcgccagagtgagcaaggagacccccctgtag

SEQ ID NO: 115102 - DNA, 1074 bp, Artificial Sequence
  derived and/or modified sequence
atgtcttcccccccccccgctagatccggcttttatcgacaggaagtgacaaagacagcctgggaggttcgggctgtgtatagagatctgcagcctgtaggctccggggcctacggcgcagtgtgctccgcggtggatggacggaccggggccaaggtggccattaagaagctgtatcggccattccagagcgagctgttcgccaagcgggcgtatcgggagctgaggttgttgaagcacatgaggcatgaaaacgtcatcgggctgctcgacgtgtttacaccagatgagactctcgacgatttcaccgacttttatctggtgatgcctttcatgggcacagacttgggcaagctgatgaagcatgagaagctcggcgaggaccggatccagtttcttgtgtatcagatgctaaaagggttacgtgatttgaaaccgggcaacctggcggtcaatgaggactgcgagttaaagatcttggattttggtttggcccggcaggccgatagtgagatgaccggctatgtagttactaggtggtacagagccccagaggtgatcctgaactggatgaggtacacacaaaccgtggacatctggagcgtcggctgcatcatggctgagatgatcaccgggaaaacactgttcaaggggtctgatcatctagaccagttaaaggagatcatgaaggttactggtaccccccccgccgagtttgtgcaacgcctccagtctgacgaggccaagaattatatgaaaggcctcccagaactcgaaaagaaagacttcgccagcatcctaaccaacgcttcccctttggctgtcaacctgttggaaaagatgctggtactggacgcggagcaacgtgtaaccgccggcgaagcgttggctcacccgtatttcgagtccttgcatgacacagaggatgaacctcaagtccagaagtatgacgactcttttgatgatgtcgatagaactctcgacgagtggaagcgagtaacgtacaaggaagtcttatctttcaagcccccaagacaactgggagcccgtgtgtctaaggaaacaccactgtag

SEQ ID NO: 115103 - DNA, 1074 bp, Artificial Sequence
  derived and/or modified sequence
atgagcagccccccaccagcccggagcggcttctaccggcaggaggtgaccaagacagcctgggaggtgcgggctgtgtacagagacctgcagcctgtgggcagcggggcctacggggctgtgtgcagcgctgtggatggccgcactggagccaaggtggccatcaagaagctgtaccggcccttccagagcgagctgtttgccaagagggcctaccgggagctgcggctgctgaagcacatgagacatgaaaatgtgattggcctgctggatgtgttcaccccagatgagaccctggatgacttcacagacttctacctggtgatgcccttcatgggcacagacctgggcaagctgatgaagcatgagaagctgggagaagatcgcatccagttcctggtgtaccagatgctgaagggcctgcgggacctgaagccaggcaacctggccgtgaatgaagactgtgagctgaagatcctggactttggcctggcccggcaggccgacagcgagatgacaggctacgtggtgacccgctggtaccgggcccctgaggtgatcctgaactggatgagatacacccagacagtggacatctggagcgtgggctgcatcatggccgagatgatcaccgggaagaccctcttcaagggcagtgaccacctggaccagctgaaggagatcatgaaggtgacaggcaccccacctgctgagtttgtgcagaggctgcagagtgatgaggccaagaactacatgaagggcctgcctgagctggagaagaaggactttgccagcatcctgaccaatgccagccccctggccgtgaacctgctggagaagatgctggtgctggatgctgagcagagggtgacagctggggaggccctggcccacccctactttgagagcctgcatgacacagaagatgagccccaggtgcagaagtatgatgacagctttgatgatgtggacaggaccctggatgagtggaagagggtgacctacaaggaggtgctgtccttcaagccaccccggcagctgggcgcccgggtgtccaaggagacccccctgtag

SEQ ID NO: 115104 - DNA, 1724 bp, Artificial Sequence
  derived and/or modified sequence
gggagcgggagcgccccagcggccggcgggcgggcgggcgagcggacgagcggcgcggagccggcccgaggcgcgcgccgagggagccccgtccccggtcgtgggggcaccgcccgcaggctctgcggggtgggcagctcccgggcctgccatgagctctccgccgcccgcccgcagtggcttttaccgccaggaggtgaccaagacggcctgggaggtgcgcgccgtgtaccgggacctgcagcccgtgggctcgggcgcctacggcgcggtgtgctcggccgtggacggccgcaccggcgctaaggtggccatcaagaagctgtatcggcctttccagtccgagctgttcgccaagcgcgcctaccgcgagctgcgcctgctcaagcacatgcgccacgagaacgtgatcgggctgctggacgtattcactcctgatgagaccctggatgacttcacggacttttacctggtgatgccgttcatgggcaccgacctgggcaagctcatgaaacatgagaagctaggcgaggaccggatccagttcctcgtgtaccagatgctgaaggggctgagggacctgaagcccggcaacctggctgtgaacgaagactgtgagctgaagatcctggacttcggcctggccaggcaggcagacagtgagatgactgggtacgtggtgacccggtggtaccgggctcccgaggtcatcttgaattggatgcgctacacgcagacggtggacatctggtctgtgggctgcatcatggcggagatgatcacaggcaagacgctgttcaagggcagcgaccacctggaccagctgaaggagatcatgaaggtgacggggacgcctccggctgagtttgtgcagcggctgcagagcgatgaggccaagaactacatgaagggcctccccgaattggagaagaaggattttgcctctatcctgaccaatgcaagccctctggctgtgaacctcctggagaagatgctggtgctggacgcggagcagcgggtgacggcaggcgaggcgctggcccatccctacttcgagtccctgcacgacacggaagatgagccccaggtccagaagtatgatgactcctttgacgacgttgaccgcacactggatgaatggaagcgtgttacttacaaagaggtgctcagcttcaagcctccccggcagctgggggccagggtctccaaggagacgcctctgtgaagatctctgggctccggggtggcagtgaggaccaccttcaccttccacctgagaggggactctcgttgccaccttgaccttggctggggcttgcatcccaaggcatccatcagagcagacgcccgggttccatggaccctcctccccacggccatgcctctgctcttgggcgcccatcatggaggagcacctgaactttctggacaagacctctggccgacctggggatggcctctgatccctggagcagtggcccacttgcccggtgctctcagaaacctcagagctggtggggctccagatcaggccttggcctctgagccctgcctgctctgggccatgcagaggaaggacagagggtgggcgcagggcaccaactcagggacatcccctctcctgggcgacgtcagtggaccttcctgcacccccagcctggaatgtaaatcagctgtgtggtgcccgcgtggctggaaggaaatagacccttttgtagctccct

SEQ ID NO: 115105 - DNA, 1074 bp, Artificial Sequence
  derived and/or modified sequence
atgagcagccccccccccgcccggagcggcttctaccggcaggaggtgactaagacggcctgggaggtgcgggctgtgtacagagatttacaacctgtgggaagtggcgcctatggtgcagtgtgcagcgctgtcgatggcagaacgggagcaaaggtggctataaagaagctgtaccggccgttccagagcgaattgtttgcgaagcgcgcttatcgggaacttcgcttgttaaaacatatgcggcacgagaacgtcatcggactccttgacgtgttcacccccgacgaaaccctcgacgactttaccgacttctaccttgtcatgccattcatgggtacggacctgggcaagctaatgaaacatgaaaagctgggcgaggataggatccagtttctggtataccagatgctgaaaggtttgcgggatctaaagcccggaaaccttgccgtcaatgaggattgcgagctgaaaattcttgatttcggcctcgctcggcaggccgacagtgagatgaccggatatgtcgtgacacggtggtatagggcacctgaagtgatcctgaattggatgagatacacccagaccgtagacatttggtctgttgggtgtatcatggccgaaatgatcacaggcaaaactctgttcaagggcagcgaccacctggaccagctgaaagaaataatgaaagtcacaggaacaccgccggcagagttcgtgcaacgtctgcagtctgatgaggccaaaaactacatgaaaggtctccctgaactggagaaaaaagatttcgcttctatcttaacaaacgcgtctcctttggctgtgaacctgctggagaagatgctagtcctggatgctgaacagagagtgacagctggtgaggccctagcacacccctactttgagtccttgcatgataccgaggacgagccgcaggtgcaaaaatacgacgactcattcgacgatgttgaccgaactttggacgagtggaaaagagtgacctacaaggaagtactgtcctttaaaccaccccgccagctaggcgcccgtgtctctaaggagacgcccctgtag

SEQ ID NO: 115106 - DNA, 1074 bp, Artificial Sequence
  derived and/or modified sequence
atgtcatccccccctcctgctcggagcgggttctaccggcaggaagtgaccaagacggcatgggaagtccgagctgtctatcgggatctacagcctgtaggcagtggcgcttacggggctgtttgctctgccgtcgacggtcgaaccggggcaaaggtggctataaagaaactctatcggccattccagtcagaattatttgcaaagagggcctacagggagctccgtttgctgaaacacatgagacatgaaaatgttatcgggctgttagatgtatttacccctgacgaaacactagatgattttacggatttctatcttgtcatgcctttcatggggaccgacctcggaaagttgatgaaacatgagaagctgggcgaggatcgtattcagtttctcgtctatcaaatgctgaagggccttagagatctcaagcccggaaacctggcggttaatgaggactgtgagctgaagatactggatttcgggttagctcgtcaagctgactccgagatgaccgggtatgtcgtgacaaggtggtaccgggctcccgaggttattcttaattggatgcgatatacccaaactgtggatatttggtccgtgggatgtattatggccgagatgatcacaggcaaaactctttttaaggggagcgaccatttggatcagttgaaggagattatgaaagttaccgggacccctcctgcagagtttgttcagcggcttcagtcagacgaggccaagaactacatgaaaggtcttccagagttagaaaagaaagattttgcctccatcctcactaacgctagccccttggccgtgaaccttctggagaaaatgctggttttagacgctgaacagagagtaaccgcgggtgaagctttggcacatccctatttcgagagcctccacgacactgaggatgaacctcaggtgcagaaatatgatgacagtttcgatgatgttgaccgcacactcgatgagtggaaaagagttacctataaggaagtgttgtctttcaaacctccaagacagcttggagcacgggttagtaaagagactccgctgtag

SEQ ID NO: 115107 - protein, 426 aa, Artificial Sequence
  derived and/or modified sequence
MGSHPVLRIWGNRRATAASLGRSGGRLSSPRLLRVVAPTLTFAQTSRCSFNGALAAVPVQDLGSTVIKEVLKRATVAPEDVSEVIFGHVLAAGCGQNPVRQASVGAGIPYSVPAWSCQMICGSGLKAVCLAVQSIGIGDSSIVVAGGMENMSKAPHLAYLRTGVKIGEMPLTDSILCDGLTDAFHNCHMGITAENVAKKWQVSREDQDKVAVLSQNRTENAQKAGHFDKEIVPVLVSTRKGLIEVKTDEFPRHGSNIEAMSKLKPYFLTDGTGTVTPANASGINDGAAAVVLMKKSEADKRGLTPLARIVSWSQVGVEPSIMGIGPIPAIKQAVTKAGWSLEDVDIFEINEAFAAVSAAIVKELGLNPEKVNIEGGAIALGHPLGASGCRILVTLLHTLERMGRSRGVAALCIGGGMGIAMCVQRE

SEQ ID NO: 115108 - DNA, 1281 bp, Artificial Sequence
  derived and/or modified sequence
atgggcagccatccagtgctccgcatttgggggaaccgtagagcaaccgctgcgtccctgggccgctcaggcgggcgactgagctccccacgtctgctgagagttgtcgcccccaccttgacttttgcccaaactagccgttgtagctttaacggcgccttagctgcagtgccggtgcaggacctcgggtcgaccgtgatcaaggaggtgctgaaacgcgcaaccgtagcccctgaagacgttagcgaggtgatatttggccacgtgttagcagcaggatgcggacagaatccagtacggcaggcctcagtgggggccgggataccttatagcgtacctgcatggtcatgccagatgatttgcggaagtggtctcaaagcggtgtgtctggccgtacagagtatcggaatcggagacagttccatcgtggttgccggcggaatggaaaacatgagtaaggccccccatctcgcctatctcaggactggagttaaaataggtgaaatgcccctcactgactccattttgtgtgacggcctcactgacgcctttcacaactgtcacatgggaatcactgccgagaacgtagccaaaaagtggcaggttagtagagaagatcaagataaggtggccgttctctcccaaaataggacagaaaacgcacagaaggccggccattttgacaaggagattgtgccagtgctcgtgtctactaggaaggggctcatagaggtcaaaaccgatgagttccccagacatgggtccaacatcgaggcaatgtccaaactgaaaccttattttctcaccgatggcacgggaacagttaccccagccaatgcatccggcatcaatgatggagctgctgcagtcgttcttatgaagaaatcagaggccgacaagcgagggctgaccccacttgctcggatcgtgtcttggtcccaggtaggggtggagccctcgattatggggattggccccataccagcaatcaagcaggccgtcaccaaagctgggtggagtctggaggacgttgacatatttgaaatcaacgaggcgttcgcagcagtctcggcagccatcgtcaaagagcttggactgaaccccgaaaaggtgaacatagaaggcggagcaattgcacttggacatcctctcggggcctccggatgccggatactcgttacgctactgcacacactcgagagaatgggccggtccaggggcgttgcggctctgtgtattgggggcggcatgggcatagcaatgtgtgtgcagagagaatag

SEQ ID NO: 115109 - DNA, 1281 bp, Artificial Sequence
  derived and/or modified sequence
atgggcagccaccctgtgctgcgcatctggggcaacagaagagccacagctgccagcctgggccgcagcggcggccgcctgagcagcccccggctgctgcgggtggtggcccccaccctgacctttgcccagaccagccgctgcagcttcaatggagccctggccgctgtgcctgtgcaggacctgggcagcaccgtcatcaaggaggtgctgaagagggccaccgtggccccagaagatgtgtctgaggtgatcttcggccacgtgctggccgccggctgcggccagaaccctgtgcggcaggcctctgtgggcgccggcatcccctacagcgtgcctgcctggagctgccagatgatctgtggcagcggcctgaaggctgtgtgcctggccgtgcagagcattggaattggagacagcagcatcgtggtggccggcggcatggagaacatgagcaaggccccccacctggcctacctgaggactggagtgaagatcggggagatgcccctgacagacagcatcctgtgtgatggcctgacagatgccttccacaactgccacatgggcatcacagcagaaaatgtggccaagaagtggcaggtgtcccgggaggaccaggacaaggtggccgtgctgagccagaacagaacagaaaatgcccagaaggccggccactttgacaaggagatcgtgcctgtgctggtgtccaccaggaagggcctgattgaggtgaagacagatgagttccccaggcatggcagcaacatcgaggccatgagcaagctgaagccctacttcctgacagatggcaccggcaccgtgaccccagccaatgccagcggcatcaatgatggagctgctgctgtggtgctgatgaagaagtctgaggccgacaagaggggcctgacccccctggccagaattgtgtcctggagccaggtgggcgtggagcccagcatcatgggcatcggccccatcccagccatcaagcaggccgtgaccaaggccggctggagcctggaggatgtggacatctttgagatcaatgaggcctttgctgctgtgtctgctgccatcgtgaaggagctgggcctgaaccctgagaaggtgaacattgaaggaggagccatcgccctgggccaccccctgggcgccagcggctgccgcatcctggtgaccctgctgcacaccctggagaggatgggccgcagcagaggagtggccgccctgtgcattggaggcggcatgggcatcgccatgtgtgtgcagcgggagtag

SEQ ID NO: 115110 - DNA, 1281 bp, Artificial Sequence
  derived and/or modified sequence
atgggcagccaccccgtgctgcggatctggggcaaccggcgggccacggcggcctctctcggccggagtggcggtagactatcaagccctaggttgcttcgggtggtggcccccaccttgacattcgctcaaacgagcaggtgctcctttaacggtgcactggccgctgtccccgtgcaggatctcgggtctacagtgataaaggaggtgctaaagcgggcgaccgtggccccagaagatgtgtctgaggtgatctttggacacgtactggccgccgggtgcggacagaatccagtgaggcaagcgtcagttggggccggtattccatactccgtccccgcctggtcatgtcaaatgatttgcgggagcggcctcaaagctgtatgcctggcagtccagagtatcggcatcggcgactcttctatcgtagtcgcgggaggcatggagaacatgtcaaaggcaccacatctggcatatctgcggacaggggtcaagatcggggagatgccgttgactgactcgatcctctgtgatgggttgaccgatgcctttcataattgccacatgggaataacagccgagaacgtggccaagaagtggcaagtcagtcgggaagatcaagacaaagtcgcagtcctctctcagaatcgcacagagaatgcacaaaaagctgggcattttgataaggaaatagtgcccgtcctcgttagcacccgcaaagggttgattgaggttaagaccgacgaattcccacgccatgggtctaatatcgaggcgatgtccaaacttaagccctactttttaaccgacggcacaggaactgttacccccgcaaatgctagtggtattaacgacggagcagccgctgtagttctcatgaaaaaatcagaagctgacaagcgcgggctgactcctctggcgcgtatcgtgtcatggtctcaggtgggagtcgagccttcgattatgggtatcggaccaattccagctatcaaacaggcagttacgaaagctggatggtctctcgaggatgtggatatcttcgagatcaatgaggccttcgctgccgtgagtgcggccattgtgaaagagttggggctcaatcctgaaaaggtgaatatagaggggggtgcgatcgcgctgggccacccactgggtgcgtctgggtgccggattctcgtgacgctcctgcacacacttgagaggatgggcaggagcagaggggtcgccgccctctgcatcggaggcgggatgggcatcgctatgtgcgtgcaaagggagtag

SEQ ID NO: 115111 - DNA, 1281 bp, Artificial Sequence
  derived and/or modified sequence
atgggttctcaccccgtcctgcgaatttggggaaatcgcagagctacagcggcttcactaggcagatctggcggtcgcttgagttcacctaggctgctgagggtggtggcccctaccctcacgttcgcccagacatcccgctgtagcttcaatggggctttggccgctgttccagtacaggacctgggatctactgtcataaaggaggtgctgaaaagggccaccgtggctcctgaggacgtgtcggaggtgatatttggccacgttcttgcagctggatgcggccagaatccagtgagacaggcaagtgtgggcgctgggataccctatagcgttcctgcctggtcttgccagatgatatgcgggtcaggtctgaaggcggtgtgtctggctgtccagtctattgggattggcgactcctccattgtggtggctggtggcatggagaacatgtcaaaggctccccacctcgcgtacttgcgcacaggagtgaagattggggagatgcccctgacagattccatactctgtgacgggctcacagatgcgtttcacaactgtcacatggggataactgccgaaaacgtagccaaaaaatggcaagtttcaagagaagaccaggacaaggttgctgtgttatcccagaacaggaccgagaatgcccagaaagcagggcatttcgataaagaaatcgtgcctgttttggtgtccacgcggaagggactgattgaggtgaaaactgatgaatttcctagacatgggagtaacatcgaagccatgtctaagcttaagccatacttcttgactgacggcaccggaacggtgactcctgctaacgcctcaggaatcaacgacggtgctgccgcagttgtactcatgaagaagagcgaagctgataagcgcggtctgacccccctggccagaattgtgtcctggtcccaggttggcgttgagcctagtatcatgggaatcggtccgatcccagccataaaacaggccgtcaccaaggccggatggtctctggaggatgtggacatttttgagatcaatgaagctttcgctgcggtttccgctgcaatagtgaaagagttgggcctaaacccagagaaagtgaatattgagggaggagccatcgcgcttggccatcctctgggagcctccgggtgtaggattttagtaaccctgcttcacaccctggagagaatgggtcgctccaggggggttgctgccctatgcatcggcggaggtatggggatcgccatgtgcgtccagcgcgaatag

SEQ ID NO: 115112 - DNA, 1723 bp, Artificial Sequence
  derived and/or modified sequence
ggtaatgcctgcggcaggggcggaactgctaggtggtctgagcccggctttgggctggggtcgggctgtcacacaatggctagaagtcgtgacttcgtctccttcgtgccgcatggttttcaacgcccttgacccgccggttccttttgtttgggaagcatggggtcgcatccagtccttcggatttggggaaatagaagggctacagcggcgtccctaggccgttctggaggtcgcctgtccagccctcggctgctgcgagttgtggcacccaccttgacctttgctcagaccagcaggtgttccttcaatggtgccttagctgctgttcctgtccaggacctgggctccactgtcatcaaagaagtcttgaagagggccactgtggctccggaagatgtgtctgaggtcatctttggacatgtcttggcagcaggctgtgggcagaatcctgttagacaagccagtgtgggtgcaggaattccctactctgttccagcatggagctgccagatgatctgtgggtcaggcctaaaagctgtgtgccttgcagtccagtcaatagggataggagactccagcattgtggttgcaggaggcatggaaaatatgagcaaggctcctcacttggcttacttgagaacaggagtaaagataggtgagatgccactgactgacagtatactctgtgatggtcttacagatgcatttcacaactgtcatatgggtattacagctgaaaatgtagccaaaaaatggcaagtgagtagagaagatcaggacaaggttgcagttctgtcccagaacaggacagagaatgcacagaaagctggccattttgacaaagagattgtaccagttttggtgtcaactagaaaaggtcttattgaagttaaaacagatgagtttcctcgccatgggagcaacatagaagccatgtccaagctaaagccttactttcttactgatggaacgggaacagtcaccccagccaatgcttcaggaataaatgatggtgctgcagctgtcgttcttatgaagaagtcagaagctgataaacgtgggcttacacctttagcacggatagtttcctggtcccaagtgggtgtggagccttccattatgggaataggaccaattccagccataaagcaagctgttacaaaagcaggttggtcactggaagatgttgacatatttgaaatcaatgaagcctttgcagctgtctctgctgcaatagttaaagaacttggattaaacccagagaaggtcaatattgaaggaggggctatagccttgggccaccctcttggagcatctggctgtcgaattcttgtgaccctgttacacacactggagagaatgggcagaagtcgtggtgttgcagccctgtgcattgggggtgggatgggaatagcaatgtgtgttcagagagaatgaattgcttaaactttgaacaacctcaatttctttttaaactaataaagtactaggttgcaatatgtgaaatcagaggaccaaagtacagatggaaaccatttcctacatcacaaaaacccaagtttacagcttgtactttactttaatgtgtaatactcaactcaaggtacaagacaattgcatttaacattgttataaataaaaggaacatcagatcaatcattaagggctccagagtgaacagcatcttcataacttccatgtttatcatctttactttctg

SEQ ID NO: 115113 - DNA, 1281 bp, Artificial Sequence
  derived and/or modified sequence
atgggcagccaccccgtgctgagaatctggggcaacagaagagccaccgccgccagcctgggcagaagcggcggcagactgagcagccccagactgctgagagtggtggcccccaccctgaccttcgcccagaccagcagatgcagcttcaacggcgccctggccgccgtgcccgtgcaggacctgggcagcaccgtgatcaaggaggtgctgaagagagccaccgtggcccccgaggacgtgagcgaggtgatcttcggccacgtgctggccgccggctgcggccagaaccccgtgagacaggccagcgtgggcgccggcatcccctacagcgtgcccgcctggagctgccagatgatctgcggcagcggcctgaaggccgtgtgcctggccgtgcagagcatcggcatcggcgacagcagcatcgtggtggccggcggcatggagaacatgagcaaggccccccacctggcctacctgagaaccggcgtgaagatcggcgagatgcccctgaccgacagcatcctgtgcgacggcctgaccgacgccttccacaactgccacatgggcatcaccgccgagaacgtggccaagaagtggcaggtgagcagagaggaccaggacaaggtggccgtgctgagccagaacagaaccgagaacgcccagaaggccggccacttcgacaaggagatcgtgcccgtgctggtgagcaccagaaagggcctgatcgaggtgaagaccgacgagttccccagacacggcagcaacatcgaggccatgagcaagctgaagccctacttcctgaccgacggcaccggcaccgtgacccccgccaacgccagcggcatcaacgacggcgccgccgccgtggtgctgatgaagaagagcgaggccgacaagagaggcctgacccccctggccagaatcgtgagctggagccaggtgggcgtggagcccagcatcatgggcatcggccccatccccgccatcaagcaggccgtgaccaaggccggctggagcctggaggacgtggacatcttcgagatcaacgaggccttcgccgccgtgagcgccgccatcgtgaaggagctgggcctgaaccccgagaaggtgaacatcgagggcggcgccatcgccctgggccaccccctgggcgccagcggctgcagaatcctggtgaccctgctgcacaccctggagagaatgggcagaagcagaggcgtggccgccctgtgcatcggcggcggcatgggcatcgccatgtgcgtgcagagagagtag

SEQ ID NO: 115114 - DNA, 3525 bp, Artificial Sequence
  derived and/or modified sequence
atgtacgatgccgacgaagacatgcagtatgacgaagatgatgacgagataacaccagacctctggcaggaagcctgctggatcgtgattagcagctattttgatgagaagggactggtgcgacaacagttggactcatttgacgaattcattcaaatgtcggtgcaaagaattgttgaagacgcccctccaattgacctccaggctgaggctcaacatgcatctggcgaggtggaggaaccaccgcgctacctcctgaaatttgaacagatttatctctcaaaacccacccattgggagcgggacggagccccatcccccatgatgcctaacgaggccagactgcgtaatctgacctacagcgctccattgtatgtggacattacgaagactgtgattaaggaaggggaagagcagcttcagacacagcatcagaaaaccttcattggtaaaatcccaatcatgctgcggagcacatactgcctgctcaacggtttgactgatcgcgatttgtgtgagctaaatgagtgccccctcgatcccgggggttatttcatcatcaacggcagcgaaaaagttcttatcgcccaggaaaaaatggctaccaataccgtgtatgtgttcgccaagaaggactccaaatacgcatacactggtgaatgcagatcttgcctggagaactcttcccgccccacctcaacgatctgggtcagcatgctggcacggggaggtcaaggtgcgaaaaaatcggcgattggccaacggattgtggccaccctgccctatattaagcaggaagttccaattataatcgtgtttcgtgccctggggttcgtatctgatcgcgacattttggagcacattatctacgatttcgaggatcctgaaatgatggagatggtcaagccttctttagacgaagcatttgttatccaggagcaaaatgtcgctcttaatttcataggatcccgaggcgccaaacccggcgtgaccaaagagaagcgcatcaagtatgccaaggaggtgctgcagaaggagatgctaccacatgttggcgtttccgatttctgcgagaccaagaaagcatatttcctgggctacatggttcatcgactcctgctcgctgcactgggaagacgcgagcttgacgatcgtgatcactacggtaataaacgtctggatctggctggccccctcctggcttttcttttccgcggtatgtttaaaaacctgctgaaggaggtcaggatctacgcgcagaagtttatcgacagaggaaaggacttcaacctggagctggcaattaaaactcgcatcattagcgatggccttaaatactcactggccacaggaaattggggggaccagaaaaaggctcatcaggctagggccggggtttcacaagtgctgaatagattaacctttgcaagcactctctcccatctacgacgccttaatagcccgatcgggcgcgatgggaagctcgctaaacccagacagctgcataatacactatggggcatggtgtgtcctgcagagaccccagaggggcacgcagtgggtctggttaagaacctcgctctgatggcatacatctcagttggttctcagcctagccctattctggagtttcttgaggagtggtccatggaaaacctcgaagagatctcgcccgccgctattgctgacgcaactaaaatatttgtgaatgggtgttgggtaggaatccacaaggaccctgagcagctcatgaataccctccgaaagctccgacgacagatggacatcattgttagcgaagtatccatgattagagacatccgggaacgcgagattaggatctatacagatgccggtagaatttgtcggcctttgcttattgtggagaagcagaagttacttctcaagaagcgccatatcgaccaattgaaagagcgcgagtataacaactactcctggcaggacttggtcgcgtccggagttgtggagtatattgacacattggaggaggaaacggttatgctcgccatgacccccgatgacctccaggaaaaagaggtggcctattgtagtacctacactcactgcgagattcacccatcgatgatacttggcgtctgcgcttccattattccctttccagatcacaaccagtctcctaggaatacctaccaatcagccatgggaaagcaggctatgggggtttatataacaaactttcacgtcaggatggatactctggctcatgtgctttactatccccagaagcccctcgtgacaacacgctctatggagtatctgcgattcagggaactccccgcaggaataaacagcatcgtggccatcgcgtcctacactgggtacaatcaagaagactccgtgattatgaacagatcagctgttgatcgaggtttttttagatccgtgttttacagatcttacaaagagcaggaaagcaaaaagggttttgatcaggaggaggtgtttgagaagcctactagagagacttgtcaaggcatgcggcacgctatttacgataaactcgatgacgatgggctgattgccccaggagtgagggtgtccggcgatgacgtcatcatcggaaaaaccgtcacactgccggagaatgaagacgagttggagagcacaaaccggcggtatacaaagcgggactgttcaacattcctccggacttccgagactggcatcgtcgatcaggtaatggttacactgaaccaagaggggtataaattttgcaagattcgggtaaggtctgttagaataccacagatcggtgacaaattcgcatcgaggcatggccaaaaaggcacctgcggaatccagtatcgccaagaagacatgccctttacctgcgaaggtatcacgcctgatatcatcatcaatcctcacgcgattccatctaggatgactattgggcaccttattgaatgtctccagggcaaggtatccgctaacaaaggtgaaataggagacgccacccccttcaacgacgccgtcaatgtacagaagatctccaatctcttgtctgattacgggtaccaccttaggggaaacgaggttctgtataacgggttcaccggtcgcaaaatcacaagccaaatattcataggtcccacctattaccagcggctgaagcatatggtggacgataagattcatagtcgggctcgcggacccatccagatactaaacagacagccaatggaggggcggtcccgtgatggaggactaaggttcggtgagatggaacgggactgccaaatcgcacacggggcagcccagtttctgcgcgagaggttattcgaggcatcagacccataccaggttcacgtatgcaatctgtgcggtatcatggccatcgccaacacccggacccatacctacgaatgtagaggctgtcgaaataagacccaaatctcactggttaggatgccgtatgcctgcaagcttctgtttcaggagctcatgagcatgtcgatagcacccagaatgatgtccgtttag

SEQ ID NO: 115115 - DNA, 3525 bp, Artificial Sequence
  derived and/or modified sequence
atgtacgatgccgatgaagatatgcagtacgatgaagacgacgatgaaatcactcccgatctctggcaggaagcatgttggatcgtgatttcgtcctatttcgacgaaaaaggacttgtgaggcagcagttggatagctttgacgaattcattcaaatgagtgtgcagaggattgtggaggatgctccacccatcgatctacaggccgaggcacagcatgcttcaggagaagtagaggagccacctagatacctcctgaagtttgagcagatctacctgtcaaaaccgactcattgggagcgggatggcgcgcccagtccgatgatgccaaatgaggcaaggcttcgtaacctcacatactccgcccccctgtacgtagacataaccaagacggtcatcaaggagggtgaagaacagctgcagactcagcaccagaaaacgtttatcggaaagatcccaattatgctgaggtctacgtattgccttctgaacggactcaccgacagggatctgtgtgagttgaatgagtgccctttggaccccgggggctactttatcattaatggatctgagaaggtgttgatcgcacaggaaaaaatggctacaaacaccgtgtacgtattcgccaagaaggacagcaagtatgcatacacgggcgagtgtcggtcatgcttggagaattcttccagaccaacctctacaatttgggtcagcatgctggcacgaggaggccaaggcgcaaagaaatccgctatcggacagaggatcgtcgcaacactcccatacatcaagcaggaagtgcccataatcattgtcttccgagccctaggtttcgtgagtgacagggatattctggaacatattatttatgacttcgaagatcctgagatgatggaaatggtgaagcccagcttggacgaagccttcgtgatccaggagcagaatgtcgcactcaatttcataggctcccggggagctaaacctggcgtgactaaggagaaaaggattaagtatgccaaagaggtgcttcagaaggagatgctcccccatgtgggggtctctgacttttgtgagaccaagaaggcttatttcctgggctacatggtgcataggctgctactggccgccttggggcgccgggagttagacgatagggaccattacggcaataagcggctcgacctggccggaccactactcgcgtttctttttcgcgggatgtttaagaatcttctgaaggaggtcaggatatacgcccagaagttcatcgaccgcgggaaggatttcaaccttgaactagctatcaagacgcgtataatctctgatggcctcaaatacagcctggcgaccggaaactggggagaccagaaaaaggcacaccaggcccgagccggcgtcagtcaagtgttgaacagacttacatttgcttctactctgtcccacctgcggaggcttaacagtcctattgggagggatgggaagctcgcaaagccaagacagcttcataacaccctatggggcatggtgtgtccggcggagacgcctgaaggccacgccgttggccttgttaaaaatcttgccttgatggcctacatttcagtggggagccagccctcaccaatattggagtttttggaagagtggagcatggagaacctggaagaaattagcccagctgcgatcgcggatgcaaccaagatcttcgtcaatggctgttgggtgggaatccataaggatcccgagcaactgatgaacaccctgagaaagttacggcgacagatggatattatcgtgtccgaagtctcaatgatccgagatataagggaaagggagattcgcatctataccgacgcgggccggatctgtcgacccctcttaatcgtggaaaagcagaaactactgctgaagaagaggcatatagaccagctcaaggagagagaatacaataattatagttggcaggacttggtagccagcggtgtggtggagtatattgacaccttggaggaggagactgtgatgctcgcaatgaccccagacgacttgcaggaaaaggaagttgcgtactgctctacatatacgcactgcgaaatacacccatctatgatccttggtgtctgcgcctcaatcatcccattcccggatcataaccagagtcctcgcaatacctatcagagtgcgatggggaaacaggccatgggagtctacataaccaactttcatgtccgcatggacaccttggcacacgtgctctattacccacaaaagcccctggtaactacgaggtctatggaatatttacgattcagagagctgcccgcagggatcaatagcatagtggctatcgcctcttataccggctacaatcaggaagactccgtaataatgaaccgctctgctgtggaccggggcttctttcgttccgtcttttatagatcttataaggagcaggaatctaaaaaaggtttcgatcaagaggaagtgttcgaaaagcctactagagaaacatgtcagggcatgcgacacgctatctacgataagctggatgacgatggcctcatcgctccaggtgtccgcgtgtctggggatgacgttatcatcgggaagacagtgaccctcccggaaaacgaggacgaattggaatctaccaaccgccgctataccaagcgggactgcagcacgttcctccgaactagcgagactggtattgtggaccaagtgatggtcacgcttaaccaagaaggatacaagttttgtaagatcagggtgagatcagtgcgaatcccacaaattggcgataagttcgccagcagacatgggcagaagggtacttgcggcatacagtaccgacaggaggacatgccatttacgtgcgagggcataactccggacataatcataaatcctcacgcgatcccttctcgaatgaccatcggtcatctgatcgagtgtctgcaaggcaaggtgagcgccaataagggagagatcggcgacgccacaccgttcaacgacgctgtcaacgtccaaaaaatcagcaatttactctcagactatggctaccaccttagaggaaatgaagtgttatacaatggattcacagggagaaaaattacatctcaaatctttattggtccgacttactaccagcgcctgaagcacatggtggatgacaagatccattctagagcacgggggcccatacagatcctgaatcgccagcctatggaagggcgtagcagagacggcggcctgcgatttggagaaatggagcgcgactgccaaatcgctcatggcgccgctcagttcctgcgagagagactgttcgaagcatcagatccgtatcaagtccacgtctgtaatctgtgcggaataatggctattgctaacacccggactcatacatatgagtgtagagggtgcaggaataagactcagattagcttagtgcggatgccttacgcttgtaagctgctgtttcaggaactgatgtcaatgagcatagctccaagaatgatgagcgtttag

SEQ ID NO: 115116 - DNA, 3525 bp, Artificial Sequence
  derived and/or modified sequence
atgtatgatgctgatgaggacatgcagtatgatgaagatgatgatgagatcaccccagacctgtggcaggaggcctgctggatcgtcatcagcagctactttgatgagaagggcctggtgcggcagcagctggacagctttgatgagttcatccagatgtctgtgcagagaattgtggaggatgccccacccatcgacctgcaggccgaggcccagcacgccagcggggaggtggaggagcccccacgctacctgctgaagtttgagcagatctacctgagcaagcccacccactgggagagagatggagcccccagccccatgatgcccaatgaggcccggctgaggaacctgacctacagcgcccccctgtatgtggacatcaccaagacagtcatcaaggagggggaggagcagctgcagacccagcaccagaagaccttcatcggcaagatccccatcatgctgcggagcacctactgcctgctgaatggcctgacagaccgggacctgtgtgagctgaatgaatgtcccctggaccccggcggctacttcatcatcaatggcagcgagaaggtgctgattgcccaggagaagatggccaccaacacagtgtatgtgtttgccaagaaggacagcaaatatgcctacaccggggagtgccgcagctgcctggagaacagcagccggcccaccagcaccatctgggtgtccatgctggcccggggcggccagggcgccaagaagagcgccatcggccagagaattgtggccaccctgccctacatcaagcaggaggtgcccatcatcatcgtgttccgggccctgggctttgtgtctgaccgggacatcctggagcacatcatctatgactttgaagatcctgagatgatggagatggtgaagcccagcctggatgaggcctttgtgatccaggagcagaatgtggccctgaacttcatcggcagcagaggagccaagccaggagtgaccaaggagaagaggatcaagtatgccaaggaggtgctgcagaaggagatgctgccccacgtgggcgtgtctgacttctgtgagaccaagaaggcctacttcctgggctacatggtgcaccggctgctgctggccgccctgggcagaagagagctggatgaccgggaccactacggcaacaagaggctggacctggccggccccctgctggccttcctgttccggggcatgttcaagaacctgctgaaggaggtgcgcatctatgcccagaagttcatcgaccggggcaaggacttcaacctggagctggccatcaagacccgcatcatcagtgatggcctgaagtacagcctggccaccggcaactggggagaccagaagaaggcccaccaggcccgggccggcgtgtcccaggtgctgaaccggctgacctttgccagcaccctgagccacctgcggcggctgaacagccccatcggcagagatggcaagctggccaagccccggcagctgcacaacaccctgtggggcatggtgtgcccagctgagaccccagagggccatgctgtgggcctggtgaagaacctggccctgatggcctacatctctgtgggcagccagcccagccccatcctggagttcctggaggagtggagcatggagaacctggaggagatcagccctgctgccatcgcagatgccaccaagatctttgtgaatggctgctgggtgggcatccacaaggaccctgagcagctgatgaacaccctgaggaagctgcggcggcagatggacatcatcgtgtctgaggtgtccatgatccgggacatccgggagcgggagatccgcatctacacagatgctggccgcatctgccggcccctgctgattgtggagaagcagaagctgctgctgaagaagaggcacatcgaccagctgaaggagcgggagtacaacaactacagctggcaggacctggtggccagcggcgtggtggagtacatcgacaccctggaggaggagaccgtgatgctggccatgaccccagatgacctgcaggagaaggaggtggcctactgcagcacctacacccactgtgagatccaccccagcatgatcctgggcgtgtgtgccagcatcatccccttcccagaccacaaccagagccccaggaacacctaccagagcgccatgggcaagcaggccatgggcgtgtacatcaccaacttccacgtgaggatggacaccctggcccacgtgctgtactacccccagaagcccctggtgaccaccaggtccatggagtacctgcgcttccgggagctgcctgctggcatcaacagcatcgtggccatcgccagctacacaggctacaaccaggaggacagcgtcatcatgaacagatctgctgtggaccggggcttcttccgcagcgtcttctaccgcagctacaaggagcaggagagcaagaagggctttgaccaggaggaggtgtttgagaagcccacccgggagacctgccagggcatgagacatgccatctatgacaagctggatgatgatggcctcatcgcccctggggtgcgggtgtctggagatgatgtgatcatcggcaagacagtgaccctgcctgaaaatgaagatgagctggagagcaccaacagacgctacaccaagagggactgcagcaccttcctgcggaccagcgagactggaattgtggaccaggtgatggtgaccctgaaccaggagggctacaagttctgcaagatccgggtgcgctctgtgcgcatcccccagattggagacaagtttgccagcagacatggccagaagggcacctgtggcatccagtaccggcaggaggacatgcccttcacctgtgagggcatcaccccagacatcatcatcaacccccacgccatccccagcaggatgaccatcggccacctgattgaatgtctgcagggcaaggtgtctgccaacaagggggagattggagatgccacccccttcaatgatgctgtgaatgtgcagaagatcagcaacctgctgagtgactatggctaccacctgcggggaaatgaggtgctgtacaacggcttcaccggcaggaagatcaccagccagatcttcatcggccccacctactaccagaggctgaagcacatggtggatgacaagatccacagccgggcccggggccccatccagatcctgaaccggcagcccatggagggccgcagcagagatggcggcctgcgctttggagagatggagcgggactgccagatcgcccatggagctgcccagttcctgcgggagcggctgtttgaggccagtgacccctaccaggtgcacgtgtgcaacctgtgtggcatcatggccatcgccaacaccaggacccacacctatgagtgccggggctgcaggaacaagacccagatcagcctggtgaggatgccctatgcctgcaagctgctcttccaggagctgatgtccatgagcatcgcccccaggatgatgtctgtgtag

SEQ ID NO: 115117 - DNA, 3748 bp, Artificial Sequence
  derived and/or modified sequence
cttttgatttcaagagttaggagctcgagaaccgtttggcaatatgtacgacgcggatgaggatatgcaatatgatgaggatgatgatgaaatcaccccggatttgtggcaagaagcatgctggattgtaatcagttcctattttgacgagaaaggcttggttagacaacagctggattcttttgatgagtttattcagatgtctgttcaaagaattgtggaagacgctcctcctatagacctacaggctgaagctcagcatgctagtggagaagttgaagaaccgccacgatatttgctgaagtttgaacaaatttatctttccaagcctacccattgggaaagagatggtgctccttcaccaatgatgcccaatgaagctagattaaggaatctcacgtattctgctccgctttatgttgatataacaaaaacagtcattaaagaaggtgaagaacaacttcagactcagcatcagaaaacttttataggaaaaattccaattatgttgcggtcaacttactgccttttgaatggcttgacagatcgtgatctttgtgagttaaatgaatgccctttggatcctggtggctatttcattattaatggatcagaaaaggttctgattgcccaagagaaaatggcaacaaacacagtttatgtgtttgccaaaaaggattctaaatatgcctacacaggagagtgtagatcatgtcttgagaattcttcccgacccaccagtactatatgggttagcatgctggcaagaggaggacagggtgccaagaagagtgctattggtcagcgcattgtggcaactctaccatatatcaagcaagaagttcccatcattattgtgttcagagcattaggttttgtgtccgacagagatattttagaacatattatttatgattttgaagatccagagatgatggaaatggttaaaccttctctcgatgaagcttttgtcatccaagaacagaatgttgcactaaatttcattggttcaagaggagcaaagcctggtgttactaaagagaaaagaattaaatatgcaaaggaagttttacaaaaagaaatgctccctcatgttggtgtcagtgatttttgtgagaccaaaaaagcctatttcttgggatacatggttcataggttacttctggcagctttgggtagaagagaactagatgacagagatcactatggaaacaagagattggatcttgctgggccgctgcttgcattcttatttagaggtatgtttaagaatttgcttaaagaagtgcggatctatgcacagaaatttattgatcgaggaaaggattttaacttggagttggcaattaaaacacggatcatatctgatggcctaaaatactctttagctactggaaactggggtgatcaaaagaaagctcatcaagccagagctggagtatctcaggtgttaaaccgcctgacttttgcgtctactctttctcacctgcgtcgtttaaattctcctattggtagagacggcaagctagcaaaaccaagacagttgcataatacgttgtggggaatggtgtgtcctgccgagaccccagagggccatgctgtaggacttgtgaagaatttagccttgatggcgtatatttcagttggatctcaaccatctccaattctggaatttttagaagaatggagtatggaaaatttagaagaaatttctcctgcagctattgctgatgcaaccaagatttttgttaatggctgctgggttggaatacataaagatcccgaacaacttatgaacaccctaaggaaattgagacgtcagatggacatcattgtgtctgaagtttctatgatcagagatattcgagagagggagattcggatctatacggatgcaggccgtatttgtagaccacttctgattgtggaaaaacaaaagctacttttgaagaagaggcatattgaccaattgaaagagagagaatataacaactatagttggcaggatcttgtggccagtggggtagtggagtatattgataccctggaagaagaaacagtgatgcttgcaatgactccagatgatttacaggagaaagaagtagcttattgttccacatatacacactgtgagattcatccctcaatgatccttggtgtctgtgcatctattattccctttcctgatcataaccagtcccctagaaacacataccagtctgctatgggtaagcaggctatgggagtttacatcaccaacttccatgttcgcatggacacattggcccatgttctctattatcctcaaaagccacttgtgactacacggtctatggaatatctacgatttagagagctgccagcaggcatcaactcaattgtggccattgcatcatacactggatataatcaggaagactctgttatcatgaatcgttcagctgtagaccgcggcttcttcaggtctgttttctatcgctcatacaaagaacaggagtctaaaaaaggatttgatcaagaagaagtttttgagaagcctacacgtgaaacatgccagggcatgaggcatgccatttacgacaagctggatgatgatggtttgatagctccaggggttcgtgtatcaggagatgatgttattataggcaaaacagtcaccttgcctgaaaatgaagatgaattggagagcaccaatagacgctataccaagagagactgtagcacttttctcagaactagcgagacgggcattgtggatcaggttatggtaactctcaatcaggaaggatataaattttgtaaaataagggtacgctctgttaggattccacagattggagacaaatttgctagtcgacatggtcaaaagggtacttgtggtattcagtatagacaagaggatatgcctttcacctgtgaaggtatcacccctgatatcatcatcaatccccatgccatcccctctcgtatgactattggtcacttaattgaatgccttcaagggaaggtatcggctaacaagggtgaaattggtgatgccactccatttaatgatgctgttaacgtgcagaagatttctaatcttttatctgattatggctatcatctcagaggaaatgaggtcctgtacaatgggttcactggtcgaaaaatcacatcacaaatatttattggccccacttattaccagcgtttgaagcatatggtggatgataagattcactctcgtgctaggggacctattcagatcctcaatagacagcccatggagggtagatctcgtgatggtggcctgcgttttggagaaatggaacgagattgtcagattgcccatggagcagcccagtttttaagggaaagattgtttgaggcatcagatccatatcaggttcatgtttgcaatctttgtggaataatggcgattgccaacaccaggacccatacatatgaatgcaggggctgccgcaataaaacccagatttctttggtgcgaatgccttacgcatgcaaactattgtttcaggaacttatgtctatgagtattgcaccgcgaatgatgagtgtttagctattttacaggagtcaacaagataattaaatatcttggtgtcttgtttctattgtgtggctttttaaaaatgacaaatatgtactgtgttgtgataaaaagtattttatttgtttaatgatatgcatgcttttcttctgtaaatatataataaatttttgtagatagtcttgatgtgtg

SEQ ID NO: 115118 - DNA, 4108 bp, Artificial Sequence
  derived and/or modified sequence
actgagaacctacttaaagctatggcaaaggcactggaggattgagctaggtgggcagaaaagagcagtgtcgttatttgtgcaacaacattgaaaaacaagcagaaataaaacattgacggaacggatacgaccgcagattgcgggagctgtcctctcaatcagcccggcagcggcggcccacaatttacgcgtgtgcaaccctaaccccggcccaagcttgacctacaatttgcgcaggcgcagatcctaactttggcgtccctgtgggcggcctttggtgtgagacgcgtggtattctgggaacgtcggagacggaagttacttcgtctttagctcctggcgctgctggcttctgggcggtttttgtcttttgatttcaagagttaggagctcgagaaccgtttggcaatatgtacgacgcggatgaggatatgcaatatgatgaggatgatgatgaaatcaccccggatttgtggcaagaagcatgctggattgtaatcagttcctattttgacgagaaaggcttggttagacaacagctggattcttttgatgagtttattcagatgtctgttcaaagaattgtggaagacgctcctcctatagacctacaggctgaagctcagcatgctagtggagaagttgaagaaccgccacgatatttgctgaagtttgaacaaatttatctttccaagcctacccattgggaaagagatggtgctccttcaccaatgatgcccaatgaagctagattaaggaatctcacgtattctgctccgctttatgttgatataacaaaaacagtcattaaagaaggtgaagaacaacttcagactcagcatcagaaaacttttataggaaaaattccaattatgttgcggtcaacttactgccttttgaatggcttgacagatcgtgatctttgtgagttaaatgaatgccctttggatcctggtggctatttcattattaatggatcagaaaaggttctgattgcccaagagaaaatggcaacaaacacagtttatgtgtttgccaaaaaggattctaaatatgcctacacaggagagtgtagatcatgtcttgagaattcttcccgacccaccagtactatatgggttagcatgctggcaagaggaggacagggtgccaagaagagtgctattggtcagcgcattgtggcaactctaccatatatcaagcaagaagttcccatcattattgtgttcagagcattaggttttgtgtccgacagagatattttagaacatattatttatgattttgaagatccagagatgatggaaatggttaaaccttctctcgatgaagcttttgtcatccaagaacagaatgttgcactaaatttcattggttcaagaggagcaaagcctggtgttactaaagagaaaagaattaaatatgcaaaggaagttttacaaaaagaaatgctccctcatgttggtgtcagtgatttttgtgagaccaaaaaagcctatttcttgggatacatggttcataggttacttctggcagctttgggtagaagagaactagatgacagagatcactatggaaacaagagattggatcttgctgggccgctgcttgcattcttatttagaggtatgtttaagaatttgcttaaagaagtgcggatctatgcacagaaatttattgatcgaggaaaggattttaacttggagttggcaattaaaacacggatcatatctgatggcctaaaatactctttagctactggaaactggggtgatcaaaagaaagctcatcaagccagagctggagtatctcaggtgttaaaccgcctgacttttgcgtctactctttctcacctgcgtcgtttaaattctcctattggtagagacggcaagctagcaaaaccaagacagttgcataatacgttgtggggaatggtgtgtcctgccgagaccccagagggccatgctgtaggacttgtgaagaatttagccttgatggcgtatatttcagttggatctcaaccatctccaattctggaatttttagaagaatggagtatggaaaatttagaagaaatttctcctgcagctattgctgatgcaaccaagatttttgttaatggctgctgggttggaatacataaagatcccgaacaacttatgaacaccctaaggaaattgagacgtcagatggacatcattgtgtctgaagtttctatgatcagagatattcgagagagggagattcggatctatacggatgcaggccgtatttgtagaccacttctgattgtggaaaaacaaaagctacttttgaagaagaggcatattgaccaattgaaagagagagaatataacaactatagttggcaggatcttgtggccagtggggtagtggagtatattgataccctggaagaagaaacagtgatgcttgcaatgactccagatgatttacaggagaaagaagtagcttattgttccacatatacacactgtgagattcatccctcaatgatccttggtgtctgtgcatctattattccctttcctgatcataaccagtcccctagaaacacataccagtctgctatgggtaagcaggctatgggagtttacatcaccaacttccatgttcgcatggacacattggcccatgttctctattatcctcaaaagccacttgtgactacacggtctatggaatatctacgatttagagagctgccagcaggcatcaactcaattgtggccattgcatcatacactggatataatcaggaagactctgttatcatgaatcgttcagctgtagaccgcggcttcttcaggtctgttttctatcgctcatacaaagaacaggagtctaaaaaaggatttgatcaagaagaagtttttgagaagcctacacgtgaaacatgccagggcatgaggcatgccatttacgacaagctggatgatgatggtttgatagctccaggggttcgtgtatcaggagatgatgttattataggcaaaacagtcaccttgcctgaaaatgaagatgaattggagagcaccaatagacgctataccaagagagactgtagcacttttctcagaactagcgagacgggcattgtggatcaggttatggtaactctcaatcaggaaggatataaattttgtaaaataagggtacgctctgttaggattccacagattggagacaaatttgctagtcgacatggtcaaaagggtacttgtggtattcagtatagacaagaggatatgcctttcacctgtgaaggtatcacccctgatatcatcatcaatccccatgccatcccctctcgtatgactattggtcacttaattgaatgccttcaagggaaggtatcggctaacaagggtgaaattggtgatgccactccatttaatgatgctgttaacgtgcagaagatttctaatcttttatctgattatggctatcatctcagaggaaatgaggtcctgtacaatgggttcactggtcgaaaaatcacatcacaaatatttattggccccacttattaccagcgtttgaagcatatggtggatgataagattcactctcgtgctaggggacctattcagatcctcaatagacagcccatggagggtagatctcgtgatggtggcctgcgttttggagaaatggaacgagattgtcagattgcccatggagcagcccagtttttaagggaaagattgtttgaggcatcagatccatatcaggttcatgtttgcaatctttgtggaataatggcgattgccaacaccaggacccatacatatgaatgcaggggctgccgcaataaaacccagatttctttggtgcgaatgccttacgcatgcaaactattgtttcaggaacttatgtctatgagtattgcaccgcgaatgatgagtgtttagctattttacaggagtcaacaagataattaaatatcttggtgtcttgtttctattgtgtggctttttaaaaatgacaaatatgtactgtgttgtgataaaaagtattttatttgtttaatgatatgcatgcttttcttctgtaaatatataataaatttttgtagatagtc

SEQ ID NO: 115119 - DNA, 3525 bp, Artificial Sequence
  derived and/or modified sequence
atgtacgacgccgacgaggacatgcagtacgacgaggacgacgacgagattacccctgacctgtggcaggaggcatgctggatcgttattagcagttacttcgacgaaaaagggctggtccggcagcaactggatagctttgacgaattcattcagatgtccgtgcagcgcattgtggaagacgccccgcccattgatttgcaggctgaagcccagcacgcaagcggcgaggtcgaagagccacctcgttatctgctgaagttcgagcagatctatctttccaaaccgactcattgggagagagatggggcccccagcccaatgatgcctaatgaggcgaggcttaggaacttaacgtatagtgcacccctctatgtggacatcactaagaccgttatcaaagagggtgaagagcagttgcagactcaacaccaaaaaaccttcattggcaaaatccctattatgctgcgttcaacatattgcttgctgaacggactgactgatagagatctgtgcgagctaaacgagtgtcccctggacccgggtgggtatttcatcattaacggttcggagaaagtgcttatagcacaggaaaagatggcaaccaacacagtttatgtgtttgccaagaaggactccaagtatgcatacacaggcgagtgcaggtcatgcctggagaattcttcccgccccacatccaccatctgggtgtcaatgttagcccggggagggcagggagctaaaaaatccgccataggccaacggatcgtcgctacattgccttatattaagcaggaggtgccaatcattattgtcttcagggctctggggtttgtctccgatcgggatatcctcgaacacatcatctacgattttgaagatcctgagatgatggaaatggtgaaaccttcactggacgaggcattcgtcatccaagaacagaacgtcgccctgaacttcattggtagccggggcgccaaacccggcgtgactaaagagaagcgcatcaagtacgctaaggaggtgcttcagaaggaaatgcttccacacgtcggggtcagcgacttttgcgagaccaaaaaagcctattttttgggctacatggtgcaccgcctgctgttggcggctttagggagacgagagctggatgaccgagaccactacggtaataaaagactcgacctagccggccccttgctggcatttctctttagaggtatgttcaaaaatctgctgaaagaagttcggatttacgcccagaaatttatcgatcggggaaaagatttcaatctcgagctggccatcaagactaggataatttctgacgggctcaaatactccctggctaccggcaattggggagatcaaaagaaggcccaccaggcaagggccggtgtgagtcaggtactgaaccggctaacctttgcatccacattgtcccatctgcggcggttgaatagccccattggacgggatgggaaactcgccaaacccagacagctgcacaacactctttggggtatggtgtgtccggccgaaacccctgaagggcatgctgttgggttggtaaagaacctcgctcttatggcttatattagtgtgggaagccaacctagtccgattttggaattcctagaggagtggagcatggaaaacctggaagagatcagccccgccgccatcgctgatgctaccaaaatctttgtgaacggctgttgggtaggcatccacaaggaccccgagcagctcatgaatacccttcgcaagctccgacgccagatggatattatcgtcagtgaagtcagtatgatcagagacattcgcgagagagagatccgcatttataccgatgcaggcagaatctgtcgaccactgctcatcgtggaaaagcagaagctgctcctaaagaagcgccatattgatcagctgaaggagagggaatacaacaactactcatggcaggatctggtcgctagtggcgtcgtggaatatattgacaccctcgaggaggaaaccgtgatgctggccatgacacccgatgatctgcaggagaaggaggtggcttactgcagcacttatacccattgcgagattcacccttccatgattttgggcgtgtgtgcgtccattattccttttccagaccacaatcaatcgcctcgaaatacttatcagagtgctatgggaaagcaagcaatgggcgtctatatcactaattttcacgtgcgcatggacacgctggcccacgtcctttattacccgcagaaaccccttgtgaccacacggagcatggagtacctgcgctttcgggagctccccgccgggatcaatagcatcgtcgcaatagcctcctacacagggtacaaccaagaagactctgtgatcatgaaccgaagcgcagtggacagggggttttttcggagtgtgttctacagaagctacaaagaacaggaatccaaaaagggctttgaccaggaggaagttttcgaaaaacccacccgggagacatgccaagggatgagacatgcaatttacgataagctggatgatgatggactgattgccccaggtgtgcgggtatccggagatgacgtcatcattggtaaaaccgttaccctgccagagaacgaggatgagctcgagtccactaaccgccggtatactaagagggactgtagcacgtttttgcgcacgtctgaaaccggcattgtagaccaggtgatggttaccctcaaccaggaagggtacaaattctgcaagattagggtgcgatccgtgcggatcccacagattggggacaaattcgcctccaggcatggacagaaagggacatgtggaatacagtatcgacaggaagatatgccttttacctgcgagggaatcaccccggatatcatcatcaatccacacgcgataccatcccgcatgaccattggccatcttatcgagtgcctgcagggtaaagtgtccgcaaacaagggggaaatcggggatgccacccccttcaatgatgccgtcaacgtccagaagataagtaacctgctctccgactacgggtatcatctaagaggcaacgaagtgctgtacaatggatttacaggccggaaaattacctctcaaatattcattggacccacatactaccagcggctgaagcatatggtggatgataaaatacactcgagggcaaggggccctattcagatccttaatcggcagcccatggaggggcgttcaagggacggaggactgcgcttcggggagatggagcgggattgccagatagctcacggagcagcccagttcttgcgagaacggttattcgaggccagtgatccctaccaggtgcatgtctgtaacctgtgcggtattatggctattgccaatactaggacccatacctacgagtgccgtggttgtaggaacaagacacaaatatccctagtccgcatgccttacgcttgtaaattactgttccaggaattgatgtccatgtctatagcgccccgcatgatgagcgtttag

SEQ ID NO: 115120 - DNA, 3525 bp, Artificial Sequence
  derived and/or modified sequence
atgtacgacgccgacgaggacatgcagtacgacgaggacgacgacgaaataacaccagacttgtggcaagaggcttgttggattgtgatcagctcctattttgatgagaagggcctagttcgtcagcagttagattctttcgacgaatttattcagatgagcgtgcagagaattgtggaggatgctccaccaatcgacctgcaagcagaagctcaacacgcttcaggtgaagtcgaagaacctcccaggtacctactgaagtttgaacagatatacctaagcaagcctactcactgggagcgggacggtgcccctagccccatgatgcctaatgaggctagattgaggaacttgacctactctgcgccactgtatgttgatatcaccaaaactgtgattaaggagggggaggaacagctgcagactcagcaccagaaaacattcatcggaaagattcctataatgctgaggtctacctactgcctccttaacgggttgactgaccgcgacctttgtgaacttaatgaatgcccactggatccaggggggtactttattatcaatgggtcagaaaaggtgctaatcgcccaggagaagatggctacgaatacagtgtacgtcttcgccaaaaaggattcaaaatatgcttacactggtgagtgccgtagctgcctggagaactccagcaggcctaccagcacaatatgggtgtcaatgctggccaggggcggccagggagccaagaaatccgcaatcgggcagcgaatcgtcgcaacactgccatacataaaacaggaagtccccatcatcatcgtgttcagagctttgggattcgtatcagaccgagatatcctggagcatatcatttatgatttcgaagatcccgaaatgatggagatggttaaaccatctctggatgaagctttcgtgattcaggagcaaaatgtagccctgaatttcatcggcagtcgtggggctaagccgggagtgacaaaagagaaacgcattaagtatgccaaagaagtgctgcaaaaggaaatgctccctcatgttggtgtgtccgatttttgcgaaacgaaaaaagcctattttctgggatacatggtgcacaggctgctcctcgcagccctcggtcgccgagagctagacgatagggaccactacgggaataaaaggctggatctggctggtccactcctggccttcctgtttcgcgggatgttcaaaaatctcttgaaagaggtccggatatacgctcaaaagtttatagatcggggcaaagatttcaatctcgaattggcaattaagacccgcatcatctcggatggactcaaatactctctggcgaccggaaactggggggaccagaagaaggcccaccaggccagagctggagtgtcgcaggttcttaaccgactgacttttgctagtactctgtcgcacttgcggcgcctgaacagtcctataggacgcgacggcaagctcgctaagccaaggcagctccacaatactctctgggggatggtttgccccgccgagacacccgagggccatgcagtggggttggtcaagaatcttgcactgatggcctacatctccgttgggagtcagcccagcccaatcctggaattcttggaggagtggagtatggagaatttggaagaaatttcaccagctgcgattgctgacgcaactaagatcttcgtcaatgggtgttgggtgggcattcacaaagatcccgaacaactgatgaatacgcttcggaagctgaggagacaaatggatatcatcgttagtgaggttagcatgattcgggacattcgcgaacgcgagattcggatttacacagacgcaggacgcatctgtagacctctactgatcgtagagaaacaaaagttgctcctcaagaagagacatatcgatcagttaaaggaacgggaatacaacaattattcctggcaagatctcgtcgcctcaggcgtggttgagtatatcgacacccttgaagaggagaccgtcatgctggccatgacccccgacgacctgcaggaaaaagaggttgcgtactgctccacgtacacacactgcgagattcatccttccatgatccttggcgtatgcgcctcaatcatcccctttcctgatcacaaccaatcccccaggaatacctaccaatccgccatgggcaaacaggcaatgggcgtgtacattacaaactttcatgtgaggatggacacccttgcacatgtgctgtattacccccaaaagcccctcgtgacgacccgcagtatggaatatttgaggtttcgcgagttaccagcaggaattaactcaattgtcgctattgccagctataccgggtacaaccaggaggattcagtcataatgaaccgatccgctgtagaccggggcttctttcgatctgtgttttataggtcgtacaaggagcaggagtcgaaaaagggctttgatcaggaggaggtattcgagaagcccacaagagagacgtgtcaaggaatgcggcacgccatctacgataaactggatgacgatggattgattgctcccggggtacgggtgagcggtgatgacgtgattatcggaaagacagtcaccctcccggagaacgaagacgaattagaaagtacaaatagaagatataccaagcgggactgttccacattcctgcgcaccagtgaaaccggcatcgtcgaccaggtgatggttactctcaaccaggagggttataaattttgtaaaatcagggtccgttcagtcaggatcccacaaataggcgataagttcgctagccggcacggacaaaagggcacatgtggtatccagtaccgacaggaggacatgcccttcacctgcgaaggcataacacccgacatcattatcaatcctcacgccatccctagcaggatgacaataggccaccttatcgaatgtctccaggggaaagtcagcgccaacaagggcgagatcggcgacgcgaccccttttaatgatgccgtgaacgtccaaaaaatatctaatctattaagtgattatgggtatcacctccgcggcaatgaggtgctgtacaatggttttactggccgaaaaatcaccagtcaaatcttcatcgggcccacttactatcagcgcttgaagcatatggtggacgacaagatccactcccgcgcccgaggccccatccagatcctgaaccgccaacccatggagggaaggtctagagatggggggctcagatttggcgaaatggagcgggactgccagatcgctcatggcgcggctcagtttttgagagaaaggcttttcgaagcatctgacccttatcaagtgcatgtctgtaatctgtgcgggatcatggcaattgctaatacaagaacccacacctacgagtgtaggggctgtagaaataagactcaaatctccctggttcgcatgccctacgcctgcaagttgctgttccaggaattaatgtctatgtccatcgcccctcgcatgatgagcgtttag

SEQ ID NO: 115121 - DNA, 3525 bp, Artificial Sequence
  derived and/or modified sequence
atgtacgatgccgacgaagacatgcagtacgatgaagacgatgacgagatcacccccgatttgtggcaagaggcgtgttggattgtgatttcttcttactttgatgaaaaggggctggtccggcagcagctcgactcattcgacgagttcatccagatgagcgtccaacggatcgtggaggatgcacctcctatcgatcttcaggcggaagcacagcacgcttctggcgaagttgaggagcccccaaggtacctcctgaagttcgagcagatttacctctctaaacccacgcattgggaaagagatggtgctccttccccaatgatgccgaacgaggccaggctccggaacctaacctattctgccccattgtatgtcgacataaccaagacagtgattaaggagggagaggaacaacttcagacacagcaccagaaaacctttattggtaaaatccccatcatgctgcgctcaacgtactgcctgctgaacggcctgaccgatagggacctatgcgagttaaacgaatgccccctggatcccggtgggtatttcataattaatgggtccgagaaggtgctcattgcgcaagaaaagatggcaacaaatactgtgtatgtgtttgcgaaaaaagactccaagtacgcctacacgggcgagtgccggtcttgcctggagaattcctcgcggcctacatctactatctgggtcagtatgttagcgaggggaggccagggtgccaagaaatccgccattggccagaggatcgtggctacattgccatacatcaagcaggaggtacccatcatcatcgtctttcgtgcactgggctttgtatctgaccgtgacattctggaacatataatctatgatttcgaggatccggaaatgatggagatggtgaagccctcgctggacgaagccttcgtgatccaggaacaaaacgtagcattgaacttcatcggctcccgtggcgcaaagcccggagtcacaaaggagaaaagaatcaaatatgccaaagaggtgctgcagaaggaaatgttgccccatgtgggagtctcagacttctgcgaaactaaaaaggcctactttctgggctatatggtgcaccggctgctcctggcggcactgggcaggcgcgaactggatgatcgcgatcactacgggaataagcgactggatttagccggaccactcctggcattcctcttccgtggtatgttcaagaatctgctgaaggaggtcagaatctacgcacagaaattcattgatcggggaaaggacttcaatcttgaattggctattaagacacgcatcatatccgatggcctgaagtacagcctggcaactggaaattggggcgaccaaaagaaggctcaccaagccagagcgggagtctcgcaagtgctgaatcgattaacatttgcctcaaccctgtcccatttgaggagactaaactcacccatcgggcgagatgggaaactagccaaacctcgacagctgcataacacgctgtggggtatggtgtgcccggcagagactccagagggccatgctgtcggcctggtcaagaacctcgctctgatggcgtacatttcagtcgggtcacagccttctcctatcctggagttcttggaagaatggtccatggaaaacctggaagaaattagtcccgctgcaatcgccgatgctactaagatttttgtcaacgggtgctgggtgggcattcacaaggaccccgagcagcttatgaacaccctgcgtaaactgcgccgtcaaatggacattattgtaagcgaggtgtccatgatcagagatataagggaacgagaaataaggatatacacagacgccggaagaatttgcaggccgttgctcattgtcgagaaacagaagcttctgctgaaaaaaaggcacatcgatcagctcaaagaacgggagtacaacaactactcatggcaagacctcgtcgcgtctggagttgtggagtacatagatacactggaggaggagaccgtcatgctcgcgatgaccccagacgacctccaggagaaagaagtcgcttactgttcaacgtatacccactgcgagatccacccctctatgattctgggcgtgtgtgccagtattattccattccccgatcacaaccaatcccctcggaatacatatcaaagtgccatggggaagcaggcaatgggggtgtacatcacgaactttcacgtgagaatggatacactggctcatgttctgtactacccacagaagccactggtcaccactagaagtatggagtatctgagattccgcgagctccccgcaggaatcaactccattgtggccatcgcgagctacactggctacaatcaggaggactccgtcattatgaatcggtccgccgtggatcgtggcttttttagaagcgtgttctacagatcttataaagagcaagaaagcaaaaagggtttcgaccaagaagaagtgttcgagaaaccaactagagagacctgtcagggaatgagacacgctatttatgacaagcttgatgacgacggcttgatagcccctggagtgagagtcagcggagatgacgtgataatcggcaaaaccgtaacgctcccagaaaatgaagacgagctagaatccacgaaccggagatataccaagcgagattgctccacatttctaagaacaagtgagactgggattgtcgaccaagtgatggtgacattgaaccaggagggctacaaattttgtaagattcgggtgaggtctgtcaggatccctcaaatcggcgataaatttgcatcccggcatggacagaaaggtacttgcgggattcagtaccggcaagaggatatgccgtttacttgtgaggggattacacctgacatcataattaacccccatgcgattccttcaaggatgacaattggtcacctgatcgagtgcctccaggggaaggtgtccgcgaacaagggagaaattggcgacgcaacaccatttaacgacgctgtgaatgtacaaaagatctcaaacttgctctccgattacggatatcatcttcggggaaacgaagtgctgtacaacggctttacgggcaggaaaatcacaagccaaattttcattggccctacatactatcagcgactgaaacacatggtggatgacaaaatacactccagagccaggggccctatccagatcctgaataggcagcctatggagggaaggtctagggacgggggtctacggtttggcgagatggagcgcgattgtcagatagctcacggtgccgcacagttcctaagggagcgtttgttcgaggcctccgacccctaccaggttcacgtgtgtaacctgtgcggaatcatggctatcgctaatacacgaacgcatacttatgaatgtcggggatgtagaaataaaactcagatctcattagtgcgaatgccgtatgcatgcaagctgctgttccaggagctgatgtcgatgtccatcgctccgagaatgatgtccgtgtag

SEQ ID NO: 115122 - DNA, 3525 bp, Artificial Sequence
  derived and/or modified sequence
atgtacgacgccgatgaggacatgcagtatgacgaggacgatgatgagattacccccgacctgtggcaagaagcctgctggattgttatttcatcatattttgatgagaaagggctggtcagacagcagctggactcctttgacgagttcatccagatgtccgtgcagcgtattgtggaggacgcacccccaatagatctacaagccgaggcccagcatgcttctggggaggtagaggagcctcctagatatctgttgaaatttgagcaaatttacctaagcaagccaacccattgggagcgggacggcgctccgtcacctatgatgccgaacgaggctcgtctgcggaatctgacctacagcgctccactctacgtagatatcactaagacagtgatcaaagagggcgaggagcagctacagacccaacaccagaaaacctttataggcaagatacctattatgcttagatccacctactgcctgctcaatgggttgacggaccgcgatctgtgcgaactaaatgagtgccccctggatccaggtggttatttcatcattaacgggagcgagaaggtgttgatcgcgcaggaaaaaatggcgaccaatacagtctatgtgtttgcgaagaaggattctaagtatgcatacacaggagaatgccgatcctgtctggagaactcgagtcggccaacaagtaccatctgggtctctatgctcgcgcgagggggtcaaggggctaagaagtcagccattggccagcggatcgtagcaactcttccatatatcaaacaagaagttcccatcatcattgtcttcagagctctgggttttgtctccgatcgtgatatcctggagcatatcatttacgacttcgaagatcctgaaatgatggaaatggtgaagccctcattagacgaagcgtttgtaattcaggaacagaacgtcgcgctgaatttcataggcagtcggggagctaagccaggcgtaaccaaagaaaaaagaatcaagtacgctaaagaggttcttcagaaagagatgttacctcacgtgggcgtgagcgacttttgtgaaactaaaaaagcctattttctcgggtatatggtgcaccgactcctgttggccgctctcggtcggagggagcttgatgaccgcgaccactacggcaacaaacgtttggatttggcaggtcccctgctggcctttttgttcagggggatgttcaagaacctccttaaggaggtgagaatttacgcccagaaatttatcgaccgaggcaaggactttaatctggagctcgcaattaaaacgcggatcatcagcgatgggctgaagtactcactggccacaggaaactggggagaccagaagaaagctcaccaggccagagcaggggtgtcgcaggtgttaaaccggctaaccttcgcctcaactttatctcacctcagaagattgaatagccctatcgggagagacggaaaacttgccaagcccagacaactgcataatactctatggggaatggtatgtcctgcagaaacccccgaaggccacgctgtgggcctggtgaagaatctggccctcatggcctatatttccgttggatcgcagccttcacccatcctggagttcctcgaagagtggtctatggagaatctggaggaaatctctcccgcagccattgcagacgcaaccaaaatctttgtgaacggctgttgggttggcattcacaaggaccccgaacagttgatgaatacactgaggaagctcagaaggcagatggatattattgtttccgaggtcagcatgatcagagacatcagggaaagggagattagaatctacactgacgccggtagaatctgtcgcccacttctgatcgtggaaaaacagaaactcctacttaagaaaaggcatattgatcagctgaaggaacgcgaatacaacaactactcctggcaggacttggttgcaagtggggtggtggaatacattgacacactggaagaagagaccgtgatgttggccatgactccagatgatctacaggaaaaagaagtggcctactgctcaacttacacacattgcgagatacatccatccatgatactgggtgtatgcgcatccattatccccttccctgaccacaaccagagcccaagaaacacctaccagtccgcaatgggaaagcaggctatgggagtctatataacgaattttcacgtacggatggacactctcgcccatgtcctttactatcctcaaaagccattagttaccacgcgttcaatggaatacctgcgtttccgagaacttcctgccggaatcaattccatcgttgctattgcaagctacaccggctataaccaggaggacagtgttattatgaataggtcagctgtggataggggattttttcggtcagtattttatcgctcttacaaggagcaggagtctaagaagggatttgatcaggaagaggtcttcgaaaaacccacacgcgaaacatgccaaggcatgcggcacgccatttacgacaaactggatgatgacggattaatcgcccctggggtacgggtgtctggggatgatgtgatcatcggcaagaccgttactctgcctgaaaatgaggacgagctcgaaagtaccaatcggagatatacaaaaagagattgctccaccttcctgcggacctccgagactgggatagtggaccaggtgatggtcaccctgaaccaggagggctacaagttttgtaaaatcagggtccgctcagtcaggataccccaaattggcgacaagttcgccagtcgtcacgggcagaagggcacctgtggaatccagtaccgtcaggaggatatgccttttacctgtgagggcattacgcccgacatcattatcaatcctcatgccatcccaagtcgcatgacaattggtcacttgattgagtgcttgcaggggaaggtttcagctaataagggcgagatcggcgatgctaccccattcaacgacgctgtaaatgtccagaagatttcaaaccttctctctgattatggctaccatctcagggggaatgaggtcctatataatgggtttactggcaggaaaatcacgtcccagatttttatagggccaacatactatcagcgtctgaagcacatggtcgatgacaaaatccactccagagctagaggacccatccagattctgaataggcagcccatggagggtcgaagtagggacggcggtctccgcttcggggaaatggagagggactgtcagattgcccacggggcagcgcagttcttaagggaacgactcttcgaggcctccgatccatatcaggtgcacgtctgcaacctatgcgggatcatggcgattgctaacacgcgtacacacacatatgagtgtcgagggtgtagaaacaagacccaaatttctttagttcgcatgccctatgcgtgcaagctcttgttccaggaactgatgagcatgtccatcgccccacggatgatgtcagtttag

SEQ ID NO: 115123 - DNA, 3525 bp, Artificial Sequence
  derived and/or modified sequence
atgtacgacgccgacgaggacatgcagtacgacgaggacgacgacgagatcacccccgacctgtggcaggaggcctgctggatcgtgatcagcagctacttcgacgagaagggcctggtgagacagcagctggacagcttcgacgagttcatccagatgagcgtgcagagaatcgtggaggacgccccccccatcgacctgcaggccgaggcccagcacgccagcggcgaggtggaggagccccccagatacctgctgaagttcgagcagatctacctgagcaagcccacccactgggagagagacggcgcccccagccccatgatgcccaacgaggccagactgagaaacctgacctacagcgcccccctgtacgtggacatcaccaagaccgtgatcaaggagggcgaggagcagctgcagacccagcaccagaagaccttcatcggcaagatccccatcatgctgagaagcacctactgcctgctgaacggcctgaccgacagagacctgtgcgagctgaacgagtgccccctggaccccggcggctacttcatcatcaacggcagcgagaaggtgctgatcgcccaggagaagatggccaccaacaccgtgtacgtgttcgccaagaaggacagcaagtacgcctacaccggcgagtgcagaagctgcctggagaacagcagcagacccaccagcaccatctgggtgagcatgctggccagaggcggccagggcgccaagaagagcgccatcggccagagaatcgtggccaccctgccctacatcaagcaggaggtgcccatcatcatcgtgttcagagccctgggcttcgtgagcgacagagacatcctggagcacatcatctacgacttcgaggaccccgagatgatggagatggtgaagcccagcctggacgaggccttcgtgatccaggagcagaacgtggccctgaacttcatcggcagcagaggcgccaagcccggcgtgaccaaggagaagagaatcaagtacgccaaggaggtgctgcagaaggagatgctgccccacgtgggcgtgagcgacttctgcgagaccaagaaggcctacttcctgggctacatggtgcacagactgctgctggccgccctgggcagaagagagctggacgacagagaccactacggcaacaagagactggacctggccggccccctgctggccttcctgttcagaggcatgttcaagaacctgctgaaggaggtgagaatctacgcccagaagttcatcgacagaggcaaggacttcaacctggagctggccatcaagaccagaatcatcagcgacggcctgaagtacagcctggccaccggcaactggggcgaccagaagaaggcccaccaggccagagccggcgtgagccaggtgctgaacagactgaccttcgccagcaccctgagccacctgagaagactgaacagccccatcggcagagacggcaagctggccaagcccagacagctgcacaacaccctgtggggcatggtgtgccccgccgagacccccgagggccacgccgtgggcctggtgaagaacctggccctgatggcctacatcagcgtgggcagccagcccagccccatcctggagttcctggaggagtggagcatggagaacctggaggagatcagccccgccgccatcgccgacgccaccaagatcttcgtgaacggctgctgggtgggcatccacaaggaccccgagcagctgatgaacaccctgagaaagctgagaagacagatggacatcatcgtgagcgaggtgagcatgatcagagacatcagagagagagagatcagaatctacaccgacgccggcagaatctgcagacccctgctgatcgtggagaagcagaagctgctgctgaagaagagacacatcgaccagctgaaggagagagagtacaacaactacagctggcaggacctggtggccagcggcgtggtggagtacatcgacaccctggaggaggagaccgtgatgctggccatgacccccgacgacctgcaggagaaggaggtggcctactgcagcacctacacccactgcgagatccaccccagcatgatcctgggcgtgtgcgccagcatcatccccttccccgaccacaaccagagccccagaaacacctaccagagcgccatgggcaagcaggccatgggcgtgtacatcaccaacttccacgtgagaatggacaccctggcccacgtgctgtactacccccagaagcccctggtgaccaccagaagcatggagtacctgagattcagagagctgcccgccggcatcaacagcatcgtggccatcgccagctacaccggctacaaccaggaggacagcgtgatcatgaacagaagcgccgtggacagaggcttcttcagaagcgtgttctacagaagctacaaggagcaggagagcaagaagggcttcgaccaggaggaggtgttcgagaagcccaccagagagacctgccagggcatgagacacgccatctacgacaagctggacgacgacggcctgatcgcccccggcgtgagagtgagcggcgacgacgtgatcatcggcaagaccgtgaccctgcccgagaacgaggacgagctggagagcaccaacagaagatacaccaagagagactgcagcaccttcctgagaaccagcgagaccggcatcgtggaccaggtgatggtgaccctgaaccaggagggctacaagttctgcaagatcagagtgagaagcgtgagaatcccccagatcggcgacaagttcgccagcagacacggccagaagggcacctgcggcatccagtacagacaggaggacatgcccttcacctgcgagggcatcacccccgacatcatcatcaacccccacgccatccccagcagaatgaccatcggccacctgatcgagtgcctgcagggcaaggtgagcgccaacaagggcgagatcggcgacgccacccccttcaacgacgccgtgaacgtgcagaagatcagcaacctgctgagcgactacggctaccacctgagaggcaacgaggtgctgtacaacggcttcaccggcagaaagatcaccagccagatcttcatcggccccacctactaccagagactgaagcacatggtggacgacaagatccacagcagagccagaggccccatccagatcctgaacagacagcccatggagggcagaagcagagacggcggcctgagattcggcgagatggagagagactgccagatcgcccacggcgccgcccagttcctgagagagagactgttcgaggccagcgacccctaccaggtgcacgtgtgcaacctgtgcggcatcatggccatcgccaacaccagaacccacacctacgagtgcagaggctgcagaaacaagacccagatcagcctggtgagaatgccctacgcctgcaagctgctgttccaggagctgatgagcatgagcatcgcccccagaatgatgagcgtgtag

SEQ ID NO: 115124 - protein, 872 aa, Artificial Sequence
  derived and/or modified sequence
MSSKAEKKQRLSGRGSSQASWSGRATRAAVATQEQGNAPAVSEPELQAELPKEEPEPRLEGPQAQSEESVEPEADVKPLFLSRAALTGLADAVWTQEHDAILEHFAQDPTESILTIFIDPCFGLKLELGMPVQTQNQLVYFIRQAPVPITWENFEATVQFGTVRGPYIPALLRLLGGVFAPQIFANTGWPESIRNHFASHLHKFLACLTDTRYKLEGHTVLYIPAEAMNMKPEMVIKDKELVQRLETSMIHWTRQIKEMLSAQETVETGENLGPLEEIEFWRNRCMDLSGISKQLVKKGVKHVESILHLAKSSYLAPFMKLAQQIQDGSRQAQSNLTFLSILKEPYQELAFMKPKDISSKLPKLISLIRIIWVNSPHYNTRERLTSLFRKMSNEIIRLCCHAISLDRIFEGYVSSSKEDLQGCILCCHAWKDHYVQAVQMHIQFSSRGWVLDQTSIFAQVDAFVQRCKDLIEVCDCQYHFARWEDGKQGPLPCFFGAQGPQITRNLLEIEDIFHKNLHTLRAVRGGILDVKNTCWHEDYNKFRAGIKDLEVMTQNLITSAFELVRDVPHGVLLLDTFHRLASREAIKRTYDKKAVDLYMLFNSELALVNRERNKKWPDLEPYVAQYSGKARWVHILRRRIDRVMTCLAGAHFLPRIGTGKESVHTYQQMVQAIDELVRKTFQEWTSSLDKDCIRRLDTPLLRISQEKAGMLDVNFDKYRSHLAPFPYTPLLQLSQEFHSHLLTPLFIILSLSHTICLLSSFYFFFSSFIFVSPHLPPCYQHFNFTTYLKTQQNKTMIGQARWLTPVIPALWEAEVGASLEPRSLRTAWATWQNPVSAKNTKISWAWWHKPVVSATWEGEVGGSPEPGRQRLQ

SEQ ID NO: 115125 - DNA, 2351 bp, Artificial Sequence
  derived and/or modified sequence
agttctgggacaacaacggcggccgtgactatgctctacgtgggcccgagcacccgggcagtggcggagctccggagccgcagggctggatccactttatctgagacgaggcgcctgcggccgacggcggaaaacaccaaaggaacctggccactgctccttggtccttggcattatgacgggattcccttgtcacctctgacagttcctggctgcggtgtccgcggactggctggggagtgatgacagaagggatggaaaccctattttcttttctccaagaccatggttggtctgcttccctcactcgggctccttgacagtcttctagaagagagaaggaggaaaagaagcagttcctgatgttacaaatgaacaaggatctcccagaactatgactcgatcataaaatctgttttgtttgcatgcatgcccaaaacaaccctgaaatgatcatagtttctgactgtgctctgccttcccatcctgccaatctcctggactggcttggagaagacagggggcccccgagcttcatctgtgactcgaaggagtttgctgctgtctcctgtgtcagtgtcccatctatgcaggatcagcacaggacccccctcaccttcccacttacactctagcctttccatacattggaattctctcctggccctagccagcgctccacacctgttggtgtgccacctccctccctcttcccccactggccttgaacaggcaaaccccctaatgtcgccactaggttgggtccgtgactaggacacctgctagagggtctgtgcttgggccttttctaggaatcccgatgttactgggtaagtgccaactctgtgggcagaatgctaatgataatcctgttccctgacctctttctcagaagtaccctggctcactctccccaatctcagctttatagaacaacattttggtcttgattattcccatatcaagctgccccagggcttcggtaagctgttagttgccccactgcctcaaggctgggtctggctgagctacttcttaggcacacaaatagtgggtgtctccttggaacctgacacaaaactatcagtgctaccaagccttgtaaaatagggaggaaactaatatttcttgagtggcttctgagtgcctggtgctttcgcggctctctggagagattccttgccctgatggctttggtgtgtactcctctcccaggacttcagcactgagattttcccaaccccctggcttttcctcaccttgggttgagttgatccggcactaccacaaaccccaccatctgcaaaccaaccaagattaggcagtatgccctttccgtcttgcactgctcttccaaaacttccatctgtatttctcacaccctcagtaagcaaagctgagtgtgcatggacagagctgcatccactgctttctcccagcgggtgcagtctaatctgacacggggaacactaggagtttagcggaatcttcagccaccctattaatgtgttacgcattaggcattgtagtggaaactcctctgatggctcatgactatatgaacaggagcaatttggaatataacatgtcagctgtggactgggaagtgccgtgagagaaaacactacctgggtcataggcttgggtccctgaggcaacccagcagggacactgttgcccattcctctcatccagactgcaggtgtcttcctacacctccctgtcccatagcctccgtcctgttttttgtttgtttgtttttctttgtgaatgtagaaaaacatttcatcatgagccctagctcctcagttttccacctaacacccacattcccttgtttctaactgccgtgtttttctggagcctgctgggatctttgcagtttgcaggtcatagaatcagacatgaaaaggcttctcttccgacgtcattggttcctggctcctttacagatgagaacacaggtccagaggtgagaaatgactctagcagggtcatagaatttgttagtgcagctcaagatgggacttaaactcaggcctcctgatcacccattcccaggctaggaaacaggtctctgctcggtgtggtggttcatacctgtaatcgcaacactttgggaggctgaggcaggagcattgcttgagcccaggagttcgagaccagtctgagcaacatagtgggaccctgtctctacaaaaacttttaaaattagctgggcatggtggcacacatctgtattcccagctactcaggaagctgagacaggaggatcgcttgagcccaggagttggaggttactgagctatgatcgcaccactgcactccagcttggtgacagtgagaccctc

SEQ ID NO: 115126 - DNA, 4004 bp, Artificial Sequence
  derived and/or modified sequence
atatcccatgtacttatatgctctgtggaacatgttcttgtaaaattaacatatactctattacctccttattaatgggaaattctgagggactgccttcatccatcacaataagctgggcccctcagcgttccccgccccaagctgacaaggcaagttctgaggtccacagggagccaggagggaaggccgtctcttttcatccatgcaatgcctacactatgcagaaaagggaggacctcaagaccaagaagcgattatgttgcagcccttcttctgtgaacacgctcaaaaacacacgaatgttcccgctaaatcagtgactccatcaaccttgatccacaggccttggctgtggcagagggactgcaggaagccacgtggctgagaacccaccttcttattaccatgttgggcagtttctaggagtgcttcctggtttcagattttcttccctttcaaagcagggtgggggtggtgtaaagcccttgctcgggctaggagccagatacgtggcagcttaattttccccattatgcaggacaaataccaagaagaattcccaggtgtgtctgcagccgtgaaaatgtgacatgagtcacagtgtcttcggaggaaatgaaagaccacaggacggggacatggcatcatgaaaaaagatgctttgtgattttcaacatatggtgacacttttcctaatttagagggggaagctgggttttgagttttcttttatcctccctctttgttaaaagcaagagaaagaagatttaaagaacatctgtgtattcaaatgatagaaatagaattatacactttcaaaaacaagttctagtatttttgtctctttcaaagatttccgaagcctatagatttctctcgtgtttgtgagagcatttcctctgagaccttagacatagtgttgaagttgaaatggtttttgtctttttcccctttctgttaacccagcccccacttcattctgttaatctcctttaattggacttaagataagactgagtatgttcaatatttttattgaattgagttttatgtttccagtctggatttatagactgttaaatagaatgttttacgtttctctctctcgcaaagaaaataacaaatacgtgtgggacagagccatcagtcaattatatcagtggattgttggcaactcacagggggaaaaaaaagagcattttcactctactcttaggggaaagcaattatatttaagagcagtagaaagccaaaactagcctggaacttcaaaacgcctttcttgactgaccaagaaaaggtacagtgactacaatgacaaaccagcccccagctcttttagaaatctaccctgcctcatgctaaagagaaagtaagtgatgtttcagcctcggcgaccaggcaggaatagaaaaatacattgacagtagttggatagaccttaaaattaagtaaaaatttcttaatatacaagatctcagttttcccacaaacctcctttctgtccagaaatttccatgccatttactgcctgatcatgtcaggaatgacgttcttccttgttcttgattttccttcctggaatgttttaatcctgcctctccagaacacttttccctacttcttctaggccctactcacagcaatgtagctgacacatagcattagcgtgcaaaacctcaaatcctttctgacttggaacttcacccaggaaagacctctagcaaaagtgctggccattgtgtcacaggacaaacccctttcaaagaacaaagccatcatcatctcaaaagccacagtcaccacctggaccttccgtcctgaggaaaggaatctccaccgaatctagggggaagacccccccaccagtctgtgcaaaagatgaagaattgagtatgcacctacctgtgcccttccatttccacctcttcccaccttccccgtttctttttccgttcatttttttttccactttaaaaacatccaactttgccttggggatgagcagaatgaaatgtcacttacctataaaaagagacagaagagaaagccatgcatcacattacacacaagttctttgaaatcaaggccagcttccgactttgaaactgtaacaatgagtgaatattattttttcatcctacctttctatatttaatgaaactcaggagttcgcaagtagcctatccccagggcccagtctcccttcgtgattttccttttgtttctttgcctcctccgtccctcttcaccaccctagccccacaccctctgtccccgcttcatggatgaaaggtcaggaaggaataaggggggaggggtgcacagacccagagatcaaggccagccctcagatgtgggcagcaaggtttcgaggcatgaggagccgcttttcacctcttttctcacaggccacagagatgggacccagggtcagtgccggctggtgcctctcgggaggagggaggaaggtcagctccctgcagggtgattttccacctggtggcttctgggctctttcaaatgactctgctctgagtcttcctcctctctccctccctcaccctcaccccctccgccctcctggtttgggtgtgaatgaattcacccaaggtctccatccccctcttcatcctgcagcatctgtctttcagacctgcttctacagaaaacctcattattgcagcaccctgaggccaacaaccacctgaatgggtcattgtgttcagtcccctgcctcaatacatgatgcaaactggcccacccgagtcctacgggacactttgagaaccctgagatactgagtccccgccttgcccggctcctggccgcagaggctccctgtcttcatgcaacaagctccttgtggccgactgattcggttctgtcggctgtaaggaagccaggctctgagcattctacttgcaagaacagcccctcacccaccacgctatgtagcggatccttcacgtgctcacatattggaaaattggcttcagggtcctgccagtgtcttcttcttcttatgcctgaataactcatttccttttagactcttcttaaaggtttcagttttccatctttcctcctccaagctcctctgagaccctccgtggaggacagctcagagctaagccctggagagaaaagcagccacgtgtcccccgattctgttgctgcatcccccaaagagatttccaaccaagatgctctgccagaaatggaattacggtcaaatattgcatcccgatcacattggtatgttaaagacttggagagggttcgaggtaaagatctatgctgaaacttttcctaacggtatttgactcagaaatgtttcttgctatatataaactaaaacaccgtacttcagaaggatgactactttttctctcattatgaatgtaaaactaaatacaattgagttggtattatcacaagcagtggccagaggaccttgaagtcgatggcccggccaccatgcccagctaattttttgtatttttattagagacagggttttgccatgctgtccaggctgttctctaactcctgacctctggtgatccgcccacctcggcctcccaaagtgctggaattacaggcgtgagccaccgcgtccggccgcttacaccttttaaagcttctgattctgctgtctctgctctgtggctttgcatctgggcaagtttctccgcagaccaggaacctctaagtcgggggaggaaagagaggtcgctgaatcagagcaaggcatgccgtcctcgtctgcatcctctattactcttgaataagagagaatgcgaggacaaacgggcatcagcatagtgacgtgtccatgtaggttcacgaatgtaagagctgcaccacgtgggtgtggaatgttaacagttggggaggctggggcagtgggaaaaggggtctatgggaatgctctgtattttccccttattttactggaacctaaaactgctccaaaaataaagtttatgaatgaaaac

SEQ ID NO: 115127 - DNA, 2970 bp, Artificial Sequence
  derived and/or modified sequence
acgtctgcggtgttacccacgactgcctgggacctggccaagggctccacacaccaagaccaaggcagcaggaaggagaaaggagggaaggtaaaagactactgaaaagctttcagctggggctgggcatggaggctcacacctgtaatcccaacactttgggaagccgaggctggtggatcacttgagcccaggagtctgagaccagcctggccaacatggcaaaaccctgtcgctacaaaaaatacaagaattagccatgtgcacctgtggtcccagctcccagggccgggagcctgaaaccaaggtgtccacagggccctgctgcccccagaggctctgggcagagcccttccgcctttccagctccccctggttcccgtgctcctcggcctgtggccccatcactctggcctctgccttcatctcatgccgagatccctgaagcgggcccagctccgttcactgctcccccggcctcctgctgtttcccacacgcagccatggtacagggcagctcatcccaccacctccccaaccgcagcctccagggatgtacaccctgcctcaggggctgtgcctgggccctggctggtggagggcacagccgtcagggaaggccctcagctgcaggatgccgtgcctcagagaccaaccaggccctcgaaggcactgtggccggcccagatgtcagcagctccagcaattaggctgggacagatggtgcctggtgacacaaggggactgtgggggccacaggggaccctgctcacctggacctaccgtggaggccagggagggagatggactcgaagggcggaagggcccagagaaggcacatttgcagagcagcggccgcatttccagagctcgggagcccaacaggaatcccgtctggccatgggaccaccgcccttggggctgggggatgccgcaggggacggcagagggcagacaggccaggaaaaggggagggcagagggcagacaggccaggaagagcgcctgcaagtgcccaaggaagggaccaaacccaggcccctggaccagagcggccgcctggtggggcaggctggaaggggccaaggccagcgccaagggggagcaggtgagggaccctggtgggcatctgtgggaacaaggccacgtttctccctgcgcacgctttaatcaaggacattcctgtggttctccaaaagtgtcgcacactacatgggtgtcgtgagctgggctccgtgagagtgtgcgggtggctgggggcagcaagggagcagcaaggcctcaaacccgggcggcggcctggcctgcgcgccaggatgtgcggtgtgagtttcccgagctgcaggaacaaggtccacagactggggagcttcacacaacagaaactgcctcgcagttcccgaggccagagcccatcggggtggctccctgaggccgtgagcccggactgtcctgggccgccccctcttccacaggctgagatcatccttggcgtctgttggcctgcggccgcctcgcccaacctctgccctcatgtccacacgggtcctccctgtgtgcatgttggtgtctggatctgccctttctactgtggggcaactgtcgtcgaggatagggcccaccacacaacacggcctcatcgtaactaagtatagtcagcagtgatcctatttcccaataaggtcccattctgaggtcctggacttcaacatgtgaattttgggggccacaactctaccctggcatgcagagagagaaggggggcgtggagtccccctggggggaagtcccttgggaagtcacaggcccccttggtggggcaattgggacgtgggtgtgagggtcctgggtacagggagcctgcctaccaaggctctgccgacagctatttctaaattcctcgtggaaaataccctgtggccctcctcatctggagcgagcgacgggctggagggtgtctgagccaggctggtgccggggagcagatgtgggtggcccaacccagccccttgttcttgttccccacctcccaggaaagggggagggtgggcggagccggccctcctgggctctctccttgggtcccggagccacctggggaggggaggctcaaccccctaccttggccagctggctgcaggtctctcagggctggcacagaacagctgggctttgccaggtgtcccccatcctgatgcacggcccggtggtgcggtctccaggcctcccaggattctcagctgcgccgtctccccagtccccaaaccccagtggtggccgccaggggactggaccgtcagtctgtggagctggggctgcagctggtggtgtttccaacaagggtcttttggctgcctggctccagggagaggcctctggaggcaaggggtaacctaccgggaaagcctcaaaggcacccccatccccgccccgcacagactccaccggccccccatggttcctccaggccctcttcagtcatgacaggcagtgcctgggtgcccggcctgctcagcacaccctgggcctcagccccacccaagccttggcctagcatgggagccaccacgggaacacacacacgggctggagggtgtctgagccaggctggtgccggggagcagatgcgtcagatggaggagaaaagccctggggcagcggcttctggagctctggccaaggatgggctctgagcacacccctgcccggcccagagcaccaggccggggcagggtcaggaacagcttgaagccccctgcaaagtctgtccctcctcctggagcctcagctgcccctccaacacagccctctgtgggagcctagatggcccccgtgtggccatgagacatgggcgggcgctggtggattcctctgtgtcaggtgacatggtggcaccccggccgcaggctgtgccccggctgtggcgttaagaagggctatggatctaaataaaatccagtctctttgctgg

SEQ ID NO: 115128 - DNA, 3266 bp, Artificial Sequence
  derived and/or modified sequence
cacaggcaggccgtacctcgaaatcccagcggggacacctgtcagggagacgcaccctcacaccgcccatgcatgcccgacgcatctttgggatccttagggatcacgtggtgcttccttgaatctccgcttgaggtttcttcaggcaggttcggccttgcccgactcctaggatcgcaggaccatggcgacgatcccgcggagaggggacgcactgccacagacgcctgggggccaagccgctggggccagtcccccggcaacggtggcggttactgtgacgcgagtcccccctcagcgctagcgcctggtgatcgcgcctgggctcttcctgcgtctccaagctcaggggctcctgcttctcagcactgctgtctggaaaaggcgggaacgaggactaaggcaagcccagtgtggggcagagatggcaacacctggaactagcttttcatgggggcagataatgtggagagtgtcccaattacatctccctttattctatcccatactactaaaccccaccagctatttgcctacaaactgtgtatcagtcaggacatcaggacaccaagataaaggactagagtttggtaatcaactactggctcctccagcagctcagaatgtggcctgtatgcatcacttcacttaattcattcaagaaatgctgactgagttcctgctgtgtgttggacactttcttagaagtgggacacactgcagtgtgtgggacaaaggctgggccgctcattgcttatgttctagttgaagagagagtcaatcaacaacattctactttcagacattgataaatgctgtcatgaaaagacaaggaacatgaaaaggtaagaaaagggatggagagagatgggatgaggggtgcctgggcagacaatgcaatgatctggcaaaagagtaggacaatcatgagactgcatgtgttccagtttctgctgctgtaaaacagcatccacaggttacatctttactattctgttacatacatactattatttaaataaaaaatagtactagttaactgtgaaaattgcaattaatagggcagattaaacaaatcctttaaatttaaacaaatgttttatggttttttatcctctgatacattgtttcaactttaaaaaaccctctttatttgatatttaaactctatattaatgtatattcttaagatacataaatttaagatttttttcgagacagggtctcattctgtcacacagtctggagtgctgtggtgcaattatggttcactgcagactccacctctccaggctcagataatcctcctgcctcagactcctgagtatctgggaccacaggtgtgcatcaccacacccagctaatttcttgtatttttttgttgggatggggttttgcgatgttgcccaggctggtctcaaactcctgggctcaagtgatctgcctgccttggtgtctcaaagtgttgggatcacaggcgtgagccaccacatccagcctaatttaagatttttaaaaagcagaatgtaaatatggtcatgcattgtgtaattctgtggatactttctgagtaatgcatggttaggtgacttcatcattatgtgaacattatagagtgtacatacacaaacctagatgatgtagcctgatggtacagcctatcacttcgaggctacaaatccaaattgcctggatactgtaaacaattatactcaatggtatttgtgtatctaaacatgtctaaacatagaaagggtacagtaaaaatatggtataaaagataagaaatcgtataccggtatacagcacttaccgtggatggagcttgcaagactggaagttactccgggtgagtcagtgactgagcggtgagtgaatgtgaaggctagggcagtactgtatactactgtagactttatatgtactgtatgcttaggctacactaaatttatttgaatttttttgtcggtaataaattaaccttagcttactataatttctttataaaccttttaatttttaaaaatgttttgactctcttgtaataaattagcttcaaacacattgtatagctgtacacaaatattttctttatatccttattctataatcttctacttaaaaatttttttaatttttttattttaatttaattttattttattttgagacagagtctcactctctcgcccaggctggagtgcagtggcgtgatcttaactcactgcaacctccgcttcccaggtaatattatttaaataaaaatagtactagttaactgtgaaaattgcaattaatagggcagatcaagcaattctcttgcctcagcctccagacttttttgttaaaaactaagacacaaacacattagcctaggtacacacagtgccaggatcatcaaaatgtcattaggcagtataaacttttcagctccataaaagttggaaaaaaaataataataataaatacaattttataaaaagaaaattttcagctctgctataatcttatgggaccactactgtatatgtggtccctcattgaccaaaacatcattatgtggcacatgattataacaaatgatggatggcgaggttgtgaagaaactggaacccttgtgcattactggttgtaatataaaaaggtacagccactgtaaaaaaaaaacacagtttggttatttcttcataagttaatcatagaattaccatataatccagcaatttcacttctaggtatatgcccaaaataattgaataaggtgtttaaacataaacttgtacaagaatgttcatagcagtacatttcacaatactcagataatcctctcattggaagcaactcaaatgtccaccaactgatggtattacccatgcaatggaatattattcagtcataaaaaggaatgaagtactgaggcatgttacaacatgaaggaactttgaggacagtttgttaatacgctatatactgtgtaattctatttatatgaaatatccagaataggtaaatcattagagactagagacagcagattagtggatgccaggagtttggggaaggaaggggtgggaagaatgggaagtgactgcttaatggatacagggtttctttttggggtgatgaaaaatttctggaactagattgtagtgatggttgcacaacaccgtaagtgtaataatgtcactgaattatacactttaaagtgatttaaatggtaaattgtattatttatgtattttaccacaataaagaagtcacctatc

SEQ ID NO: 115129 - DNA, 2797 bp, Artificial Sequence
  derived and/or modified sequence
agaaacagctcttctggcatgatggtgacctgccatggaaaatgctgggtcccaatgcccaagtgactgtagttgtggctcagccaggacccgaccatttagatcacctgttgttagacacgcaacactgtcaacatagttcctgtgggtcagcagcctgtacacagcttacctgggtcccctgcttggggggatctcacaaggcttcaatcaagatgtcagcccaggctgtggtctccactgaggctccgtgggaaagaccctgcttccaagctcacctaggttgtttgcaaaattcggttctttgcagctgtagaatggagggcttcagtttatttctagctatgctgtggggcggggtgggggagctgccctcagatcctagaggtcacctgcaattccttgccacttgactatgtccacagaggtggtccatgcatttctgcttcctttgccaaagccagcaacaagagactccaacaagacacatcctaccatctcatgtatgcaatcccgtgcaggcaatcatggacatgtccatcacatacataaccacgtccattccatcacctttgctgtattctattggcccactcaaagggtgtggactaattagggagcgagaatcagccctcttaagtcagccctctctatttcatgtgccaactctctagaatattgatccttttggtattttaagtcatatctattgtcactggaaatcctttttgaagtagaaaggacagagctcacaaaatacaaaccgcgccactattcctgcctgtcatttagagttttgccaggggagcaggttgatttcagtcttttcatggagtttactgtttgatatgatgatatctttacccccataattaattttatttttagttttgagacatggtctcattctgtcactcaagctgtagtgcagtggtgccatcttggctcactgcaacctcaaccagcccaggttcaagagatcctcccacctcagcttcctgggaccaccccagtgggatcactggcgcaaaccactatgcccaactaatttttaaaaattctttgtagagagggggtttcactatgttgctcaagctggtctcaagctcctgggctcaagcaatctgcttgccttgggctcctttgggatcccacaaagtgctgggattacaggtgtgagccaccacacctgcccccgccccataattaattttaagttaatctccacatttcattatcttgggctagatttcgggggaggggcctaatttagctggcatgtgccccattgggtgaatcgaataaaagcatagctgccctggcatggatctgtgaacaaaagttctctgaaaagaaatttggaagaaagacttcattcaggaacagttcacaaactttctgtgtaaaccagttactttccagagaacaaagggaggatcctggttttatagtaaaagttcatgctcaggttgccaatcaggtccattttatgaaaatgaaggctttaaatttgcttagttctgtttggttgatgcagctgcattctgattagtggttagaactgagccctaattggttctttcagatgagctctgattggctgctttaggtgagctctgaaagccccactgttaaactgaggttgggggtttccagggaaactccgagtatatgagttctagtcagcaaatggcctggccacttggctctctttaaaattttggcccagttaggtacttgggatccatcttgaaggattggctcttgaaggatttgttctgagaacacttgtgaacttgagaggcccagtaaggcagagtgaaaaccagaacgcttggcacctatcagttagcacaggatccttccctggaacatcagcatcccttataagtgtgtctaacggccaactcgtagacagagctattgttaatacactgttctgagtatccctctgtgaacaccttcatctggttgatacaggaaaattaaggaagacaaagttttgggaaagtgattgaaatcgtggaataatcaaagcaaatcaatggcagcttgtgtttaaaattaaaaaccaactgtcaagcatggcatttacctaaagtaatttccaaaagtaatcaacagagtgaacaacacccagtgggccaggaccatgtcaacgttggctcattttcagaaacaacatggtgtcagggctccatgttcatggacaccatgaggggagtctcctagcaatgaccctcttctctcctgcaggaagtccaaggtcctttgcatggcagtcttatccccaaatggcatttgctttcgacccatggtatttccatattccatgaagaaaactttaaaaatataggcaaatcaccctgcaagtatccagagagtttccagggggtttctcacacacacacacacgcacacacacacacacacatgtttagtggggatcttttaggtcaatacatatagatctacatcattattagttgttgcttggtgggccactgcatgaatggttaataattgtttaatttttcctagttagacaataaagatttttaaagaatatatctttgcatacttgcttatttatttgattaggataaattcctgaaattggaattgttaaaccaagaaatacgcatatttttaaggcttttgttatgttttgtcaaatgatcctcagaaagaatgtttattaattcacatttccactagcactacacgatagaactattgggtattttttatgctgttacctttgctggttttataaataaaatattctcttgttctt

SEQ ID NO: 115130 - DNA, 2884 bp, Artificial Sequence
  derived and/or modified sequence
aaaatgacctctgagtcttacacattctgcctgctaagagtgattttgcatgcctgaggcctcgggccatgctgtaccggtgtgactagaaacagctcttctggcatgatggtgacctgccatggaaaatgctgggtcccaatgcccaagtgactgtagttgtggctcagccaggacccgaccatttagatcacctgttgttagacacgcaacactgtcaacatagttcctgtgggtcagcagcctgtacacagcttacctgggtcccctgcttggggggatctcacaaggcttcaatcaagatgtcagcccaggctgtggtctccactgaggctccgtgggaaagaccctgcttccaagctcacctaggttgtttgcaaaattcggttctttgcagctgtagaatggagggcttcagtttatttctagctatgctgtggggcggggtgggggagctgccctcagatcctagaggtcacctgcaattccttgccacttgactatgtccacagaggtggtccatgcatttctgcttcctttgccaaagccagcaacaagagactccaacaagacacatcctaccatctcatgtatgcaatcccgtgcaggcaatcatggacatgtccatcacatacataaccacgtccattccatcacctttgctgtattctattggcccactcaaagggtgtggactaattagggagcgagaatcagccctcttaagtcagccctctctatttcatgtgccaactctctagaatattgatccttttggtattttaagtcatatctattgtcactggaaatcctttttgaagtagaaaggacagagctcacaaaatacaaaccgcgccactattcctgcctgtcatttagagttttgccaggggagcaggttgatttcagtcttttcatggagtttactgtttgatatgatgatatctttacccccataattaattttatttttagttttgagacatggtctcattctgtcactcaagctgtagtgcagtggtgccatcttggctcactgcaacctcaaccagcccaggttcaagagatcctcccacctcagcttcctgggaccaccccagtgggatcactggcgcaaaccactatgcccaactaatttttaaaaattctttgtagagagggggtttcactatgttgctcaagctggtctcaagctcctgggctcaagcaatctgcttgccttgggctcctttgggatcccacaaagtgctgggattacaggtgtgagccaccacacctgcccccgccccataattaattttaagttaatctccacatttcattatcttgggctagatttcgggggaggggcctaatttagctggcatgtgccccattgggtgaatcgaataaaagcatagctgccctggcatggatctgtgaacaaaagttctctgaaaagaaatttggaagaaagacttcattcaggaacagttcacaaactttctgtgtaaaccagttactttccagagaacaaagggaggatcctggttttatagtaaaagttcatgctcaggttgccaatcaggtccattttatgaaaatgaaggctttaaatttgcttagttctgtttggttgatgcagctgcattctgattagtggttagaactgagccctaattggttctttcagatgagctctgattggctgctttaggtgagctctgaaagccccactgttaaactgaggttgggggtttccagggaaactccgagtatatgagttctagtcagcaaatggcctggccacttggctctctttaaaattttggcccagttaggtacttgggatccatcttgaaggattggctcttgaaggatttgttctgagaacacttgtgaacttgagaggcccagtaaggcagagtgaaaaccagaacgcttggcacctatcagttagcacaggatccttccctggaacatcagcatcccttataagtgtgtctaacggccaactcgtagacagagctattgttaatacactgttctgagtatccctctgtgaacaccttcatctggttgatacaggaaaattaaggaagacaaagttttgggaaagtgattgaaatcgtggaataatcaaagcaaatcaatggcagcttgtgtttaaaattaaaaaccaactgtcaagcatggcatttacctaaagtaatttccaaaagtaatcaacagagtgaacaacacccagtgggccaggaccatgtcaacgttggctcattttcagaaacaacatggtgtcagggctccatgttcatggacaccatgaggggagtctcctagcaatgaccctcttctctcctgcaggaagtccaaggtcctttgcatggcagtcttatccccaaatggcatttgctttcgacccatggtatttccatattccatgaagaaaactttaaaaatataggcaaatcaccctgcaagtatccagagagtttccagggggtttctcacacacacacacacgcacacacacacacacacatgtttagtggggatcttttaggtcaatacatatagatctacatcattattagttgttgcttggtgggccactgcatgaatggttaataattgtttaatttttcctagttagacaataaagatttttaaagaatatatctttgcatacttgcttatttatttgattaggataaattcctgaaattggaattgttaaaccaagaaatacgcatatttttaaggcttttgttatgttttgtcaaatgatcctcagaaagaatgtttattaattcacatttccactagcactacacgatagaactattgggtattttttatgctgttacctttgctggttttataaataaaatattctcttgttctt

SEQ ID NO: 115131 - DNA, 2619 bp, Artificial Sequence
  derived and/or modified sequence
atgagttccaaagcggagaagaagcagaggctctccggtaggggcagcagccaggcttcttggtcagggcgggcaaccagagctgctgtagctacacaggaacagggcaatgctccagcagtgagcgaacccgagttacaggccgaacttcctaaagaggaaccagagccgcggttagagggacctcaagcccagagcgaggagagcgttgagcccgaggcggatgttaagcctctgtttctgtccagagcagccctcaccggactagcggatgccgtctggacacaggaacacgacgccatactcgagcacttcgctcaggatcctacagaaagcatcctgaccatttttatagacccgtgcttcgggctcaagctcgagctgggcatgccggttcagacccaaaaccaacttgtatattttatccgccaggcgcctgtgccgattacctgggagaatttcgaagcaaccgtccagttcgggaccgtccggggcccttacatcccagccctgctgaggctcttaggtggagtatttgctcctcagatttttgccaacacaggctggccggagtcgatcaggaatcactttgccagccacttgcacaaattcctggcctgtctgactgatacacggtataagctggagggacatacagtcctctacattccagctgaggctatgaatatgaaacctgaaatggtcattaaagacaaagaactagtccaaaggctcgaaactagcatgatccactggaccagacagatcaaggaaatgttgtccgctcaggagactgtggagaccggcgagaatctggggcctttggaggagatcgaattttggcgaaatagatgtatggacctgtcaggaattagcaaacagctggtgaagaagggagtgaaacatgtggaatccattctccatctagcaaagtcctcgtacttggctccttttatgaagttagctcagcagattcaggacggcagcagacaggcccagtccaacctgacatttttaagcatactgaaagaaccttatcaagagctggcattcatgaagcccaaagatatctctagcaaattacccaagctcatttccctaattcgcatcatctgggttaattcaccccattacaacaccagggagcgccttacctcactttttaggaagatgtctaacgagatcatacgactctgttgccatgcaatttctctggatcgaatcttcgagggctacgtgagctccagcaaagaagacctccagggatgcatactgtgttgccatgcttggaaagaccattacgtgcaggctgtacagatgcatattcagttttcatcgaggggatgggtgcttgaccagacatcaatcttcgcccaggtggatgcattcgtgcagcgatgtaaggaccttatagaagtttgtgattgtcagtatcatttcgctaggtgggaggatggaaagcaagggccactgccctgttttttcggcgcacaggggccccaaatcacaagaaacttactcgaaattgaggacatttttcacaaaaacctgcacactctcagagccgtacgtggcggtatcctggatgtgaaaaacacatgctggcacgaggattacaataaattcagggccgggattaaggatctcgaagttatgactcaaaatctgataacttccgcatttgagcttgtacgggatgtgcctcacggagtccttctgctggatacatttcatcgcctggccagccgagaggctattaaaagaacatatgacaagaaggccgttgatctgtatatgctgttcaactccgagttggctctagtaaacagggagagaaacaagaaatggcctgacctggagccatacgtggctcagtactccggcaaagcccggtgggtgcacattctccgacggcgcatcgatcgcgtgatgacatgtctcgctggcgcccactttctcccacgcattggcaccggcaaggaatctgtgcatacataccagcagatggtgcaggccatcgacgaacttgttcgcaagacattccaggaatggacaagttccctagataaagactgcatcagacgactcgatacacccttattaagaataagccaggagaaagcaggtatgcttgatgtgaacttcgacaagtatagatcccatctcgccccattcccgtacacgcctctgctgcagctgagccaggaatttcactcacatctgctgactccattgtttataatcttgtcattgtcccataccatttgcctcttgagctccttttacttttttttcagcagcttcatctttgttagccctcaccttcccccttgttaccagcactttaactttacaacctacttgaaaacccagcagaataagacaatgatcggacaggcgagatggcttacacctgtgatccctgctctctgggaggcagaggtgggagcttctttggaacctagatccttgaggaccgcatgggcaacctggcagaatcccgtcagcgcaaaaaacactaagattagctgggcatggtggcataaaccagttgtctcagctacatgggagggcgaggtgggagggtcccctgagcctggccgacagaggctacaatag

SEQ ID NO: 115132 - DNA, 2619 bp, Artificial Sequence
  derived and/or modified sequence
atgagcagcaaggccgagaagaagcagaggctgagcggccggggcagcagccaggcctcctggagcggccgggccaccagggctgctgtggccacccaggagcagggcaatgccccagctgtgtctgagcctgagctgcaggccgagctgcccaaggaggagcctgagccccggctggagggcccccaggcccagagcgaggagagcgtggagcctgaggctgatgtgaagcccctcttcctgagccgggccgccctgaccggcctggctgatgctgtgtggacccaggagcatgatgccatcctggagcactttgcccaggaccccacagagagcatcctgaccatcttcatcgacccctgcttcggcctgaagctggagctgggcatgcctgtgcagacccagaaccagctggtgtacttcatccggcaggcccctgtgcccatcacctgggagaactttgaggccaccgtgcagtttggcaccgtgcggggcccctacatcccagccctgctgcggctgctgggcggcgtgtttgccccccagatctttgccaacacaggctggccagagagcatccggaaccactttgccagccacctgcacaagttcctggcctgcctgacagacacccgctacaagctggagggccacacagtgctgtacatcccagctgaggccatgaacatgaagccagagatggtgatcaaggacaaggagctggtgcagaggctggagacctccatgatccactggacccggcagatcaaggagatgctgagcgcccaggagaccgtggagaccggggagaacctgggccccctggaggagattgagttctggaggaaccgctgcatggacctgagcggcatcagcaagcagctggtgaagaagggcgtgaagcacgtggagagcatcctgcacctggccaagagcagctacctggcccccttcatgaagctggcccagcagatccaggacggcagccggcaggcccagagcaacctgaccttcctgagcatcctgaaggagccctaccaggagctggccttcatgaagcccaaggacatcagcagcaagctgcccaagctgatcagcctcatccgcatcatctgggtgaacagcccccactacaacacccgggagcggctgaccagcctcttcaggaagatgagcaatgagatcatccggctgtgctgccacgccatcagcctggaccgcatctttgagggctacgtgagcagcagcaaggaggacctgcagggctgcatcctgtgctgccacgcctggaaggaccactacgtgcaggccgtgcagatgcacatccagttcagcagccggggctgggtgctggaccagaccagcatctttgcccaggtggatgcctttgtgcagcgctgcaaggacctgattgaggtgtgtgactgccagtaccactttgcccgctgggaggatggcaagcagggccccctgccctgcttctttggagcccagggcccccagatcaccaggaacctgctggagattgaggacatcttccacaagaacctgcacaccctgcgggctgtgcggggcggcatcctggatgtgaagaacacctgctggcatgaggactacaacaagttccgggccggcatcaaggacctggaggtgatgacccagaacctgatcaccagcgcctttgagctggtgagagatgtgccccatggagtgctgctgctggacaccttccaccggctggccagccgggaggccatcaagaggacctatgacaagaaggctgtggacctgtacatgctgttcaacagcgagctggccctggtgaaccgggagaggaacaagaagtggccagacctggagccctacgtggcccagtacagcggcaaggcccgctgggtgcacatcctgcggaggagaattgacagagtgatgacctgcctggccggggcccacttcctgccccgcatcggcaccgggaaggagagcgtgcacacctaccagcagatggtgcaggccattgatgagctggtgaggaagaccttccaggagtggaccagcagcctggacaaggactgcatccggcggctggacacccccctgctgcgcatcagccaggagaaggccggcatgctggatgtgaactttgacaagtaccgcagccacctggcccccttcccctacacccccctgctgcagctgagccaggagttccacagccacctgctgacccccctcttcatcatcctgagcctgagccacaccatctgcctgctgagcagcttctacttcttcttcagcagcttcatctttgtgagcccccacctgcccccctgctaccagcacttcaacttcaccacctacctgaagacccagcagaacaagaccatgattggccaggcccgctggctgacccctgtgatcccagccctgtgggaggccgaggtgggcgccagcctggagcccaggagcctgaggacagcctgggccacctggcagaaccctgtgtctgccaagaacaccaagatctcctgggcctggtggcacaagcctgtggtgtctgccacctgggagggggaggtgggcggcagccctgagcccggccggcagaggctgcagtag

SEQ ID NO: 115133 - DNA, 613 bp, Artificial Sequence
  derived and/or modified sequence
gtgatcctcccgcctcagcctcccaagaagctgggatgacaagtgtgtgccaccatgcctggctaatttttgtatttttagtagaaacagggtttcaccattttggccaggctgttctcaaactcctgacttcaagtcatccactcgcctcggccttccagagtgctgggattacaggcatgagccactgcgcccagtctgtctcattgttgatggggacattgaataaacctgagtattgtgtgcctgtattttgactgcgacctatcagatgagatcaggtcaagagacaactgcctttgaaagagagtgagtgactgtttccaaaacagcaagcatagggagagccgccggaagtattgacggaaagcttgaattacctacatgattgatgatggtctccagctgtcaaagaagattgtggttgccaagagaaaggtaaccatttctcatccccttgagtggaattggatgcctctaggagcccacattggctggcagtagacatggccgaatttacaagctacaaggagacggcctccagccgccacttgcggtttaagctacagagtctaagccgccgccttgatgagttggaggaagccacaaaaaa

SEQ ID NO: 115134 - DNA, 2619 bp, Artificial Sequence
  derived and/or modified sequence
atgagcagcaaggccgagaagaagcagcggctgagcggccggggcagctcccaggccagttggtccgggagagcgacccgcgccgccgtcgcaacacaagagcaggggaacgcccccgccgtcagtgaacccgaactgcaggccgaacttccaaaagaagaacctgaaccccgactggagggaccccaggctcagtcagaggaaagcgttgaaccagaagcggacgttaaaccacttttcctgagcagagccgctctcactggactggctgatgcagtgtggacccaagaacacgatgccattttggagcattttgcccaggacccaacggagagtattctgacaatatttatcgatccctgctttgggctgaagttagagttgggaatgcctgtacaaacacagaatcagctcgtttacttcatccgccaggctcccgtgcccatcacctgggagaattttgaagccaccgtgcaatttggcaccgtgaggggcccctacattcccgccttattgcggctgctcggcggagtgtttgccccacagatcttcgccaatacggggtggccagaatctatccggaaccactttgccagccacctccataagttcctggcatgcttgactgacactcgctacaagctcgaaggtcatactgttctgtatatccccgcggaggctatgaatatgaaacctgaaatggtgatcaaagacaaggaattggttcagagactagaaacaagcatgatacattggacgcggcagatcaaggaaatgcttagcgcccaggagacagttgagaccggagaaaacttaggccctttggaagaaattgagttctggcggaacagatgcatggatttaagcggaatcagcaaacagctggttaagaagggggtgaagcatgtagaatctatccttcatctggcaaagtccagttatcttgctcctttcatgaaacttgcccagcagattcaagatggttcccgacaggcccagagcaatttaacgttcctgtctatactaaaagagccctaccaggaacttgctttcatgaaacccaaggatatttctagcaagctgcccaagctgatatcactcattcggatcatatgggttaattctccgcattacaatacgcgcgaacggcttaccagcctctttcgcaaaatgagcaatgagattatccgcctctgttgtcacgccatctcgctggatcggattttcgagggttacgtgagtagttccaaggaggacctacaggggtgcatcctgtgctgccatgcatggaaagatcattatgtccaggccgtgcaaatgcacattcaatttagttcacgtggctgggtactggatcagacaagcatctttgcccaggttgacgcatttgtacagcggtgcaaagatctgatcgaggtgtgtgattgccagtatcacttcgctcgttgggaagatgggaagcagggcccactgccatgcttcttcggcgcgcaaggacctcagatcacacgtaatttgctggaaattgaagacattttccacaaaaatctgcatacactgcgcgctgtgcgaggcggcatactggacgtcaaaaacacttgctggcatgaggactataacaagttcagggctggtattaaggacctagaagttatgactcaaaatctgatcacaagtgctttcgagctcgtaagagacgtccctcacggagtgcttctgctggacacttttcatcgtttggcctcccgggaagcaatcaagaggacgtacgacaaaaaggccgtggacttgtacatgctcttcaactccgagctggcgctggtcaaccgcgagaggaacaaaaagtggcccgacctggaaccttatgttgctcagtacagtggtaaagcgagatgggtgcatatcctccgaagacggatcgatcgggtgatgacctgtctcgctggggcgcacttcttgccacggataggtaccggtaaagaaagtgtgcacacataccagcagatggtccaggccatcgatgagctggtgaggaagacatttcaggagtggacaagcagtcttgacaaggactgcattcggagattagatacgccattactgcgcatctcccaggagaaagcaggcatgcttgacgttaacttcgacaagtatcggagccacctggccccttttccatacaccccactgttacaactatcccaggagttccactcacatctgttgactcccctcttcattatcctctcactatcccacacgatctgcctcctatcttctttttacttttttttctcatccttcatttttgtttctccgcatctccccccgtgctatcagcactttaacttcacaacatacttgaagacccaacaaaacaaaaccatgattggccaagcacgctggctgacacctgtgattcccgccctttgggaggcagaggtgggcgcatcactagagccaagatctctccgcacggcgtgggctacgtggcagaatcccgtcagtgcaaaaaacaccaagatttcctgggcttggtggcataaacccgttgtgtcggccacctgggaaggagaggtgggtggatccccagaacccgggcgccagcggttgcagtag

SEQ ID NO: 115135 - DNA, 2619 bp, Artificial Sequence
  derived and/or modified sequence
atgtccagcaaggccgagaagaagcagaggttgtccggacggggttctagccaggctagttggtccggaagggctacacgtgcagcagtggccactcaggagcagggaaacgcccctgctgtgagtgaaccagagctgcaggccgagctgcctaaggaagaaccagagcctagactcgagggtccacaggcccagtcagaagagagcgtggaacctgaagcagacgttaagccactctttctgtctagggcggcacttacagggctagctgacgctgtctggacacaagagcacgacgcaattctcgaacatttcgcccaggatccaacagagtcaattttgactatattcatcgacccatgttttggtctgaaactcgagctcggcatgcccgtgcagacccaaaaccagcttgtgtactttattagacaggcaccagtgcctatcacctgggagaatttcgaagccacagtgcagtttggtacggtgcgaggcccatacattccggcactgctgagacttctgggaggggtgttcgcacctcagatatttgccaacaccgggtggccagagagcatcaggaatcatttcgctagccacttgcacaagtttctcgcatgcttgacagatactaggtacaagctggagggacatactgtgctctatatcccagccgaggcaatgaacatgaaaccagaaatggtcattaaagacaaggaattggtacagcgcctggagaccagcatgatccattggactcgacaaattaaagaaatgctgtccgcgcaggaaaccgtagaaaccggcgagaacctcgggccactggaagaaattgagttctggcgtaatcggtgtatggacctgtccggaatctctaagcagttagtcaaaaagggggtaaagcacgtagaatcgattctgcacctggccaaatcttcatatcttgccccatttatgaagctggcccaacagatccaggacggctctcggcaagctcagtcaaacctgacatttctcagcatcctgaaagagccataccaggagcttgcctttatgaaacctaaagacatcagttccaagctgcccaaattaatatcgctgatcaggatcatctgggtgaatagtccacattataatacccgggaacggctgacctctcttttcaggaaaatgtccaacgagataatcaggctctgctgtcacgccatcagcttagatcgtatctttgagggatatgtcagttccagcaaagaagatctgcaaggctgtatactttgctgccacgcctggaaagaccactatgtacaggccgttcagatgcatatccagtttagttcacgtgggtgggttctcgatcagacaagtattttcgcccaagtggacgcattcgtacagcgctgtaaagacctgatcgaggtgtgtgactgccagtaccattttgcaaggtgggaggacggcaaacagggcccactaccatgtttcttcggcgctcaggggcctcagatcaccaggaacctgcttgaaatcgaggacatctttcataaaaacctacacaccctccgtgccgtaaggggcggtatcctcgatgtgaagaatacctgctggcatgaggactataataaatttagggcgggaattaaggatctagaagtgatgacccaaaatttgatcaccagcgctttcgagctcgtgagagatgtgccgcacggcgtcctgttactggatacgttccaccggctggcgtcccgggaagcaattaagagaacctatgacaaaaaggctgtggatctgtacatgctgttcaactctgaactggctttagttaatcgggagaggaacaagaagtggcccgaccttgaaccctatgtagcccagtattcaggtaaagcaagatgggtgcatattctgcgacgacgaatcgatcgggtgatgacatgcttggccggagcacactttctcccgcgaattggaactgggaaagagtccgtccacacataccaacagatggtccaggccattgatgagttggtgcggaagacgtttcaggaatggacaagctccctcgacaaggactgcatcaggcggctagacaccccgctccttaggatttctcaggagaaagccggaatgctagacgtgaattttgacaagtacagaagccacctggctccgttcccctacacgccactactgcagctaagccaagaatttcacagccacctgctgacccctctcttcataattcttagtttatcccataccatatgcctcctgtccagcttctattttttcttttcttctttcatcttcgtttccccacacctgcctccctgttaccagcactttaatttcacgacctatcttaagacccagcagaataagaccatgatcggacaagctcgctggctaactcctgttattcccgcactgtgggaggccgaagttggagcctcactcgaaccaaggtcattaaggaccgcctgggccacttggcagaatcccgttagcgcaaagaataccaaaatctcttgggcctggtggcacaagcccgtggtttcagccacctgggagggggaagttgggggatcaccagaaccagggagacagcgtctgcagtag

SEQ ID NO: 115136 - DNA, 2619 bp, Artificial Sequence
  derived and/or modified sequence
atgagttccaaggcggaaaaaaagcagagactttccggacggggttcgtctcaagctagttggtccggcagagccacaagggccgctgtcgccactcaagagcaaggcaatgctccagccgtgtctgagccagagttacaggcggaattacccaaagaagaacctgaacctaggctcgagggtcctcaggctcagtccgaagagtcagttgagcctgaggctgacgtgaagcccttgttcctgagcagggcagccttgactgggttagcagacgccgtttggacccaggagcatgatgcaatccttgaacacttcgcacaagaccccacagaatctatccttacgatttttatcgatccatgtttcggactgaaactggaactgggcatgcccgtccagacacagaaccagctagtctattttatccgccaggcccctgtgcctattacttgggagaacttcgaagccactgtgcagttcgggactgttagaggaccatacatccccgcacttttgagactgctaggaggcgtgttcgctcctcaaatatttgcgaacactggatggcccgaatcaataaggaaccactttgcctcgcacttgcacaagttcctggcttgcctcactgatacaagatataaacttgaaggccacacagtactttatatcccagctgaggcaatgaacatgaagcccgaaatggtaattaaggacaaggaattagtccagcggctcgagacaagtatgatccattggaccagacagatcaaagagatgttaagcgcccaggaaaccgtagagaccggcgagaacctcggtcctctcgaagaaatcgaattttggagaaatagatgtatggacctgagtggcatttctaaacaacttgtgaagaagggtgtgaagcacgttgagtcgattctgcatctcgctaagagctcttacctcgccccattcatgaaattggcccaacagatccaagacgggtcaaggcaggcccagtctaacctgaccttcctcagtattctgaaggagccttaccaagagctcgcattcatgaagcctaaggatatatcgtcgaagctgccaaaacttatttctctcatccgaatcatttgggtcaactctccacactataacacgcgggaacgactgacctctctattccgcaaaatgagcaacgagatcatcagactgtgctgccatgccatttccttggaccgtatattcgaaggttatgtgagctcgtccaaagaggatcttcagggatgtattctgtgctgtcatgcgtggaaagaccattatgtccaggccgtgcagatgcacatacagttctcttctcggggctgggtgctcgatcagacttcgatattcgcacaggtcgatgcatttgtacagaggtgtaaggacctcattgaagtgtgcgactgccaatatcacttcgctcgctgggaagatggaaagcaggggcccctgccatgcttcttcggagcccagggaccccagatcacaaggaacctgttggagattgaagatatctttcataagaacttgcacacacttcgcgccgtcagaggggggattctagatgtcaaaaatacctgttggcacgaggactacaacaagtttagagctgggataaaggatctggaggtcatgacacaaaatctgatcacttctgccttcgagctcgtacgcgacgttccccatggagttctgctgttagacacctttcatcgattggcatctcgggaagctataaagcgaacatatgacaaaaaggcggtagacctgtatatgctctttaactccgagctcgccctggtgaatcgcgaacggaataaaaaatggccagacctggagccctacgtcgcgcaatatagtggcaaggctagatgggtccatatcctccggcgaaggatcgatagggtcatgacctgcctcgctggcgcgcatttcctgcctaggatcggaaccggcaaggaatctgtgcatacatatcaacaaatggtgcaggccatcgacgaattggtgaggaaaaccttccaagagtggacttcgtctctggacaaggattgtatcaggcgcctggacacccccctcttgcgtatctcccaagagaaagcagggatgttggacgtaaacttcgacaagtataggtctcatctggcccctttcccttatacaccactgctccagctttctcaggagtttcacagccacctgctaacgcccctcttcataattttgtcattaagtcatactatttgccttctcagttctttttacttctttttcagtagcttcatctttgtaagccctcacttacccccgtgttaccagcacttcaactttaccacatacctgaagacacagcagaacaagactatgatcggccaggcccgatggctcacccctgtgatacctgctctctgggaagccgaagtcggtgcctcgcttgaaccaagatccttgcggacggcttgggcaacgtggcagaaccctgtctctgcgaagaataccaagatctcatgggcttggtggcataaaccagtggtgtcggctacctgggagggtgaggtcggcgggtctccagagccaggacggcaacgcctccagtag

SEQ ID NO: 115137 - DNA, 2619 bp, Artificial Sequence
  derived and/or modified sequence
atgtcctccaaagccgagaagaagcagagattaagtggaagggggagttctcaggcttcatggtccgggagagctacgcgcgccgcagtcgccactcaggagcaaggaaacgctcccgctgtgagcgaacccgagttacaagctgagttaccaaaggaagaacccgaaccaagattggagggcccccaggcccagtctgaggaatctgtggagcctgaagctgacgtcaagcctctctttttatcccgggctgctctgaccggactcgctgacgcagtgtggacacaggaacacgacgctattctggaacacttcgcacaggacccaaccgaaagcatcctcacaatatttattgatccctgcttcgggttaaaattagaacttggcatgcctgtgcaaacccaaaatcaattagtttactttatccgccaggctcctgttcctatcacctgggagaactttgaggctactgtgcagtttggaacggtgagaggaccatatatacctgccctcctgcgcctgctagggggagtttttgctcctcagatctttgccaataccggctggccagagtctatccgcaaccactttgcttcccacttacacaagtttctcgcctgtctgacagatacacgatataagcttgaaggacacaccgtgttgtacattcccgcggaagctatgaacatgaaaccggagatggtgattaaagataaagaactggtacagcggcttgagactagtatgatccattggactcgacagattaaagagatgctgagtgctcaggagacagtagaaaccggagagaacctgggcccccttgaggaaatcgagttctggcgaaatagatgtatggacctgagtggaataagcaagcagcttgtaaagaaaggtgtcaaacacgtggaatccattttgcacctcgccaaaagcagttacttagccccatttatgaaattggctcagcagattcaggatgggagcagacaggcacagtccaatctgaccttccttagcatactgaaagagccgtatcaggaactcgcttttatgaaacccaaagacatcagctccaaacttccgaagctcatttctctcattagaatcatctgggtgaactctcctcattacaatacccgtgagcgactcacatctctgttcaggaagatgagtaatgaaatcatacgtctctgttgccacgccatttctctcgaccggatctttgagggttacgtctcttcgtccaaggaagacctacaggggtgtatactttgctgccacgcttggaaggaccattatgttcaggccgtgcagatgcacatacagtttagctcgagaggctgggttctggaccaaacatctatctttgcccaagtcgatgccttcgtgcaacgatgtaaagatttaatcgaggtctgcgattgtcaataccatttcgctcggtgggaagatggtaaacaaggcccgctcccgtgtttctttggggctcagggccctcagatcacaagaaatttgctggaaattgaagacatttttcacaagaatttgcacacgcttagggccgtgagaggggggattctggacgtaaagaatacatgttggcacgaggattacaataaatttagagcaggcataaaggaccttgaagtgatgacccaaaatctcataacatccgccttcgagttggtgcgggacgtccctcatggagtgctgctgctggacacctttcacagactcgcatccagagaagcgattaagcggacatatgacaaaaaggctgtcgacctgtacatgcttttcaactctgaactggctctcgtgaatagggaacggaacaagaagtggcccgacctagagccctacgtagcacagtactccggaaaggctcgatgggtacacatcctgagaaggagaatcgacagagtcatgacctgtttggccggtgcacattttctaccacgcattggcaccggaaaggagagcgtacatacttaccaacagatggtacaggcaatcgatgaactggtgaggaagacatttcaagaatggacgagttcactcgacaaagattgcattcgccggcttgacacccctttattacgaatcagtcaagaaaaagccggaatgctcgacgtaaactttgacaaatatcgctctcatctcgcaccctttccctacacaccgttgctccaactgtctcaagagttccactcccacctccttaccccactgttcataatcctctcactgtcacataccatatgccttcttagcagcttttactttttcttcagttcatttattttcgtgtcgccccacctccccccctgctatcagcattttaatttcaccacatacctaaagacccagcagaataagaccatgattgggcaagccaggtggttgacccctgtgatcccagcactgtgggaggctgaggtgggggccagcctcgagccacgatctcttagaacagcatgggccacttggcagaatcccgtttcagcaaaaaacacaaagatttcatgggcatggtggcacaaacctgtggtctccgcaacttgggagggtgaggtggggggttccccggagcctggaagacaaaggctgcagtag

SEQ ID NO: 115138 - DNA, 561 bp, Artificial Sequence
  derived and/or modified sequence
aaacctcgcccagattcaggcgtgtaaaccagccggagcggcgcggcagcggcaggaccgccgtggcgcctagagtagcgacccggggggagcgcggggcgacgctggctgcagggacccggtgacagcgtgagagaccagacacggtggctcacgtctgtaatcccagcactttgggaggccaaggcaggcagagcactttgggaggccagggcgggcggatcacttgaggccagaagttcgagaccagtctggccaacatggtgaaaccccatctttactaaaaatatgaaaattagccaggcatggtggtgtgttcctgtagtcccagctactcgggaggctgagcaggagaatcgctggaacctggcaggcagaacttgcagtgagctgagatcgtgccactgcactccagcctaggcgacagagtgagactccgtctcaaacaacaacaacaacaaaagctcctcgatggaaccatttgatagtgacaaggattgaagtactaggttttgacaagcttgcatcatgcgtgagtataagctagtcgttcttggctca

SEQ ID NO: 115139 - DNA, 2619 bp, Artificial Sequence
  derived and/or modified sequence
atgagcagcaaggccgagaagaagcagagactgagcggcagaggcagcagccaggccagctggagcggcagagccaccagagccgccgtggccacccaggagcagggcaacgcccccgccgtgagcgagcccgagctgcaggccgagctgcccaaggaggagcccgagcccagactggagggcccccaggcccagagcgaggagagcgtggagcccgaggccgacgtgaagcccctgttcctgagcagagccgccctgaccggcctggccgacgccgtgtggacccaggagcacgacgccatcctggagcacttcgcccaggaccccaccgagagcatcctgaccatcttcatcgacccctgcttcggcctgaagctggagctgggcatgcccgtgcagacccagaaccagctggtgtacttcatcagacaggcccccgtgcccatcacctgggagaacttcgaggccaccgtgcagttcggcaccgtgagaggcccctacatccccgccctgctgagactgctgggcggcgtgttcgccccccagatcttcgccaacaccggctggcccgagagcatcagaaaccacttcgccagccacctgcacaagttcctggcctgcctgaccgacaccagatacaagctggagggccacaccgtgctgtacatccccgccgaggccatgaacatgaagcccgagatggtgatcaaggacaaggagctggtgcagagactggagaccagcatgatccactggaccagacagatcaaggagatgctgagcgcccaggagaccgtggagaccggcgagaacctgggccccctggaggagatcgagttctggagaaacagatgcatggacctgagcggcatcagcaagcagctggtgaagaagggcgtgaagcacgtggagagcatcctgcacctggccaagagcagctacctggcccccttcatgaagctggcccagcagatccaggacggcagcagacaggcccagagcaacctgaccttcctgagcatcctgaaggagccctaccaggagctggccttcatgaagcccaaggacatcagcagcaagctgcccaagctgatcagcctgatcagaatcatctgggtgaacagcccccactacaacaccagagagagactgaccagcctgttcagaaagatgagcaacgagatcatcagactgtgctgccacgccatcagcctggacagaatcttcgagggctacgtgagcagcagcaaggaggacctgcagggctgcatcctgtgctgccacgcctggaaggaccactacgtgcaggccgtgcagatgcacatccagttcagcagcagaggctgggtgctggaccagaccagcatcttcgcccaggtggacgccttcgtgcagagatgcaaggacctgatcgaggtgtgcgactgccagtaccacttcgccagatgggaggacggcaagcagggccccctgccctgcttcttcggcgcccagggcccccagatcaccagaaacctgctggagatcgaggacatcttccacaagaacctgcacaccctgagagccgtgagaggcggcatcctggacgtgaagaacacctgctggcacgaggactacaacaagttcagagccggcatcaaggacctggaggtgatgacccagaacctgatcaccagcgccttcgagctggtgagagacgtgccccacggcgtgctgctgctggacaccttccacagactggccagcagagaggccatcaagagaacctacgacaagaaggccgtggacctgtacatgctgttcaacagcgagctggccctggtgaacagagagagaaacaagaagtggcccgacctggagccctacgtggcccagtacagcggcaaggccagatgggtgcacatcctgagaagaagaatcgacagagtgatgacctgcctggccggcgcccacttcctgcccagaatcggcaccggcaaggagagcgtgcacacctaccagcagatggtgcaggccatcgacgagctggtgagaaagaccttccaggagtggaccagcagcctggacaaggactgcatcagaagactggacacccccctgctgagaatcagccaggagaaggccggcatgctggacgtgaacttcgacaagtacagaagccacctggcccccttcccctacacccccctgctgcagctgagccaggagttccacagccacctgctgacccccctgttcatcatcctgagcctgagccacaccatctgcctgctgagcagcttctacttcttcttcagcagcttcatcttcgtgagcccccacctgcccccctgctaccagcacttcaacttcaccacctacctgaagacccagcagaacaagaccatgatcggccaggccagatggctgacccccgtgatccccgccctgtgggaggccgaggtgggcgccagcctggagcccagaagcctgagaaccgcctgggccacctggcagaaccccgtgagcgccaagaacaccaagatcagctgggcctggtggcacaagcccgtggtgagcgccacctgggagggcgaggtgggcggcagccccgagcccggcagacagagactgcagtag

SEQ ID NO: 115140 - DNA, 2633 bp, Artificial Sequence
  derived and/or modified sequence
gttttgcctgcacgatgtccagcaaagctgagaagaagcagcgattgagtggccgaggaagctcccaggcaagctggtcagggcgggccactcgggctgctgtggccacacaggagcaggggaatgccccggctgtcagtgagccagagctgcaggctgagctccccaaggaggagcctgagccacggttggagggacctcaagcacagagtgaagaatcagtggagcccgaggcagatgtgaagcccctcttcctttcccgagctgcgctgacaggactggcggatgcagtgtggacacaggagcatgatgccattctggaacactttgcccaggaccctacagaatccatcctcaccatcttcattgacccttgttttgggctgaagctagagctgggcatgcctgtacagacccagaaccagcttgtctacttcattcgccaagcaccagttcccatcacctgggagaacttcgaggcaactgtgcagtttgggacggtgcggggcccctatatcccggccctgcttcggctgctcggtggagtctttgcccctcagatctttgcaaacacaggctggcctgagagcattagaaatcattttgcttctcatctgcacaagttcttggcctgcctgacagacactcggtacaaactggaggggcacacggtcctctacatccctgcagaggccatgaacatgaagcctgagatggtgataaaggacaaagagctggtgcaacggctagagacctccatgatccactggacccggcagataaaggagatgctcagtgcccaggagactgtggagacaggagaaaatttaggtcctctggaggagattgagttctggcgcaaccgatgcatggacctgtctggcatcagtaagcagctggtgaagaagggagtgaagcacgttgaatccatcctgcaccttgccaagtcgtcctacttggcgccctttatgaaactggcacagcagatccaggatggctctcgtcaagcacagtcaaacctgacctttttgtcaatcctgaaggaaccttaccaggagttggctttcatgaagcccaaggacatctctagcaagctccctaagctgatcagtctcatccgcatcatctgggtcaactctccccactacaacactcgggagagactgacctcgctcttccgaaagatgagcaatgagatcatccgcttatgctgccacgccatctccctggaccggatctttgagggatatgtctcttccagcaaggaggacctgcaaggctgcattctctgttgtcacgcttggaaagatcactacgtacaggctgtgcagatgcacatccagttctccagtcggggctgggtcctagatcagaccagcatctttgctcaggttgatgcctttgtgcagcgctgcaaggaccttattgaggtatgtgactgtcagtatcacttcgcccgctgggaagatggcaagcagggtccccttccttgcttctttggtgcccaggggccacagataacacggaacttgctggagattgaggacatctttcataaaaatctgcacacgctgcgagccgttcgcgggggtatcctggatgtcaagaacacctgttggcatgaagactacaataagttccgtgccggaatcaaggacctggaggtgatgacccagaacctgatcacctcagccttcgagttggtgcgggacgtgccgcacggcgtgcttctgctggacaccttccacaggcttgcctcccgcgaggctatcaagcggacttatgacaagaaggcggtggatctctacatgctgttcaatagcgagctggccctggtgaaccgtgaacggaacaagaaatggccagacctggagccctacgtggcccagtattccggaaaggcgcgctgggtgcacatcctccggcgtcgcatcgacagagtcatgacctgccttgctggtgctcatttcctgccccgtattgggactggaaaggagagtgtgcacacctatcagcagatggtccaggccattgatgagctggttcgaaaaaccttccaagagtggacatcaagtctggacaaggattgcattcggcggttggataccccattgctgcgaatcagccaggagaaggcgggcatgctggatgtcaactttgacaagtacaggagccacctggccccttttccctatactccccttctgcagctctcccaagaatttcactcccatcttttgactcctctcttcattattctctctctttctcatacaatatgtttgctatcgtcattttacttttttttttcttcttttatttttgtctctccccacctcccaccctgctatcaacattttaattttacaacttatcttaaaacacaacaaaacaaaacaatgatcggccaggcacggtggctcacacctgtaatcccagcactttgggaggctgaggtgggcgcatcgcttgagcccaggagtttgagaacagcctgggcaacatggcaaaacccagtctctgcaaaaaatacaaagattagctgggcgtggtggcacaagcctgtagtctcagctacttgggagggtgaggtgggaggatcgcctgagcccgggaggcagaggctgcagtga

SEQ ID NO: 115141 - DNA, 1614 bp, Artificial Sequence
  derived and/or modified sequence
atgttcaacagtcgaatcctgaccaagtataccctgctgcttggacaagatgaaaatagtgttattaagagtttcacagcttccgttgaccggaagttcatcagcctgatgtcactgtcctcagacggctgtatttacgagacactgattcccataagacccgcagatccagaaaagaaccagtcactagttaagtccctgctgctgaaggctgttgtgtcagggaatgcccgtaatggtgtagctctgacagccctggatcaggaccacgttgccgttttagggtccccacttgccgcttctaaggagtgcttatcggtgtggaatataaagttccaaacccttcagacgtccaaggaactgccgcaaggaacaagcggccagctgtggtattacggtgagcacctgttcatgttgcacggtaagtctcttactgtgataccatataaatgcgaagtttcctccctcgccggagccctagggaagttaaaacattctcaggatccgggaacgcatgttgtgtcccactttgtgaattgggaaacgccccagggatgtgggctggggttccagaacagtgagcaatcacggagaattctgagacgtaggaagattgaagtgagtttacagcctgaggtgccccctagcaagcagctacttagtacgattatgaaggacagtgagaagcacattgaggttgaggttcgtaaattcctggcgctgaagcagacacccgatttccacactgtgatcggggatactgtgacaggcctgcttgaacgttgtaaagcagagccatctttctacccacgaaattgtctcatgcagttaattcaaactcacgttctatcatattcactttgtccagatctgatggagattgctttaaagaagaaggacgtccagctcctgcagctttgcctgcaacagttccctgacatccccgagagcgtgacttgcgcttgcctcaaaatcttcttgagcatcggcgatgactccctgcaggaaaccgatgtgaatatggagtcagtcttcgactatagcatcaattctgtgcatgatgagaagatggaagaacagacggaaatactccagaatgggttcaatccagaggaggataagtgtaacaactgtgatcaggagctgaataagaaacctcaggatgagacaaaagagtctacatcatgcccagtagtccagaagagggctgcgctcctcaacgccattctgcactccgcctattccgagactttccttctgccacacctgaaagacattccagcgcagcacatcacactcttcctgaagtatttatactttctgtacctgaaatgcagcgaaaatgcgactatgacacttcccggcatccaccccccaaccctgaaccaaatcatggactggatttgcctccttctcgacgccaatttcaccgtggtcgtaatgatgcccgaagcaaagaggcttctgatcaatctctataaacttgtcaagtctcaaatatccgtctactccgagctcaacaagattgaggtgtctttcagggaactgcagaaactaaaccaagagaaaaacaatagaggcctgtacagtatcgaggttcttgaactgttttag

SEQ ID NO: 115142 - DNA, 1614 bp, Artificial Sequence
  derived and/or modified sequence
atgttcaacagccgcatcctgaccaagtacaccctgctgctgggccaggatgagaacagcgtcatcaagagcttcaccgcctctgtggacaggaagttcatcagcctgatgagcctgagcagtgatggctgcatctatgagaccctcatccccatccggcctgctgaccctgagaagaaccagagcctggtgaagagcctgctgctgaaggctgtggtgtctggaaatgccagaaatggagtggccctgacagccctggaccaggaccacgtggccgtgctgggcagccccctggccgccagcaaagaatgtctgtctgtgtggaacatcaagttccagaccctgcagaccagcaaggagctgccccagggcaccagcggccagctgtggtactacggggagcacctgttcatgctgcacggcaagagcctgaccgtcatcccctacaagtgtgaggtgagcagcctggccggggccctgggcaagctgaagcacagccaggaccccggcacccacgtggtgagccactttgtgaactgggagaccccccagggctgcggcctgggcttccagaacagcgagcagagccgccgcatcctgcggcggaggaagattgaggtgtccctgcagcctgaggtgccccccagcaagcagctgctgagcaccatcatgaaggacagcgagaagcacatcgaggtggaggtgaggaagttcctggccctgaagcagaccccagacttccacacagtgattggagacacagtgacaggcctgctggagcgctgcaaggccgagcccagcttctaccccaggaactgcctgatgcagctgatccagacccacgtgctgagctacagcctgtgcccagacctgatggagatcgccctgaagaagaaggatgtgcagctgctgcagctgtgcctgcagcagttcccagacatccctgagagcgtgacctgtgcctgcctgaagatcttcctgagcattggagatgacagcctgcaggagacagatgtgaacatggagagcgtgtttgactacagcatcaacagcgtgcatgatgagaagatggaggagcagacagagatcctgcagaatggcttcaaccctgaggaggacaagtgcaacaactgtgaccaggagctgaacaagaagccccaggatgagaccaaggagagcaccagctgccctgtggtgcagaagagagctgccctgctgaatgccatcctgcacagcgcctacagcgagaccttcctgctgccccacctgaaggacatcccagcccagcacatcaccctcttcctgaagtacctgtacttcctgtacctgaagtgcagtgaaaatgccaccatgaccctgcccggcatccacccccccaccctgaaccagatcatggactggatctgcctgctgctggatgccaacttcaccgtggtggtgatgatgcctgaggccaagaggctgctgatcaacctgtacaagctggtgaagagccagatctctgtgtacagcgagctgaacaagattgaggtgtccttccgggagctgcagaagctgaaccaggagaagaacaacagaggcctgtacagcattgaggtgctggagctgttctag

SEQ ID NO: 115143 - DNA, 1614 bp, Artificial Sequence
  derived and/or modified sequence
atgttcaacagccggatcctgaccaagtacaccctgctgctgggccaggacgagaatagcgtgattaaaagcttcaccgccagtgtggatcggaaattcatctcattgatgtcactttcaagtgacgggtgcatttacgagaccttaatcccaatcaggcccgccgatccagagaagaaccaatcccttgtaaagtcacttctgctcaaggctgtcgtctccggcaatgccagaaatggagtagcactgactgctctggatcaggaccacgttgctgtgctgggctccccactcgccgctagcaaggaatgcctgtccgtatggaatataaaattccagacgctacagacttcaaaggagcttcctcagggtacttcaggtcagttgtggtattacggagagcatttgtttatgctgcatggaaaatcactcacagtcattccgtataagtgtgaggtctcatccttggccggcgcactcggcaagctcaaacactcgcaggatccgggcactcatgtggtgagtcatttcgtcaactgggaaacccctcaggggtgcggattggggttccagaattcagaacagtcacgcagaatcctgcggcggcgtaaaatagaggtctctctacagcctgaagtcccacctagcaagcagctgctcagcaccataatgaaggacagtgagaaacatatcgaggtcgaagttcgtaagttcctggctctaaaacagacccccgactttcacactgtaataggcgacactgtgaccggtctgcttgagcgttgtaaggcagaaccaagcttttatccgaggaactgcctcatgcagctgatccagactcatgtccttagttacagcctgtgtcctgatcttatggagatcgcactgaaaaagaaagatgtccagttactgcaattatgcctacaacaatttcctgatatacccgagagcgtcacctgtgcctgcctgaagatctttctcagtatcggagacgactcgttacaggaaactgatgtgaatatggaatcagtgttcgattactcaatcaactctgtacatgatgagaaaatggaggagcagacagaaattctgcaaaacggtttcaaccccgaagaagacaaatgcaacaactgtgaccaggaactgaataagaagccccaggatgaaaccaaggagtcaactagctgtcccgtagtccagaagagggccgcactcttaaatgccatcctccactctgcgtacagcgagacgttcttgttgccgcacctgaaagatatcccagcccagcacattaccttgtttctgaaatacctgtattttctttacttaaagtgtagtgaaaacgcaacaatgaccctcccaggtattcatccccccactctgaatcagatcatggattggatatgcttacttttggacgcgaacttcaccgtcgtggtgatgatgcccgaggctaagcgactgctaatcaacttgtataagctggtaaagagccagatatccgtgtatagcgaactcaacaaaatcgaggtctcattcagagagctccagaagctgaaccaagaaaaaaataaccgcggtttatatagcattgaggtcctagagctcttctag

SEQ ID NO: 115144 - DNA, 1614 bp, Artificial Sequence
  derived and/or modified sequence
atgttcaatagcagaatcctcacaaaatatactcttttacttggccaagacgagaactcagtgatcaaaagcttcacagctagcgtggaccgcaagtttatttctctcatgagtcttagcagtgatggatgcatttatgagactctgatccctatcagaccagcagaccctgagaagaatcagtctttggtcaagagcctccttctcaaggccgtcgtcagtgggaacgcaagaaacggcgtggcattgacagccctcgaccaggaccatgttgccgttctagggagtcccttggctgcctccaaagaatgcctgtccgtatggaatatcaagttccagactctccagacttctaaagagctgccacagggcacgagcgggcagctatggtactatggcgagcaccttttcatgctgcacgggaagtccctgaccgtcattccctacaaatgtgaggtgtctagtctggctggagccttgggaaaacttaaacattctcaagatccgggtactcacgttgtgtcccactttgtcaactgggaaactccccagggctgcggcttgggatttcagaatagcgagcagagccggaggattctgagacggcgaaaaatcgaagtgtctttgcagcccgaggtacctccctctaagcagctgctcagtaccatcatgaaagactcggaaaagcatatcgaagtggaggttcggaaatttctagctctgaaacaaacccccgattttcatacagtgataggtgataccgtgacaggactgttggaaaggtgtaaggccgagccctcattctatcctcgaaattgcttaatgcagctcatccagacgcatgtcttgtcttacagcctctgtcccgatctcatggagatcgctctgaaaaagaaggacgtgcagctgttacagctctgcttgcagcaatttcctgacattccagagagcgtaacatgcgcctgccttaagattttcctgtctattggggacgactccttgcaagagaccgatgtgaatatggaaagcgttttcgactattcaatcaattccgtgcacgatgagaagatggaggaacagaccgaaattctgcagaacgggttcaatccggaggaagataagtgtaacaattgtgatcaggagctgaacaagaaaccacaggacgaaacgaaggagagcactagctgccccgtcgttcagaaacgtgcagctcttttgaacgctatcttgcactctgcgtactcagaaacgttcctcttgccccatctcaaggacatccccgcacagcacattactcttttcttgaaatacctgtattttctgtatctaaagtgtagcgagaacgcaaccatgactctcccgggaatccatccaccaaccctgaatcagatcatggattggatatgtctgctgctcgacgccaatttcacagttgtggtcatgatgccagaagccaaacgtcttctgataaatttgtacaagctggtgaagagccagatttctgtgtacagcgagctgaataagatcgaagtatcttttagggaactgcaaaaactcaaccaggagaaaaacaacaggggcctgtatagtattgaggtgctggagttgttctag

SEQ ID NO: 115145 - DNA, 1614 bp, Artificial Sequence
  derived and/or modified sequence
atgttcaacagcagaatcctgaccaagtacaccctgctgctgggccaggacgagaacagcgtgatcaagagcttcaccgccagcgtggacagaaagttcatcagcctgatgagcctgagcagcgacggctgcatctacgagaccctgatccccatcagacccgccgaccccgagaagaaccagagcctggtgaagagcctgctgctgaaggccgtggtgagcggcaacgccagaaacggcgtggccctgaccgccctggaccaggaccacgtggccgtgctgggcagccccctggccgccagcaaggagtgcctgagcgtgtggaacatcaagttccagaccctgcagaccagcaaggagctgccccagggcaccagcggccagctgtggtactacggcgagcacctgttcatgctgcacggcaagagcctgaccgtgatcccctacaagtgcgaggtgagcagcctggccggcgccctgggcaagctgaagcacagccaggaccccggcacccacgtggtgagccacttcgtgaactgggagaccccccagggctgcggcctgggcttccagaacagcgagcagagcagaagaatcctgagaagaagaaagatcgaggtgagcctgcagcccgaggtgccccccagcaagcagctgctgagcaccatcatgaaggacagcgagaagcacatcgaggtggaggtgagaaagttcctggccctgaagcagacccccgacttccacaccgtgatcggcgacaccgtgaccggcctgctggagagatgcaaggccgagcccagcttctaccccagaaactgcctgatgcagctgatccagacccacgtgctgagctacagcctgtgccccgacctgatggagatcgccctgaagaagaaggacgtgcagctgctgcagctgtgcctgcagcagttccccgacatccccgagagcgtgacctgcgcctgcctgaagatcttcctgagcatcggcgacgacagcctgcaggagaccgacgtgaacatggagagcgtgttcgactacagcatcaacagcgtgcacgacgagaagatggaggagcagaccgagatcctgcagaacggcttcaaccccgaggaggacaagtgcaacaactgcgaccaggagctgaacaagaagccccaggacgagaccaaggagagcaccagctgccccgtggtgcagaagagagccgccctgctgaacgccatcctgcacagcgcctacagcgagaccttcctgctgccccacctgaaggacatccccgcccagcacatcaccctgttcctgaagtacctgtacttcctgtacctgaagtgcagcgagaacgccaccatgaccctgcccggcatccacccccccaccctgaaccagatcatggactggatctgcctgctgctggacgccaacttcaccgtggtggtgatgatgcccgaggccaagagactgctgatcaacctgtacaagctggtgaagagccagatcagcgtgtacagcgagctgaacaagatcgaggtgagcttcagagagctgcagaagctgaaccaggagaagaacaacagaggcctgtacagcatcgaggtgctggagctgttctag

SEQ ID NO: 115146 - protein, 1155 aa, Artificial Sequence
  derived and/or modified sequence
MGAGKSPAGPGQKPDPGKLPAAGVLRILRGSSGLWKKRRARTSAETGRAGLSAAMSAKAISEQTGKELLYKFICTTSAIQNRFKYARVTPDTDWARLLQDHPWLLSQNLVVKPDQLIKRRGKLGLVGVNLTLDGVKSWLKPRLGQEATVGKATGFLKNFLIEPFVPHSQAEEFYVCIYATREGDYVLFHHEGGVDVGDVDAKAQKLLVGVDEKLNPEDIKKHLLVHAPEDKKEILASFISGLFNFYEDLYFTYLEINPLVVTKDGVYVLDLAAKVDATADYICKVKWGDIEFPPPFGREAYPEEAYIADLDAKSGASLKLTLLNPKGRIWTMVAGGGASVVYSDTICDLGGVNELANYGEYSGAPSEQQTYDYAKTILSLMTREKHPDGKILIIGGSIANFTNVAATFKGIVRAIRDYQGPLKEHEVTIFVRRGGPNYQEGLRVMGEVGKTTGIPIHVFGTETHMTAIVGMALGHRPIPNQPPTAAHTANFLLNASGSTSTPAPSRTASFSESRADEVAPAKKAKPAMPQDSVPSPRSLQGKSTTLFSRHTKAIVWGMQTRAVQGMLDFDYVCSRDEPSVAAMVYPFTGDHKQKFYWGHKEILIPVFKNMADAMRKHPEVDVLINFASLRSAYDSTMETMNYAQIRTIAIIAEGIPEALTRKLIKKADQKGVTIIGPATVGGIKPGCFKIGNTGGMLDNILASKLYRPGSVAYVSRSGGMSNELNNIISRTTDGVYEGVAIGGDRYPGSTFMDHVLRYQDTPGVKMIVVLGEIGGTEEYKICRGIKEGRLTKPIVCWCIGTCATMFSSEVQFGHAGACANQASETAVAKNQALKEAGVFVPRSFDELGEIIQSVYEDLVANGVIVPAQEVPPPTVPMDYSWARELGLIRKPASFMTSICDERGQELIYAGMPITEVFKEEMGIGGVLGLLWFQKRLPKYSCQFIEMCLMVTADHGPAVSGAHNTIICARAGKDLVSSLTSGLLTIGDRFGGALDAAAKMFSKAFDSGIIPMEFVNKMKKEGKLIMGIGHRVKSINNPDMRVQILKDYVRQHFPATPLLDYALEVEKITTSKKPNLILNVDGLIGVAFVDMLRNCGSFTREEADEYIDIGALNGIFVLGRSMGFIGHYLDQKRLKQGLYRHPWDDISYVLPEHMSM

SEQ ID NO: 115147 - DNA, 3468 bp, Artificial Sequence
  derived and/or modified sequence
atgggggcaggaaaaagtcccgctggcccaggccaaaagccagatccaggtaagcttcccgctgctggggtcttaagaatcttaagaggctcctctggcctatggaagaaacgcagagcaaggactagtgctgagactggaagagctgggctgagcgcggcaatgagcgccaaagccatcagtgagcagacaggtaaggaactcctctataagtttatttgcacaacctcggccatccagaacagatttaagtacgccagagttactcctgacaccgactgggctcgactgcttcaggatcatccctggcttctttcgcagaacctcgttgttaagcccgatcaattgattaaacgccgcggaaaactgggcttggtaggggtgaatctcacattagacggcgttaaaagttggctgaagcccagactaggccaggaggctacggtcggcaaggccactgggttccttaaaaacttcctgattgaaccattcgtgccacattcacaggcggaagagttctacgtgtgcatctacgctactcgcgaaggggactatgtgttgttccatcatgagggtggcgttgatgtaggcgacgttgatgccaaggcccagaaactgctagtaggagtggacgaaaaattaaacccagaagatatcaagaaacacctgttagttcatgctcctgaagacaagaaagaaatcctggcaagcttcatcagcgggctttttaacttctacgaagatttgtattttacctacttggaaatcaatcctctggtggttaccaaagatggggtgtatgtgttagacctggcggccaaggtggacgcaactgccgactacatttgcaaagtcaaatggggagacatcgagtttcctcctccatttgggagggaagcttaccctgaagaggcctacatagctgatctggacgccaagtctggcgcgtcactgaagcttaccttgctgaatccaaagggaaggatttggacaatggtggctggaggaggagccagcgtcgtttacagcgatacgatttgtgatctcggaggcgtcaacgaactggcaaactatggcgaatattctggcgccccgagcgagcagcagacatacgactatgcgaagaccattctgtccctgatgacgagagaaaagcaccctgacgggaagatcctgataatcggaggaagtatcgcaaacttcacgaatgtcgccgcaacctttaagggcattgttagagcgattcgagactaccaggggcccttgaaagagcatgaagtcacaatcttcgtgaggaggggtgggccaaactatcaggagggcctccgagtcatgggggaagtcggaaaaacgactggcatcccaattcacgtgtttgggactgagactcacatgaccgctatcgtgggcatggccctgggccaccgtccaattccgaatcagcccccaaccgcagcccacactgcgaattttctgttgaatgcctctggcagcacatccactcctgccccaagcagaaccgcaagtttctctgagagtcgtgctgatgaggtggcgcccgcgaagaaagcaaagcctgctatgcctcaggacagcgttccatcccctagatccctgcagggcaaatctacaacattgttttctcgacacactaaagccatagtgtgggggatgcagactagagcagtccagggaatgctggactttgactacgtctgctcccgagatgaaccaagtgtggccgctatggtatacccctttacgggggaccataaacagaagttctactggggccacaaggaaatcctgatccccgtcttcaaaaatatggcagatgccatgcgtaaacacccagaagtagacgtgcttatcaactttgctagtcttaggtctgcgtatgatagcaccatggagaccatgaattacgcccagatcagaaccattgccattatcgccgaaggaatccctgaggcactcacacgcaagctcattaaaaaggctgatcagaaaggggttaccatcattggcccagcaactgtcggcggaatcaaacccgggtgcttcaaaatcgggaatacgggagggatgctcgacaatatcctcgcatcaaagctgtaccgccctgggagcgtagcttatgtctccagaagcggcggtatgtctaatgaactgaataatatcatcagcaggactactgacggcgtttatgagggggttgcaatcggcggtgaccgatatcccggaagcacctttatggaccatgtgctgcgatatcaagacacacctggggtgaagatgatagtcgtgctaggggagatcggaggaactgaagaatataagatctgtcggggaataaaggagggccggctaacgaagccaatagtgtgttggtgcattggtacctgtgctactatgttttcctcggaggtgcagttcggccacgcgggtgcctgcgctaaccaggctagcgaaacggccgtcgccaaaaaccaagccttgaaggaagcaggcgtgttcgtcccccggtctttcgacgagcttggggagattatccagagtgtgtacgaggacctggtggctaacggggtcatcgtaccagcacaggaagtgcctccccctaccgtgcctatggactacagctgggccagagagcttggcctgatcaggaaaccggcttcattcatgacaagtatctgcgatgaacgcggtcaagagcttatttatgctggcatgccgattaccgaggtcttcaaagaggagatgggcatcggaggagtcctgggtctcctctggttccaaaagcgcctgccaaagtactcctgccaattcatagaaatgtgcctaatggtcaccgccgatcacggccctgctgtgtcaggcgcccacaatacaataatttgtgcccgggctgggaaggatctcgtaagtagtttgacatccggcctgctgacaatcggagacaggtttgggggagccttggatgctgcagcgaaaatgttttccaaagcatttgactcaggcatcatacccatggaatttgtaaacaagatgaagaaagagggtaaactcatcatggggattggtcatcgagtgaagtccattaacaacccagatatgcgcgtgcagatccttaaagattacgtgagacaacacttcccggccactcccctgctcgattacgctctggaagtggaaaagatcacaacaagcaagaagcccaatctcatcctgaacgtcgatggacttattggtgtagcttttgtagatatgctgaggaactgtggctctttcacacgagaggaggctgatgagtatatcgatatcggagctttaaacggcatctttgtcttagggagaagcatgggttttattggccactacctcgaccagaagcgcctcaaacaggggctgtatagacatccttgggacgacatttcgtacgtgttgccggagcacatgtcgatgtag

SEQ ID NO: 115148 - DNA, 3468 bp, Artificial Sequence
  derived and/or modified sequence
atgggcgccggcaagagccctgctggccctggccagaagccagaccccgggaagctgcctgctgctggggtgctgcgcatcctgcggggcagcagcggcctgtggaagaagaggcgggcccggaccagcgctgagaccggccgggccggcctgtctgctgccatgtctgccaaggccatcagcgagcagacaggcaaggagctgctgtacaagttcatctgcaccaccagcgccatccagaaccgcttcaagtatgcccgggtgaccccagacacagactgggcccggctgctgcaggaccacccctggctgctgagccagaacctggtggtgaagccagaccagctgatcaagagaagaggcaagctgggcctggtgggcgtgaacctgaccctggatggagtgaagtcctggctgaagccccggctgggccaggaggccaccgtgggcaaggccaccggcttcctgaagaacttcctgattgagccctttgtgccccacagccaggccgaggagttctacgtgtgcatctatgccacccgggagggggactatgtgctcttccaccacgagggcggcgtggatgtgggagatgtggatgccaaggcccagaagctgctggtgggcgtggatgagaagctgaaccctgaggacatcaagaagcacctgctggtgcacgcccctgaggacaagaaggagatcctggccagcttcatcagcggcctcttcaacttctatgaagatctctacttcacctacctggagatcaaccccctggtggtgaccaaggatggagtgtatgtgctggacctggccgccaaggtggatgccacagctgactacatctgcaaggtgaagtggggagacatcgagttccccccacccttcggccgggaggcctacccagaggaggcctacatcgctgacctggatgccaagagcggggccagcctgaagctgaccctgctgaaccccaagggccgcatctggaccatggtggccggcggcggggcctctgtggtgtacagcgacaccatctgtgacctgggcggcgtgaatgagctggccaactacggggagtacagcggggcccccagcgagcagcagacctatgactatgccaagaccatcctgagcctgatgacccgggagaagcacccagatggcaagatcctgatcatcggcggcagcatcgccaacttcaccaacgtggccgccaccttcaagggcatcgtgcgggccatccgggactaccagggccccctgaaggagcacgaggtgaccatctttgtgcggcggggcggccccaactaccaggagggcctgcgggtgatgggagaggtgggcaagaccaccggcatccccatccacgtgtttggaacagagacccacatgacagccatcgtgggcatggccctgggccaccggcccatccccaaccagcccccaacagctgcccacacagccaacttcctgctgaatgccagcggcagcaccagcaccccagcccccagcaggacagccagcttcagcgagagcagagcagatgaggtggccccagccaagaaggccaagccagccatgccccaggacagcgtgcccagccccaggagcctgcagggcaagagcaccaccctcttcagccgccacaccaaggccatcgtgtggggcatgcagaccagggctgtgcagggcatgctggactttgattatgtgtgcagcagagatgagcccagcgtggccgccatggtgtaccccttcaccggggaccacaagcagaagttctactggggccacaaggagatcctgatccctgtgttcaagaacatggctgatgccatgaggaagcaccctgaggtggatgtgctgatcaactttgccagcctgcggagcgcctatgacagcaccatggagaccatgaactatgcccagatccgcaccatcgccatcatcgccgagggcatccctgaggccctgaccaggaagctgatcaagaaggctgaccagaagggcgtgaccatcatcggccctgccaccgtgggcggcatcaagccaggctgcttcaagattggcaacacaggaggcatgctggacaacatcctggccagcaagctgtaccggcccggctctgtggcctacgtgagccgcagcggcggcatgagcaatgagctgaacaacatcatcagcaggaccacagatggagtgtatgagggcgtggccatcggcggggaccgctacccaggcagcaccttcatggaccacgtgctgcgctaccaggacaccccaggagtgaagatgattgtggtgctgggggagattggaggaacagaggagtacaagatctgccggggcatcaaggagggccgcctgaccaagcccatcgtgtgctggtgcatcggcacctgtgccaccatgttcagcagcgaggtgcagtttggacatgctggggcctgtgccaaccaggccagcgagacagctgtggccaagaaccaggccctgaaggaggccggcgtgtttgtgcccaggagctttgatgagctgggggagatcatccagagcgtgtatgaggacctggtggccaatggagtcatcgtgcctgcccaggaggtgcccccacccaccgtgcccatggactacagctgggcccgggagctgggcctcatcaggaagccagccagcttcatgaccagcatctgtgatgagcggggccaggagctgatctatgccggcatgcccatcacagaggtgttcaaggaggagatgggcattggaggagtgctgggcctgctgtggttccagaagaggctgcccaagtacagctgccagttcatcgagatgtgcctgatggtgacagctgaccacggccctgctgtgtctggggcccacaacaccatcatctgtgcccgggccggcaaggacctggtgagcagcctgaccagcggcctgctgaccatcggggacagatttggaggagccctggatgctgctgccaagatgttcagcaaggcctttgacagcggcatcatccccatggagtttgtgaacaagatgaagaaggagggcaagctgatcatgggcatcggccaccgggtgaagagcatcaacaacccagacatgagggtgcagatcctgaaggactatgtgcggcagcacttccctgccacccccctgctggactatgccctggaggtggagaagatcaccaccagcaagaagcccaacctgatcctgaatgtggatggcctgattggagtggcctttgtggacatgctgaggaactgtggcagcttcacccgggaggaggctgatgagtacatcgacatcggggccctgaatggcatctttgtgctgggccgctccatgggcttcatcggccactacctggaccagaagaggctgaagcagggcctgtaccgccacccctgggatgacatctcctatgtgctgcctgagcacatgtccatgtag

SEQ ID NO: 115149 - DNA, 3468 bp, Artificial Sequence
  derived and/or modified sequence
atgggcgccggcaagagccccgccggccccggccagaagcccgacccagggaagctcccggccgccggggttctgcgaatcctccgcggctcaagtgggttatggaaaaagagacgcgctcggacatccgccgaaaccgggagggctgggcttagcgccgcaatgtctgctaaagcaattagcgaacagacaggaaaggagctactttacaaattcatctgtacaaccagcgccattcagaataggttcaaatatgcaagggtgactccagatacggattgggcccgactgctccaggaccatccctggctgctcagtcagaatctggtagtgaaaccagatcagttgatcaaaaggagagggaaactaggcctggtgggagtcaaccttacgctggacggagtgaaatcctggttaaaaccgcggctgggacaggaggccacggttggtaaggccaccggtttcctgaagaacttccttatcgagccctttgtgccacacagccaagctgaggagttctacgtgtgtatttatgcgactagagaaggagattatgtcctctttcaccacgaagggggcgttgacgtgggtgatgtcgacgcaaaggctcagaaactgcttgtcggggtcgatgagaaactcaatcctgaagacattaaaaaacatttgcttgtgcacgcacctgaagataagaaagaaatactcgcctcctttatatcaggtctgttcaatttctatgaggatctgtatttcacctaccttgagattaaccctttagtcgtgaccaaggatggagtctatgttctggatttagctgcaaaagtcgatgccacggctgattatatatgcaaggtaaagtggggggacatcgaatttccgcctcctttcggacgagaggcctaccccgaggaggcttacatcgctgacctggacgccaaatccggtgcgtctctaaagctgaccctcttaaatcctaagggtcgaatttggaccatggtcgctggtggaggtgcctctgtagtgtactccgatacaatctgcgacctcggaggggtgaacgagctagcaaactacggtgaatattcaggcgcaccttctgaacagcagacctatgattatgccaaaaccattctcagcctcatgacgcgtgagaaacatcccgacggcaagatactgatcattggcggatccatcgcaaatttcaccaatgtggcagccacgtttaaaggaatcgtgcgggcgattcgggactaccagggtccactgaaggaacacgaagtgaccatcttcgtgagacgcggggggcccaactaccaagagggattgagggtgatgggagaggtggggaagacaacagggattcccatccacgtattcggcactgagactcacatgacggctatagtcggaatggccctcggccaccgtcctattcccaatcagcccccaactgccgctcataccgcgaactttctcctgaatgcttccggatcgacctcaaccccggctccctcccgcacagcctctttctccgagtcccgggccgacgaggtcgcacccgccaagaaggctaagcccgcaatgccccaggacagcgtgccttcccctagaagtctgcaaggcaagtccaccacccttttctcccggcacaccaaagctattgtttggggcatgcagaccagagcggtgcaaggaatgcttgacttcgactacgtgtgtagccgggatgagccaagcgtagcggcaatggtgtatccatttaccggcgaccacaagcagaagttttactggggtcataaagaaattctgattcctgtctttaaaaacatggctgacgctatgcggaagcacccagaagtcgatgtcctaattaacttcgctagtttacggtccgcctacgattcaaccatggagactatgaactatgcccagatcagaaccatcgccatcatcgccgaaggcatcccagaagcacttacaagaaaactaatcaagaaagccgatcagaagggtgtcactatcatcggacctgccaccgtcggcggaatcaagcccggttgttttaaaatcggcaatactggcgggatgttggacaacatcttggcatctaaactatatcgcccaggctctgtcgcatacgtgagtcgctcaggtggaatgtccaatgaattaaacaacattatttctaggactaccgacggcgtgtatgagggcgtcgcgatcgggggagataggtacccaggaagcacatttatggaccacgtgctccgctatcaagatacaccaggcgtaaaaatgattgtggttctgggcgaaattggcggaaccgaagagtacaaaatctgtcgcggaatcaaggagggcaggctgactaaacccatcgtctgctggtgcatcggaacctgcgctacgatgttctcatcagaggtccagttcgggcacgcaggtgcctgcgcaaaccaagcgtctgagaccgcagttgcaaagaaccaggcactaaaagaggccggcgtcttcgtaccacgatcatttgacgaactgggggagatcattcagagcgtctatgaggacctcgtggcaaacggagttatcgtcccggcacaggaggttccacctccaaccgtgcccatggactattcgtgggcacgtgaacttggtctgattcgtaaacctgcaagcttcatgactagcatttgtgatgagcgaggacaggaactcatctatgctgggatgcctattaccgaagtctttaaagaagagatggggatcggcggcgtgctggggctactatggttccagaagcgactcccaaagtactcctgtcagttcatcgagatgtgcctgatggtcactgctgatcatggccctgcggtgagcggcgctcataatacaataatatgtgcaagagcagggaaagatttagtatcttcactgacaagcggcctcctgaccatcggagacaggtttggcggcgctttagacgcagcagccaagatgtttagcaaggcttttgattccgggattattcctatggagtttgtcaacaaaatgaagaaggaaggcaagctgataatgggaatcggtcaccgggtcaaaagtataaataatcctgacatgcgtgtgcagattctcaaggattatgtccgccagcattttccagccacacccctgctagattatgctctcgaggtggagaagataaccacatcaaaaaaacccaatcttatcctgaatgtggatggactgattggcgtggcattcgtggatatgctaagaaactgcgggagcttcacaagggaagaagccgatgaatacatcgatatcggggccctcaacggaatcttcgtcctgggacgctcgatggggtttatcggacactacttggatcagaaaaggttaaaacaaggactgtatcgacacccttgggatgatattagctatgttttgccggaacatatgtctatgtag

SEQ ID NO: 115150 - DNA, 3468 bp, Artificial Sequence
  derived and/or modified sequence
atgggggcaggtaagagccctgctggaccagggcagaagcccgatcccggtaaactgccagcagcgggtgtactgcgtatcctacgcggatcttccggtctgtggaaaaaacgacgtgctcgaacctccgccgagaccgggcgagcgggactctccgccgcaatgagcgccaaggccattagcgaacagacgggcaaggaactcctctataaatttatttgtactacctctgccatccaaaataggttcaagtacgccagggtcactccagatacagactgggccagactgcttcaggaccatccttggctgctgagtcagaatctggtggttaagccagaccagttgatcaaaaggagagggaaactcgggcttgttggcgttaacctgacactggatggggtgaagagctggctgaagccacgtctcggacaggaggcaactgtgggaaaagctacaggcttcctgaaaaacttcttgattgagccatttgttccacacagccaggctgaagagttctacgtgtgcatttacgctacacgagaaggcgattatgtgttattccaccacgagggtggagtagacgtaggcgacgtggacgctaaggcccaaaagctgttggtgggcgtggacgagaaactaaatcctgaagacatcaagaagcacctgctggtgcatgcccctgaagataaaaaggagatcctggcctcgtttatttctggtttattcaatttctacgaggacttgtatttcacctacctcgaaattaatcctctggtcgtcactaaggatggggtgtatgtgctggacttagccgcaaaagtggatgctacagctgactacatctgcaaggtgaagtggggtgacatcgagtttccaccgccttttggcagagaagcatatccagaggaggcctacatcgccgacctggacgcaaaatcaggtgcttcgcttaaactgaccttgcttaatcctaaagggcgtatctggaccatggtagccggaggcggagcatctgtggtgtattcagacacgatctgcgaccttggcggtgtaaacgaactagctaactatggcgagtactccggagccccatcagagcagcagacttacgattatgctaagaccatcttatcccttatgacacgcgaaaagcatcctgacgggaaaattttgattataggcggaagtatcgccaattttacaaatgtggcggctactttcaagggaatcgttagagcaatccgcgactaccagggccctctgaaggaacatgaagttaccattttcgtgcgtcgcggagggcctaactatcaggaaggccttcgcgtcatgggtgaggtgggaaagacaacaggtattcccattcatgtttttggcactgagacgcatatgaccgccatcgtggggatggctctgggccatagacctatccccaaccagcctcctaccgcagcccacacggccaactttttgcttaacgcttcggggtctacatccacaccggctccttctcgcacagcgtccttttctgagtcgcgggctgatgaggttgctcctgccaaaaaggcaaaacctgccatgccacaggacagcgttccaagccctcgatccctccaaggaaaaagtacaacgcttttcagtcgtcataccaaagctattgtctggggcatgcaaacccgggcagtgcaggggatgctggactttgattatgtctgcagcagagacgaaccctccgtggctgccatggtatatcccttcactggggaccataaacagaaattctactggggtcacaaggaaatcctgattcctgttttcaagaacatggcggatgcaatgcgcaaacacccagaagtggatgtgctgatcaatttcgcctcactgcgttcagcatacgattccacgatggagactatgaactatgcccagattaggacgatcgctatcattgccgaaggtatacccgaggccctgacccggaaactaatcaagaaggccgatcaaaagggtgtaaccattataggtcctgcaaccgtgggcggtatcaaacccggatgcttcaaaatcggtaacactggcggtatgctggataacatactggctagtaagctgtataggcctggttcggttgcatacgttagtcggtctggcggaatgtcaaacgagctgaacaacattatttctcgaaccactgacggagtgtacgagggagttgcaattggtggcgacagataccccggatctacttttatggaccacgtgcttcggtaccaggacacccccggagtgaaaatgatcgtggtgcttggggaaataggcggtaccgaggaatacaaaatatgtagaggcattaaggaaggaaggctcacaaagcccatcgtctgctggtgtatcggcacctgtgcaacaatgttctctagcgaggtgcagttcggtcatgccggagcctgtgccaatcaagccagcgaaaccgcagttgccaagaaccaggctcttaaagaggcgggagtgttcgtgcctaggtcatttgatgaactaggcgagattatccagagtgtatatgaggatcttgtcgctaatggcgttattgtccccgcacaggaggttccacctcctacagttcctatggattattcttgggcgagagaactgggtctgatcaggaagcctgcctcttttatgacctctatttgtgacgaacggggtcaagagttaatctacgccggaatgcccatcacagaggtgtttaaggaggaaatgggaattggtggcgttctcggcttgctgtggttccagaaacgacttccaaagtacagttgccagttcatcgagatgtgtctaatggtgactgctgatcatgggccagccgtctctggagctcataatactatcatttgcgctagggcgggtaaggacctcgtctcctccctaacgagtgggttgcttaccatcggtgataggttcggcggagccctggacgccgcagctaaaatgttctccaaggcatttgattcgggtataataccgatggagtttgtgaataaaatgaagaaggagggcaaactgatcatgggtataggccacagggtgaagtcaattaataaccccgatatgagagttcaaatcctgaaagactatgtgagacaacacttccccgcaaccccacttctagactacgctcttgaagtggaaaaaatcactacaagtaaaaaaccaaatctcattctgaacgttgacggcttaatcggagtggctttcgtagacatgctccgaaattgcggatcatttaccagggaagaggccgacgagtacatcgatattggcgcactgaacggaatatttgtgctgggtagatcaatgggattcattggtcactatctggatcagaagagattaaagcagggcctgtaccggcacccgtgggacgacatcagctacgtgttgcccgagcacatgagcatgtag

SEQ ID NO: 115151 - DNA, 4339 bp, Artificial Sequence
  derived and/or modified sequence
ccgggacaaaagccggatcccgggaagctaccggctgctggggtgctccggattttgcggggttcgtcgggcctgtggaagaagcgccgcgcacggacttcggcagaggtagagcaggtctctctgcagccatgtcggccaaggcaatttcagagcagacgggcaaagaactcctttacaagttcatctgtaccacctcagccatccagaatcggttcaagtatgctcgggtcactcctgacacagactgggcccgcttgctgcaggaccacccctggctgctcagccagaacttggtagtcaagccagaccagctgatcaaacgtcgtggaaaacttggtctcgttggggtcaacctcactctggatggggtcaagtcctggctgaagccacggctgggacaggaagccacagttggcaaggccacaggcttcctcaagaactttctgatcgagcccttcgtcccccacagtcaggctgaggagttctatgtctgcatctatgccacccgagaaggggactacgtcctgttccaccacgaggggggtgtggacgtgggtgatgtggacgccaaggcccagaagctgcttgttggcgtggatgagaaactgaatcctgaggacatcaaaaaacacctgttggtccacgcccctgaagacaagaaagaaattctggccagttttatctccggcctcttcaatttctacgaggacttgtacttcacctacctcgagatcaatccccttgtagtgaccaaagatggagtctatgtccttgacttggcggccaaggtggacgccactgccgactacatctgcaaagtgaagtggggtgacatcgagttccctccccccttcgggcgggaggcatatccagaggaagcctacattgcagacctcgatgccaaaagtggggcaagcctgaagctgaccttgctgaaccccaaagggaggatctggaccatggtggccgggggtggcgcctctgtcgtgtacagcgataccatctgtgatctagggggtgtcaacgagctggcaaactatggggagtactcaggcgcccccagcgagcagcagacctatgactatgccaagactatcctctccctcatgacccgagagaagcacccagatggcaagatcctcatcattggaggcagcatcgcaaacttcaccaacgtggctgccacgttcaagggcatcgtgagagcaattcgagattaccagggccccctgaaggagcacgaagtcacaatctttgtccgaagaggtggccccaactatcaggagggcttacgggtgatgggagaagtcgggaagaccactgggatccccatccatgtctttggcacagagactcacatgacggccattgtgggcatggccctgggccaccggcccatccccaaccagccacccacagcggcccacactgcaaacttcctcctcaacgccagcgggagcacatcgacgccagcccccagcaggacagcatctttttctgagtccagggccgatgaggtggcgcctgcaaagaaggccaagcctgccatgccacaagattcagtcccaagtccaagatccctgcaaggaaagagcaccaccctcttcagccgccacaccaaggccattgtgtggggcatgcagacccgggccgtgcaaggcatgctggactttgactatgtctgctcccgagacgagccctcagtggctgccatggtctaccctttcactggggaccacaagcagaagttttactgggggcacaaagagatcctgatccctgtcttcaagaacatggctgatgccatgaggaagcatccggaggtagatgtgctcatcaactttgcctctctccgctctgcctatgacagcaccatggagaccatgaactatgcccagatccggaccatcgccatcatagctgaaggcatccctgaggccctcacgagaaagctgatcaagaaggcggaccagaagggagtgaccatcatcggacctgccactgttggaggcatcaagcctgggtgctttaagattggcaacacaggtgggatgctggacaacatcctggcctccaaactgtaccgcccaggcagcgtggcctatgtctcacgttccggaggcatgtccaacgagctcaacaatatcatctctcggaccacggatggcgtctatgagggcgtggccattggtggggacaggtacccgggctccacattcatggatcatgtgttacgctatcaggacactccaggagtcaaaatgattgtggttcttggagagattgggggcactgaggaatataagatttgccggggcatcaaggagggccgcctcactaagcccatcgtctgctggtgcatcgggacgtgtgccaccatgttctcctctgaggtccagtttggccatgctggagcttgtgccaaccaggcttctgaaactgcagtagccaagaaccaggctttgaaggaagcaggagtgtttgtgccccggagctttgatgagcttggagagatcatccagtctgtatacgaagatctcgtggccaatggagtcattgtacctgcccaggaggtgccgcccccaaccgtgcccatggactactcctgggccagggagcttggtttgatccgcaaacctgcctcgttcatgaccagcatctgcgatgagcgaggacaggagctcatctacgcgggcatgcccatcactgaggtcttcaaggaagagatgggcattggcggggtcctcggcctcctctggttccagaaaaggttgcctaagtactcttgccagttcattgagatgtgtctgatggtgacagctgatcacgggccagccgtctctggagcccacaacaccatcatttgtgcgcgagctgggaaagacctggtctccagcctcacctcggggctgctcaccatcggggatcggtttgggggtgccttggatgcagcagccaagatgttcagtaaagcctttgacagtggcattatccccatggagtttgtgaacaagatgaagaaggaagggaagctgatcatgggcattggtcaccgagtgaagtcgataaacaacccagacatgcgagtgcagatcctcaaagattacgtcaggcagcacttccctgccactcctctgctcgattatgcactggaagtagagaagattaccacctcgaagaagccaaatcttatcctgaatgtagatggtctcatcggagtcgcatttgtagacatgcttagaaactgtgggtcctttactcgggaggaagctgatgaatatattgacattggagccctcaatggcatctttgtgctgggaaggagtatggggttcattggacactatcttgatcagaagaggctgaagcaggggctgtatcgtcatccgtgggatgatatttcatatgttcttccggaacacatgagcatgtaacagagccaggaaccctactgcagtaaactgaagacaagatctcttcccccaagaaaaagtgtacagacagctggcagtggagcctgctttatttagcaggggcctggaatgtaaacagccactggggtacaggcaccgaagaccaacatccacaggctaacaccccttcagtccacacaaagaagcttcatattttttttataagcatagaaataaaaaccaagccaatatttgtgactttgctctgctacctgctgtatttattatatggaagcatctaagtactgtcaggatggggtcttcctcattgtagggcgttaggatgttgctttctttttccattagttaaacatttttttctcctttggaggaagggaatgaaacatttatggcctcaagatactatacatttaaagcaccccaatgtctctctttttttttttttacttccctttcttcttccttatataacatgaagaacattgtattaatctgatttttaaagatctttttgtatgttacgtgttaagggcttgtttggtatcccactgaaatgttctgtgttgcagaccagagtctgtttatgtcagggggatggggccattgcatccttagccattgtcacaaaatatgtggagtagtaacttaatatgtaaagttgtaacatacatacatttaaaatggaaatgcagaaagctgtgaaatgtcttgtgtcttatgttctctgtatttatgcagctgatttgtctgtctgtaactgaagtgtgggtccaaggactcctaactactttgcatctgtaatccacaaagattctgggcagctgccacctcagtctcttctctgtattatcatagtctggtttaaataaactatatagtaacaatgaaggcatactgctggc

SEQ ID NO: 115152 - DNA, 4352 bp, Artificial Sequence
  derived and/or modified sequence
agccgatgggggcggggaaaagtccggctgggccgggacaaaagccggatcccgggaagctaccggctgctggggtgctccggattttgcggggttcgtcgggcctgtggaagaagcgccgcgcacggacttcggcagagacaggtagagcaggtctctctgcagccatgtcggccaaggcaatttcagagcagacgggcaaagaactcctttacaagttcatctgtaccacctcagccatccagaatcggttcaagtatgctcgggtcactcctgacacagactgggcccgcttgctgcaggaccacccctggctgctcagccagaacttggtagtcaagccagaccagctgatcaaacgtcgtggaaaacttggtctcgttggggtcaacctcactctggatggggtcaagtcctggctgaagccacggctgggacaggaagccacagttggcaaggccacaggcttcctcaagaactttctgatcgagcccttcgtcccccacagtcaggctgaggagttctatgtctgcatctatgccacccgagaaggggactacgtcctgttccaccacgaggggggtgtggacgtgggtgatgtggacgccaaggcccagaagctgcttgttggcgtggatgagaaactgaatcctgaggacatcaaaaaacacctgttggtccacgcccctgaagacaagaaagaaattctggccagttttatctccggcctcttcaatttctacgaggacttgtacttcacctacctcgagatcaatccccttgtagtgaccaaagatggagtctatgtccttgacttggcggccaaggtggacgccactgccgactacatctgcaaagtgaagtggggtgacatcgagttccctccccccttcgggcgggaggcatatccagaggaagcctacattgcagacctcgatgccaaaagtggggcaagcctgaagctgaccttgctgaaccccaaagggaggatctggaccatggtggccgggggtggcgcctctgtcgtgtacagcgataccatctgtgatctagggggtgtcaacgagctggcaaactatggggagtactcaggcgcccccagcgagcagcagacctatgactatgccaagactatcctctccctcatgacccgagagaagcacccagatggcaagatcctcatcattggaggcagcatcgcaaacttcaccaacgtggctgccacgttcaagggcatcgtgagagcaattcgagattaccagggccccctgaaggagcacgaagtcacaatctttgtccgaagaggtggccccaactatcaggagggcttacgggtgatgggagaagtcgggaagaccactgggatccccatccatgtctttggcacagagactcacatgacggccattgtgggcatggccctgggccaccggcccatccccaaccagccacccacagcggcccacactgcaaacttcctcctcaacgccagcgggagcacatcgacgccagcccccagcaggacagcatctttttctgagtccagggccgatgaggtggcgcctgcaaagaaggccaagcctgccatgccacaagattcagtcccaagtccaagatccctgcaaggaaagagcaccaccctcttcagccgccacaccaaggccattgtgtggggcatgcagacccgggccgtgcaaggcatgctggactttgactatgtctgctcccgagacgagccctcagtggctgccatggtctaccctttcactggggaccacaagcagaagttttactgggggcacaaagagatcctgatccctgtcttcaagaacatggctgatgccatgaggaagcatccggaggtagatgtgctcatcaactttgcctctctccgctctgcctatgacagcaccatggagaccatgaactatgcccagatccggaccatcgccatcatagctgaaggcatccctgaggccctcacgagaaagctgatcaagaaggcggaccagaagggagtgaccatcatcggacctgccactgttggaggcatcaagcctgggtgctttaagattggcaacacaggtgggatgctggacaacatcctggcctccaaactgtaccgcccaggcagcgtggcctatgtctcacgttccggaggcatgtccaacgagctcaacaatatcatctctcggaccacggatggcgtctatgagggcgtggccattggtggggacaggtacccgggctccacattcatggatcatgtgttacgctatcaggacactccaggagtcaaaatgattgtggttcttggagagattgggggcactgaggaatataagatttgccggggcatcaaggagggccgcctcactaagcccatcgtctgctggtgcatcgggacgtgtgccaccatgttctcctctgaggtccagtttggccatgctggagcttgtgccaaccaggcttctgaaactgcagtagccaagaaccaggctttgaaggaagcaggagtgtttgtgccccggagctttgatgagcttggagagatcatccagtctgtatacgaagatctcgtggccaatggagtcattgtacctgcccaggaggtgccgcccccaaccgtgcccatggactactcctgggccagggagcttggtttgatccgcaaacctgcctcgttcatgaccagcatctgcgatgagcgaggacaggagctcatctacgcgggcatgcccatcactgaggtcttcaaggaagagatgggcattggcggggtcctcggcctcctctggttccagaaaaggttgcctaagtactcttgccagttcattgagatgtgtctgatggtgacagctgatcacgggccagccgtctctggagcccacaacaccatcatttgtgcgcgagctgggaaagacctggtctccagcctcacctcggggctgctcaccatcggggatcggtttgggggtgccttggatgcagcagccaagatgttcagtaaagcctttgacagtggcattatccccatggagtttgtgaacaagatgaagaaggaagggaagctgatcatgggcattggtcaccgagtgaagtcgataaacaacccagacatgcgagtgcagatcctcaaagattacgtcaggcagcacttccctgccactcctctgctcgattatgcactggaagtagagaagattaccacctcgaagaagccaaatcttatcctgaatgtagatggtctcatcggagtcgcatttgtagacatgcttagaaactgtgggtcctttactcgggaggaagctgatgaatatattgacattggagccctcaatggcatctttgtgctgggaaggagtatggggttcattggacactatcttgatcagaagaggctgaagcaggggctgtatcgtcatccgtgggatgatatttcatatgttcttccggaacacatgagcatgtaacagagccaggaaccctactgcagtaaactgaagacaagatctcttcccccaagaaaaagtgtacagacagctggcagtggagcctgctttatttagcaggggcctggaatgtaaacagccactggggtacaggcaccgaagaccaacatccacaggctaacaccccttcagtccacacaaagaagcttcatattttttttataagcatagaaataaaaaccaagccaatatttgtgactttgctctgctacctgctgtatttattatatggaagcatctaagtactgtcaggatggggtcttcctcattgtagggcgttaggatgttgctttctttttccattagttaaacatttttttctcctttggaggaagggaatgaaacatttatggcctcaagatactatacatttaaagcaccccaatgtctctctttttttttttttacttccctttcttcttccttatataacatgaagaacattgtattaatctgatttttaaagatctttttgtatgttacgtgttaagggcttgtttggtatcccactgaaatgttctgtgttgcagaccagagtctgtttatgtcagggggatggggccattgcatccttagccattgtcacaaaatatgtggagtagtaacttaatatgtaaagttgtaacatacatacatttaaaatggaaatgcagaaagctgtgaaatgtcttgtgtcttatgttctctgtatttatgcagctgatttgtctgtctgtaactgaagtgtgggtccaaggactcctaactactttgcatctgtaatccacaaagattctgggcagctgccacctcagtctcttctctgtattatcatagtctggtttaaataaactatatagt

SEQ ID NO: 115153 - DNA, 3468 bp, Artificial Sequence
  derived and/or modified sequence
atgggcgccggcaagagccccgccggccccggccagaagcccgaccccggcaagctgcccgccgccggcgtgctgagaatcctgagaggcagcagcggcctgtggaagaagagaagagccagaaccagcgccgagaccggcagagccggcctgagcgccgccatgagcgccaaggccatcagcgagcagaccggcaaggagctgctgtacaagttcatctgcaccaccagcgccatccagaacagattcaagtacgccagagtgacccccgacaccgactgggccagactgctgcaggaccacccctggctgctgagccagaacctggtggtgaagcccgaccagctgatcaagagaagaggcaagctgggcctggtgggcgtgaacctgaccctggacggcgtgaagagctggctgaagcccagactgggccaggaggccaccgtgggcaaggccaccggcttcctgaagaacttcctgatcgagcccttcgtgccccacagccaggccgaggagttctacgtgtgcatctacgccaccagagagggcgactacgtgctgttccaccacgagggcggcgtggacgtgggcgacgtggacgccaaggcccagaagctgctggtgggcgtggacgagaagctgaaccccgaggacatcaagaagcacctgctggtgcacgcccccgaggacaagaaggagatcctggccagcttcatcagcggcctgttcaacttctacgaggacctgtacttcacctacctggagatcaaccccctggtggtgaccaaggacggcgtgtacgtgctggacctggccgccaaggtggacgccaccgccgactacatctgcaaggtgaagtggggcgacatcgagttccccccccccttcggcagagaggcctaccccgaggaggcctacatcgccgacctggacgccaagagcggcgccagcctgaagctgaccctgctgaaccccaagggcagaatctggaccatggtggccggcggcggcgccagcgtggtgtacagcgacaccatctgcgacctgggcggcgtgaacgagctggccaactacggcgagtacagcggcgcccccagcgagcagcagacctacgactacgccaagaccatcctgagcctgatgaccagagagaagcaccccgacggcaagatcctgatcatcggcggcagcatcgccaacttcaccaacgtggccgccaccttcaagggcatcgtgagagccatcagagactaccagggccccctgaaggagcacgaggtgaccatcttcgtgagaagaggcggccccaactaccaggagggcctgagagtgatgggcgaggtgggcaagaccaccggcatccccatccacgtgttcggcaccgagacccacatgaccgccatcgtgggcatggccctgggccacagacccatccccaaccagccccccaccgccgcccacaccgccaacttcctgctgaacgccagcggcagcaccagcacccccgcccccagcagaaccgccagcttcagcgagagcagagccgacgaggtggcccccgccaagaaggccaagcccgccatgccccaggacagcgtgcccagccccagaagcctgcagggcaagagcaccaccctgttcagcagacacaccaaggccatcgtgtggggcatgcagaccagagccgtgcagggcatgctggacttcgactacgtgtgcagcagagacgagcccagcgtggccgccatggtgtaccccttcaccggcgaccacaagcagaagttctactggggccacaaggagatcctgatccccgtgttcaagaacatggccgacgccatgagaaagcaccccgaggtggacgtgctgatcaacttcgccagcctgagaagcgcctacgacagcaccatggagaccatgaactacgcccagatcagaaccatcgccatcatcgccgagggcatccccgaggccctgaccagaaagctgatcaagaaggccgaccagaagggcgtgaccatcatcggccccgccaccgtgggcggcatcaagcccggctgcttcaagatcggcaacaccggcggcatgctggacaacatcctggccagcaagctgtacagacccggcagcgtggcctacgtgagcagaagcggcggcatgagcaacgagctgaacaacatcatcagcagaaccaccgacggcgtgtacgagggcgtggccatcggcggcgacagataccccggcagcaccttcatggaccacgtgctgagataccaggacacccccggcgtgaagatgatcgtggtgctgggcgagatcggcggcaccgaggagtacaagatctgcagaggcatcaaggagggcagactgaccaagcccatcgtgtgctggtgcatcggcacctgcgccaccatgttcagcagcgaggtgcagttcggccacgccggcgcctgcgccaaccaggccagcgagaccgccgtggccaagaaccaggccctgaaggaggccggcgtgttcgtgcccagaagcttcgacgagctgggcgagatcatccagagcgtgtacgaggacctggtggccaacggcgtgatcgtgcccgcccaggaggtgcccccccccaccgtgcccatggactacagctgggccagagagctgggcctgatcagaaagcccgccagcttcatgaccagcatctgcgacgagagaggccaggagctgatctacgccggcatgcccatcaccgaggtgttcaaggaggagatgggcatcggcggcgtgctgggcctgctgtggttccagaagagactgcccaagtacagctgccagttcatcgagatgtgcctgatggtgaccgccgaccacggccccgccgtgagcggcgcccacaacaccatcatctgcgccagagccggcaaggacctggtgagcagcctgaccagcggcctgctgaccatcggcgacagattcggcggcgccctggacgccgccgccaagatgttcagcaaggccttcgacagcggcatcatccccatggagttcgtgaacaagatgaagaaggagggcaagctgatcatgggcatcggccacagagtgaagagcatcaacaaccccgacatgagagtgcagatcctgaaggactacgtgagacagcacttccccgccacccccctgctggactacgccctggaggtggagaagatcaccaccagcaagaagcccaacctgatcctgaacgtggacggcctgatcggcgtggccttcgtggacatgctgagaaactgcggcagcttcaccagagaggaggccgacgagtacatcgacatcggcgccctgaacggcatcttcgtgctgggcagaagcatgggcttcatcggccactacctggaccagaagagactgaagcagggcctgtacagacacccctgggacgacatcagctacgtgctgcccgagcacatgagcatgtag

SEQ ID NO: 115154 - DNA, 85 bp, Artificial Sequence
  derived and/or modified sequence
aacttcagcaaattctcaggatacaaaatcaatgtgcaaaaaccacaagcattcctatacaccaataatagacagtgagccaaat

SEQ ID NO: 115155 - protein, 1091 aa, Artificial Sequence
  derived and/or modified sequence
MSAKAISEQTGKELLYKFICTTSAIQNRFKYARVTPDTDWARLLQDHPWLLSQNLVVKPDQLIKRRGKLGLVGVNLTLDGVKSWLKPRLGQEATVGKATGFLKNFLIEPFVPHSQAEEFYVCIYATREGDYVLFHHEGGVDVGDVDAKAQKLLVGVDEKLNPEDIKKHLLVHAPEDKKEILASFISGLFNFYEDLYFTYLEINPLVVTKDGVYVLDLAAKVDATADYICKVKWGDIEFPPPFGREAYPEEAYIADLDAKSGASLKLTLLNPKGRIWTMVAGGGASVVYSDTICDLGGVNELANYGEYSGAPSEQQTYDYAKTILSLMTREKHPDGKILIIGGSIANFTNVAATFKGIVRAIRDYQGPLKEHEVTIFVRRGGPNYQEGLRVMGEVGKTTGIPIHVFGTETHMTAIVGMALGHRPIPNQPPTAAHTANFLLNASGSTSTPAPSRTASFSESRADEVAPAKKAKPAMPQGKSTTLFSRHTKAIVWGMQTRAVQGMLDFDYVCSRDEPSVAAMVYPFTGDHKQKFYWGHKEILIPVFKNMADAMRKHPEVDVLINFASLRSAYDSTMETMNYAQIRTIAIIAEGIPEALTRKLIKKADQKGVTIIGPATVGGIKPGCFKIGNTGGMLDNILASKLYRPGSVAYVSRSGGMSNELNNIISRTTDGVYEGVAIGGDRYPGSTFMDHVLRYQDTPGVKMIVVLGEIGGTEEYKICRGIKEGRLTKPIVCWCIGTCATMFSSEVQFGHAGACANQASETAVAKNQALKEAGVFVPRSFDELGEIIQSVYEDLVANGVIVPAQEVPPPTVPMDYSWARELGLIRKPASFMTSICDERGQELIYAGMPITEVFKEEMGIGGVLGLLWFQKRLPKYSCQFIEMCLMVTADHGPAVSGAHNTIICARAGKDLVSSLTSGLLTIGDRFGGALDAAAKMFSKAFDSGIIPMEFVNKMKKEGKLIMGIGHRVKSINNPDMRVQILKDYVRQHFPATPLLDYALEVEKITTSKKPNLILNVDGLIGVAFVDMLRNCGSFTREEADEYIDIGALNGIFVLGRSMGFIGHYLDQKRLKQGLYRHPWDDISYVLPEHMSM

SEQ ID NO: 115156 - DNA, 3276 bp, Artificial Sequence
  derived and/or modified sequence
atgagcgccaaagccatttctgaacagactggaaaggaacttttgtacaagttcatctgtacaaccagtgcaatccagaatcggttcaagtacgcgcgagtgacgcctgataccgattgggccaggctcctgcaggatcacccatggcttctctctcagaatcttgttgttaaacctgaccagctgattaaacggcgcgggaagctcgggctggtcggcgtaaacctgaccttggacggcgtcaagtcttggctgaaacctagactgggccaggaggccactgtgggcaaggccaccgggttcctgaagaactttcttatcgagcctttcgtgccacactcccaggcagaagagttctatgtttgcatctacgcgactcgcgagggggactatgtgttattccaccatgaggggggggtcgatgttggcgatgtagacgccaaagcccaaaagctgctcgtcggtgtggatgagaagctgaatccagaggacattaaaaagcacctcttagtccatgcacccgaggacaagaaagagatactggcctcgttcattagcgggttgttcaacttctatgaggacctgtattttacgtacctggaaatcaatccactggtggtgactaaagacggggtgtatgtcctggatctcgcggcgaaggtggatgctaccgctgactatatctgtaaggttaagtggggagatattgaatttccacccccgtttggaagagaagcctacccagaggaggcgtacatcgctgaccttgacgcaaagtcaggagcttcactgaaattgactctcctgaaccccaagggcaggatctggaccatggtagccggcgggggcgcctcagtagtgtattcggacactatctgcgatcttgggggtgttaacgagctggcaaattatggtgaatactccggagccccatcggaacagcagacttatgattacgccaagacaatcctatccctgatgactagagagaagcaccccgacggcaagattttaatcatcggaggttcaatcgctaacttcactaacgttgctgcaaccttcaagggtatcgtgagggctatcagggactatcaggggccactgaaggagcacgaggtgaccatctttgtacgaagagggggtccaaattaccaagagggcctgagagttatgggagaagtgggcaagacaacaggaatccctatacatgttttcgggaccgagactcacatgactgctattgtgggtatggccctcggccacaggccaataccaaatcaacccccaactgccgcacatacagctaacttcttgttgaatgcatcaggcagtacaagtacccctgcgcctagccgaaccgcatccttcagcgaaagccgcgctgatgaagtggcacccgccaaaaaagcgaaacctgctatgccgcaaggcaaaagtaccacactgttctcacggcatacaaaggcgattgtctggggtatgcagacccgagccgttcagggaatgttggatttcgactatgtctgtagccgggatgagccctcggtggccgctatggtttacccattcactggcgatcataagcagaaattctactggggacacaaggagattttgattcccgtgttcaaaaacatggctgacgctatgagaaagcatcctgaggtggacgtgctaattaacttcgctagcctcaggagcgcatatgactccactatggaaactatgaattatgcccagattaggacaatcgccattatcgctgagggaattcctgaagccttgacaaggaaactaattaagaaagcagaccagaagggggttaccatcatcggccccgccactgtaggtggaattaagccaggatgctttaagataggtaacactggggggatgcttgataacattcttgccagcaagctgtataggccaggctcagtcgcgtacgtgagccgcagcggaggtatgtccaacgagttgaacaacatcatttcaagaacaactgacggcgtgtatgagggcgtcgcaataggaggggaccggtatccaggatcaacttttatggatcacgttctgcggtatcaggacactccgggggtaaagatgatcgtcgtactgggggagattggaggcacggaggaatataagatctgcagaggcatcaaggagggccgcctgaccaagcccattgtctgttggtgcatcggcacatgtgctacaatgttttcttccgaagtccagtttggccatgccggcgcctgcgccaaccaagcaagcgagaccgctgttgcgaagaatcaggccctaaaagaagccggcgtttttgtcccccgatcgttcgatgagctaggggagattattcagagtgtatacgaagatctcgttgctaatggcgtgatcgtaccagcgcaggaagtgcccccccccactgtgccaatggactacagttgggctcgggagctcggcctcattcggaagcccgcctcgtttatgacaagtatatgcgacgaacgaggtcaggagctgatttatgcaggaatgccaattacagaggttttcaaggaggaaatgggaatcggcggcgtgctgggcttactatggtttcagaaaaggctccctaagtacagttgccagttcatcgagatgtgcctgatggtaacagcagatcatggacccgccgtctccggcgcacataacaccatcatatgtgctcgcgctggaaaagatttggtgagttctcttacgtccggactgctgaccattggtgatcggtttggaggggctctggatgcagccgccaagatgttcagtaaggcttttgattccggaatcattccaatggagtttgttaacaagatgaagaaggaggggaagttaataatgggcattggacatagggtaaagagcattaacaatcccgacatgagagtacaaattctgaaagactatgtgcgtcagcatttcccggccacacctctgctagactatgcactggaagtggagaagatcaccacctcgaagaaaccaaatctcatcctgaacgtggatggactgattggagtggccttcgtggatatgctgcgcaattgtggcagtttcacacgggaagaggcggatgagtacatcgacattggggcgctgaacgggattttcgtgctggggagaagtatgggatttattgggcactacttggaccagaagagactcaaacagggcctttataggcacccttgggatgacattagttatgttctcccggaacacatgtccatgtag

SEQ ID NO: 115157 - DNA, 3276 bp, Artificial Sequence
  derived and/or modified sequence
atgagtgccaaggccatctccgagcagacggggaaggagctcttgtataagttcatatgcaccacgtccgctatacagaataggtttaaatacgccagggttacaccagataccgattgggctcgactgttgcaggatcacccttggctgctgtctcaaaatttggtagtcaaacctgatcagttgattaagcggaggggcaagctggggctcgttggcgttaatctgacgttagacggggttaaaagctggctgaagccaaggctcggccaggaagcaactgtaggaaaagccacaggctttttgaaaaattttcttatcgagccattcgtgccacattcccaagccgaagagttctacgtctgtatttacgctaccagggaaggtgattacgtcctgtttcatcatgagggtggggtggatgtaggcgatgtagacgcaaaggctcagaagctgctggtcggcgtcgacgagaaacttaaccctgaggacattaaaaaacacctgctggtgcatgccccagaagacaagaaggaaatcctcgccagctttattagtggactattcaatttttatgaggacctgtacttcacctatctggaaattaatcccctcgtcgtcacaaaggacggcgtttacgtgctcgacctggccgcgaaggtcgatgcgacagcagactatatttgtaaagtgaaatggggcgatatcgaattccctcctccttttggcagggaggcctatcctgaggaagcatatattgccgacctggatgccaagtcaggggcctcattgaaactaaccctcctgaatcctaaaggacggatctggacaatggtggccggcggcggcgcctctgtggtgtacagtgacaccatatgtgacctgggcggcgtgaatgaactggctaactacggggagtactcaggtgccccttcggaacaacagacgtacgactacgccaaaactattctgtcgcttatgacccgggagaagcaccctgacggaaaaatcctgattattggaggatcaattgcaaatttcacaaacgtggctgccacctttaaaggtattgtgagggcaatacgcgattaccaaggtccgttgaaagaacacgaagtcaccatattcgtgcggcgcggcggaccgaattatcaagagggcctgcgggtaatgggtgaggtggggaagactacaggcatcccaatccatgtgttcgggactgaaactcatatgactgccatcgtagggatggcactaggtcacaggcccattccgaatcagcctccgacagcggcgcatactgccaactttctgctgaatgccagtggttccaccagtacgccagcccccagcagaactgccagtttctcagagtccagagcagacgaggtggcaccagccaagaaggctaagcctgcgatgccccaggggaagtccacaaccctgtttagccgccataccaaggccattgtctggggtatgcagaccagagctgtacagggcatgctagattttgactacgtgtgttccagggacgagccctccgtcgccgcgatggtctacccgttcacaggtgaccacaaacagaaattttactggggccacaaagagatactaatccctgtgttcaagaacatggccgatgccatgagaaagcatcctgaggtggatgtgcttattaacttcgcctcacttcgttctgcttatgacagcacaatggagactatgaactacgcacagattcgaacgattgctatcatagcagaaggcatccctgaggcactcactcgaaagctgattaaaaaggctgaccagaagggtgtaaccatcatcggacctgcaaccgtgggaggtatcaagccgggctgtttcaaaatcggcaacaccggtggcatgcttgataacattttagcatccaagttgtatcggcccgggtccgtggcctacgtgtcacgaagcgggggcatgtccaacgagctgaacaacattatttcgagaaccacagacggagtgtacgagggagttgccatcgggggcgaccgctaccctgggtccacattcatggatcacgtgctgaggtaccaagacacacctggcgtcaagatgatagttgtgctcggagagatcggcggcacagaggagtacaagatctgcagaggcatcaaggaaggccgacttaccaagcccattgtgtgctggtgtattggaacttgcgcaacaatgttctcgtctgaggtgcagttcggtcacgcaggagcgtgtgctaatcaggcaagcgaaacagcagtagctaagaatcaagcactgaaagaggcgggagtgttcgtgcctagatctttcgacgagctcggcgaaattattcaaagcgtgtatgaagacctcgtcgccaatggcgtgatcgttccagctcaggaggtaccaccacctaccgtacccatggattatagctgggccagagaactgggtctcatccgaaagcccgcgtccttcatgacttctatctgcgacgagaggggccaggaactcatctatgctggaatgcccatcaccgaagtgttcaaagaggaaatggggattggaggcgttctgggcctgctctggttccagaagcgcctgcctaagtattcatgtcaatttattgagatgtgtctcatggttaccgctgatcatggtcctgcggtttctggcgcacacaacacaattatatgtgcaagagcaggaaaggatctggtctcctcactaacttccggcctattaactatcggggaccgctttggaggagccctggacgccgctgccaagatgtttagcaaggccttcgacagcggaatcatccccatggaattcgttaataaaatgaagaaagaaggtaaactgatcatgggaatcggtcatagagtgaagtccataaacaacccagacatgcgtgtccagatactgaaggattatgtgcgccaacatttcccagctaccccactcctggactatgctctggaggttgaaaagataaccacttccaagaaacccaaccttatcctcaacgttgatggcctgatcggggttgccttcgtcgacatgctcagaaactgcgggtcctttacacgggaagaagcagatgaatatattgatattggggccctgaacgggatctttgtgctgggaaggagtatgggcttcatcggccactatctggatcaaaagaggctgaagcaggggttgtaccggcacccgtgggatgacatttcctacgtgcttccggagcatatgtctatgtag

SEQ ID NO: 115158 - DNA, 2493 bp, Artificial Sequence
  derived and/or modified sequence
atgtccgcaaaagccattagcgagcaaacagggaaggaactgctgtacaaatttatctgtactacgtctgccattcagaaccgcttcaagtacgcccgggtaacaccagatacagattgggcacgacttctgcaggatcacccctggctgctttctcaaaatttggtagtcaaacctgatcaactgatcaagcggcgcggcaaattgggactggttggcgtgaaccttacccttgatggcgtgaagtcatggctgaaacctcgtctgggccaggaagccacgggcatcgtgcgggcaatccgcgattatcagggcccgctgaaagagcatgaggtgactatatttgtccgccgaggaggccccaattaccaagaaggactgcgagtgatgggcgaggtggggaaaacaacaggaatccccattcacgtttttggcaccgagacacatatgaccgccattgtggggatggcattagggcatcgccctatcccgaatcagcctcctacagcggcccacactgctaactttctactgaacgccagcggcagcaccagcaccccagctccctcgcgcactgcaagtttttccgaatcacgggccgacgaggtcgcacctgctaagaaagctaagcctgccatgccacagggcaagtctacaactttgttctcacgccacacaaaggccatcgtatggggaatgcagacacgtgctgtccagggaatgctggactttgattacgtctgctctcgggatgaacccagcgtggcggccatggtgtacccgttcactggcgaccacaagcagaagttctactggggacataaggagatccttatcccagtctttaagaacatggcggatgccatgaggaaacacccggaggtagatgtacttataaacttcgcaagcctcagatcagcatatgatagtaccatggagacaatgaactacgcccagatccgcacaattgcgatcatcgccgaggggattcctgaggcccttaccaggaaactgattaagaaagcagaccaaaaaggggtgaccattattggccccgccaccgtaggaggaatcaaacccggctgctttaagattggcaatacgggcggtatgctggacaatatacttgcatccaaattgtaccgacccggctccgtcgcttatgtgtcacgcagtggcggcatgagcaatgaactgaataatattatcagccggaccaccgatggggtgtatgagggcgtcgccattggcggcgacagataccctggttcaacattcatggaccacgtgttgcgctaccaagacacacctggagtgaagatgatcgtggtcttgggggagatcgggggtacagaggagtataagatctgtcggggaatcaaagaaggccgtttgactaaacctatcgtgtgttggtgtatcggaacgtgtgccacaatgtttagtagcgaggttcagttcggccacgctggcgcctgtgccaatcaagcttccgaaacggctgttgcgaagaatcaggcgctgaaagaagccggggtttttgtcccgcgatcttttgatgagttgggcgagatcattcagagcgtctatgaggatctagttgctaatggcgttatcgtccctgcccaggaagtgccgccaccaaccgtgccgatggactattcctgggcccgggagctgggtttgattcgaaagcctgcaagtttcatgactagtatctgtgacgagcggggacaagagcttatctacgccggcatgcctatcaccgaagtgttcaaagaggagatggggattgggggagtgcttggcctgctgtggtttcagaagcgactgcccaagtacagctgtcaatttatagaaatgtgtctgatggtgacggccgatcacggcccagccgtgagtggagctcacaacacgattatctgtgcccgcgcaggaaaagacctagtgtccagcctgacaagcggcctgttgaccattggggaccgctttggtggtgcattggatgcggccgctaaaatgtttagcaaggcctttgacagtgggataatcccaatggaattcgtgaacaagatgaaaaaagagggtaagcttattatggggatcgggcatcgcgttaagagcattaataaccccgatatgagagtccaaatcctgaaggactatgtgaggcagcactttcccgctacgcctttgctggattacgccctcgaggtcgaaaagataactacaagtaagaaaccaaacctgattcttaatgtggacgggctcattggtgttgcctttgtcgatatgctgcgcaattgtggatcctttacacgagaagaagccgacgaatacatcgatatcggtgccctgaacgggatcttcgtactgggcaggtcgatgggcttcatcggacactatttggaccagaaaagactgaagcagggtctatatcgacacccttgggacgacataagttacgttttgcccgaacacatgtccatgtag

SEQ ID NO: 115159 - DNA, 3276 bp, Artificial Sequence
  derived and/or modified sequence
atgtctgccaaggccatcagcgagcagacaggcaaggagctgctgtacaagttcatctgcaccaccagcgccatccagaaccgcttcaagtatgcccgggtgaccccagacacagactgggcccggctgctgcaggaccacccctggctgctgagccagaacctggtggtgaagccagaccagctgatcaagagaagaggcaagctgggcctggtgggcgtgaacctgaccctggatggagtgaagtcctggctgaagccccggctgggccaggaggccaccgtgggcaaggccaccggcttcctgaagaacttcctgattgagccctttgtgccccacagccaggccgaggagttctacgtgtgcatctatgccacccgggagggggactatgtgctcttccaccacgagggcggcgtggatgtgggagatgtggatgccaaggcccagaagctgctggtgggcgtggatgagaagctgaaccctgaggacatcaagaagcacctgctggtgcacgcccctgaggacaagaaggagatcctggccagcttcatcagcggcctcttcaacttctatgaagatctctacttcacctacctggagatcaaccccctggtggtgaccaaggatggagtgtatgtgctggacctggccgccaaggtggatgccacagctgactacatctgcaaggtgaagtggggagacatcgagttccccccacccttcggccgggaggcctacccagaggaggcctacatcgctgacctggatgccaagagcggggccagcctgaagctgaccctgctgaaccccaagggccgcatctggaccatggtggccggcggcggggcctctgtggtgtacagcgacaccatctgtgacctgggcggcgtgaatgagctggccaactacggggagtacagcggggcccccagcgagcagcagacctatgactatgccaagaccatcctgagcctgatgacccgggagaagcacccagatggcaagatcctgatcatcggcggcagcatcgccaacttcaccaacgtggccgccaccttcaagggcatcgtgcgggccatccgggactaccagggccccctgaaggagcacgaggtgaccatctttgtgcggcggggcggccccaactaccaggagggcctgcgggtgatgggagaggtgggcaagaccaccggcatccccatccacgtgtttggaacagagacccacatgacagccatcgtgggcatggccctgggccaccggcccatccccaaccagcccccaacagctgcccacacagccaacttcctgctgaatgccagcggcagcaccagcaccccagcccccagcaggacagccagcttcagcgagagcagagcagatgaggtggccccagccaagaaggccaagccagccatgccccagggcaagagcaccaccctcttcagccgccacaccaaggccatcgtgtggggcatgcagaccagggctgtgcagggcatgctggactttgattatgtgtgcagcagagatgagcccagcgtggccgccatggtgtaccccttcaccggggaccacaagcagaagttctactggggccacaaggagatcctgatccctgtgttcaagaacatggctgatgccatgaggaagcaccctgaggtggatgtgctgatcaactttgccagcctgcggagcgcctatgacagcaccatggagaccatgaactatgcccagatccgcaccatcgccatcatcgccgagggcatccctgaggccctgaccaggaagctgatcaagaaggctgaccagaagggcgtgaccatcatcggccctgccaccgtgggcggcatcaagccaggctgcttcaagattggcaacacaggaggcatgctggacaacatcctggccagcaagctgtaccggcccggctctgtggcctacgtgagccgcagcggcggcatgagcaatgagctgaacaacatcatcagcaggaccacagatggagtgtatgagggcgtggccatcggcggggaccgctacccaggcagcaccttcatggaccacgtgctgcgctaccaggacaccccaggagtgaagatgattgtggtgctgggggagattggaggaacagaggagtacaagatctgccggggcatcaaggagggccgcctgaccaagcccatcgtgtgctggtgcatcggcacctgtgccaccatgttcagcagcgaggtgcagtttggacatgctggggcctgtgccaaccaggccagcgagacagctgtggccaagaaccaggccctgaaggaggccggcgtgtttgtgcccaggagctttgatgagctgggggagatcatccagagcgtgtatgaggacctggtggccaatggagtcatcgtgcctgcccaggaggtgcccccacccaccgtgcccatggactacagctgggcccgggagctgggcctcatcaggaagccagccagcttcatgaccagcatctgtgatgagcggggccaggagctgatctatgccggcatgcccatcacagaggtgttcaaggaggagatgggcattggaggagtgctgggcctgctgtggttccagaagaggctgcccaagtacagctgccagttcatcgagatgtgcctgatggtgacagctgaccacggccctgctgtgtctggggcccacaacaccatcatctgtgcccgggccggcaaggacctggtgagcagcctgaccagcggcctgctgaccatcggggacagatttggaggagccctggatgctgctgccaagatgttcagcaaggcctttgacagcggcatcatccccatggagtttgtgaacaagatgaagaaggagggcaagctgatcatgggcatcggccaccgggtgaagagcatcaacaacccagacatgagggtgcagatcctgaaggactatgtgcggcagcacttccctgccacccccctgctggactatgccctggaggtggagaagatcaccaccagcaagaagcccaacctgatcctgaatgtggatggcctgattggagtggcctttgtggacatgctgaggaactgtggcagcttcacccgggaggaggctgatgagtacatcgacatcggggccctgaatggcatctttgtgctgggccgctccatgggcttcatcggccactacctggaccagaagaggctgaagcagggcctgtaccgccacccctgggatgacatctcctatgtgctgcctgagcacatgtccatgtag

SEQ ID NO: 115160 - DNA, 2493 bp, Artificial Sequence
  derived and/or modified sequence
atgtctgccaaggccatcagcgagcagacaggcaaggagctgctgtacaagttcatctgcaccaccagcgccatccagaaccgcttcaagtatgcccgggtgaccccagacacagactgggcccggctgctgcaggaccacccctggctgctgagccagaacctggtggtgaagccagaccagctgatcaagagaagaggcaagctgggcctggtgggcgtgaacctgaccctggatggagtgaagtcctggctgaagccccggctgggccaggaggccaccggcatcgtgcgggccatccgggactaccagggccccctgaaggagcacgaggtgaccatctttgtgagaagaggaggccccaactaccaggagggcctgcgggtgatgggagaggtgggcaagaccaccggcatccccatccacgtgtttggaacagagacccacatgacagccatcgtgggcatggccctgggccaccggcccatccccaaccagcccccaacagctgcccacacagccaacttcctgctgaatgccagcggcagcaccagcaccccagcccccagcaggacagccagcttcagcgagagcagagcagatgaggtggccccagccaagaaggccaagccagccatgccccagggcaagagcaccaccctcttcagccgccacaccaaggccatcgtgtggggcatgcagaccagggctgtgcagggcatgctggactttgattatgtgtgcagcagagatgagcccagcgtggccgccatggtgtaccccttcaccggggaccacaagcagaagttctactggggccacaaggagatcctgatccctgtgttcaagaacatggctgatgccatgaggaagcaccctgaggtggatgtgctgatcaactttgccagcctgcggagcgcctatgacagcaccatggagaccatgaactatgcccagatccgcaccatcgccatcatcgccgagggcatccctgaggccctgaccaggaagctgatcaagaaggctgaccagaagggcgtgaccatcatcggccctgccaccgtgggcggcatcaagccaggctgcttcaagattggcaacacaggaggcatgctggacaacatcctggccagcaagctgtacagacctggctctgtggcctacgtgagccgcagcggcggcatgagcaatgagctgaacaacatcatcagcaggaccacagatggagtgtatgaaggagtggccatcggcggggaccgctacccaggcagcaccttcatggaccacgtgctgcgctaccaggacaccccaggagtgaagatgattgtggtgctgggggagatcggcggcacagaggagtacaagatctgccggggcatcaaggagggccgcctgaccaagcccatcgtgtgctggtgcatcggcacctgtgccaccatgttcagcagcgaggtgcagtttggacatgctggggcctgtgccaaccaggccagcgagacagctgtggccaagaaccaggccctgaaggaggccggcgtgtttgtgcccaggagctttgatgagctgggggagatcatccagagcgtgtatgaggacctggtggccaacggggtgattgtgcctgcccaggaggtgcccccacccaccgtgcccatggactacagctgggcccgggagctgggcctcatcaggaagccagccagcttcatgaccagcatctgtgatgagcggggccaggagctgatctatgccggcatgcccatcacagaggtgttcaaggaggagatgggcatcggcggcgtgctgggcctgctgtggttccagaagaggctgcccaagtacagctgccagttcatcgagatgtgcctgatggtgacagctgaccacggccctgctgtgtctggggcccacaacaccatcatctgtgcccgggccggcaaggacctggtgagcagcctgaccagcggcctgctgaccatcggggacagatttggaggagccctggatgctgctgccaagatgttcagcaaggcctttgattctggcatcatccccatggagtttgtgaacaagatgaagaaggagggcaagctgatcatgggcatcggccaccgggtgaagagcatcaacaacccagacatgagggtgcagatcctgaaggactatgtgcggcagcacttccctgccacccccctgctggactatgccctggaggtggagaagatcaccaccagcaagaagcccaacctgatcctgaatgtggatggcctcatcggcgtggcctttgtggacatgctgaggaactgtggcagcttcacccgggaggaggctgatgagtacattgatattggagccctgaatggcatctttgtgctgggccgctccatgggcttcatcggccactacctggaccagaagaggctgaagcagggcctgtaccgccacccctgggatgacatctcctatgtgctgcctgagcacatgtccatgtag

SEQ ID NO: 115161 - DNA, 3276 bp, Artificial Sequence
  derived and/or modified sequence
atgagcgccaaggccatcagcgagcagaccggcaaggagctgctgtacaaattcatctgcacaacctccgccatacaaaacagattcaaatatgcccgagtgacacccgatacagattgggccagactcttgcaagatcacccatggcttctgtcacagaatttggtcgtcaaacctgaccagctaataaagagaagaggcaaactaggcctggtgggtgttaatttaaccctcgacggcgtgaaaagttggctgaagcctcggctcggacaagaagccacagtgggaaaagcaactgggttcctaaagaacttcctgattgagccattcgtacctcacagccaggccgaggagttctatgtgtgcatttacgcgacccgcgaaggtgattatgtactgtttcaccacgaaggaggagtggacgtcggcgacgtggacgctaaagcccaaaagctgttggttggcgtcgatgaaaagttaaaccctgaggatatcaaaaaacatcttttggtacacgcaccagaggataagaaggaaatattagcatctttcatcagcggccttttcaatttttacgaggacttgtatttcacttatttggaaattaaccctctggtcgtcaccaaggacggtgtgtacgtcttagaccttgcggcaaaggtcgatgcgactgctgactatatttgtaaggttaaatggggagatatcgaatttccccccccatttgggcgagaggcttaccccgaggaggcctacatagctgatctggatgctaagtctggcgccagcctgaagttaacactgctgaaccccaaaggccgaatctggacaatggtcgcaggggggggagccagtgtggtttattctgatacgatttgcgatttagggggggtgaacgaactggcaaactatggagaatactccggagccccaagtgagcaacagacgtatgactatgccaagactatcctttctcttatgacacgagagaaacatcccgacggaaagattctgatcataggaggatcaattgccaattttacaaacgtggcagcaactttcaaagggattgtgcgagctatacgggattatcaggggccactcaaggaacacgaagtgacaatcttcgtccgtagaggcggtccgaattaccaggagggattgcgggtcatgggggaggttggcaagaccaccggtattcccattcacgtgtttggcacagagactcacatgaccgctatagtaggcatggcgctcggccaccggccaatccctaaccagccgcccacggcagctcacacagctaactttttattaaatgcatcgggtagtacttccactcccgcgcccagccggactgcctccttttccgagtcgagagcagatgaagttgcccccgctaaaaaggccaaaccagcaatgccgcaaggaaagtccactaccctgttctccagacatacaaaggccattgtgtggggtatgcaaactcgcgctgtgcagggtatgcttgactttgattatgtgtgttcgagagatgagccgagcgtggctgctatggtttatcctttcaccggcgaccataagcaaaagttttactggggtcataaggaaatcctcatccccgtgtttaaaaatatggcggatgctatgaggaagcacccagaggtggacgtgctgattaactttgccagcctgagatcagcttacgattccaccatggaaaccatgaattacgcccagattcggacaatcgcaataatcgccgaaggcatccccgaggctctgacccggaaactgatcaaaaaagcggatcagaaaggcgtgaccatcatagggcctgccactgtgggcggcattaagcctggctgtttcaagatcgggaatactggcggaatgttagacaacatactcgcgtctaagctgtatcggccgggcagtgtggcatatgtgtccagaagcggcgggatgtccaacgagctgaataatatcatatcccgcacaacagatggagtatacgagggagtcgcaatcggaggggaccgttacccaggctccactttcatggaccacgtcctgcggtaccaggacacgcccggggttaagatgatcgtggtgctgggagagatcgggggcaccgaagagtacaagatctgtcgggggatcaaagaggggcgtctcactaagcccatcgtttgttggtgcatcggtacctgcgccactatgttcagctctgaggtacagttcggccacgcaggcgcatgcgcaaaccaggcatctgagacagctgtcgccaagaaccaggccctgaaggaagcgggggtgttcgttcctagatcatttgacgaactgggcgaaatcattcaatctgtatatgaagacctagttgccaatggggtgatcgttccggctcaggaggtgcctccaccgactgtgcccatggactatagctgggctcgggaactcggactgataagaaaacccgccagtttcatgacatccatctgcgacgagcgtggccaggaacttatttatgccggaatgcctatcactgaggtcttcaaagaggaaatgggaatcggaggagtactcggtctgctttggttccagaaaagactgcctaagtactcttgtcaatttattgagatgtgtctaatggtcacggcagaccatgggcctgctgtgtctggcgcgcataatactattatctgcgcacgcgccgggaaggacctcgtgtcttctctgactagtggcctgcttacaatcggcgaccgcttcgggggcgcacttgacgcggctgcaaagatgtttagcaaagcctttgatagcggcattatcccaatggagttcgtcaacaaaatgaagaaagagggcaagttgatcatgggcattgggcatagggtgaagagtattaacaatcctgatatgcgggtacagattttaaaggattatgtgcgccagcacttcccagcgacccctttgctcgactacgctctggaagtggagaaaatcaccacaagcaaaaagcctaatttgatactgaatgtggatggactgattggagtcgccttcgtggacatgctgcggaactgtggtagcttcactcgtgaggaagccgacgaatacatcgatatcggtgctctgaatgggatcttcgtcttgggaagatctatgggatttataggacattatctggaccagaagcggcttaagcagggcctgtaccggcatccttgggacgacatctcatacgtactccccgaacacatgtctatgtag

SEQ ID NO: 115162 - DNA, 3276 bp, Artificial Sequence
  derived and/or modified sequence
atgagcgccaaggccatcagcgagcagaccggcaaggagctgctgtataaatttatttgtactacgagtgccatccaaaaccggtttaaatatgctagggtgacgccggacacagactgggctagactgttgcaggatcatccctggctcctgtctcagaatcttgttgtgaagccggatcagttgatcaaaagaaggggcaagcttggtctagtaggcgtgaacctgacactagatggcgtcaaatcatggcttaaacctagattaggccaggaagccaccgtgggtaaagcaaccggctttctgaagaattttctaatcgaacccttcgtcccccacagccaggcggaagaattctacgtttgcatctatgccactcgcgaaggagactatgtgttattccaccacgaaggaggcgtcgacgtgggggacgttgatgccaaggcccagaagctgctggtcggcgtggacgagaaacttaatcccgaggacataaaaaaacacctgctcgtccatgcaccagaagataagaaagagattctagcgagcttcattagtggtctctttaacttttacgaagatttatatttcacttatctggaaataaaccctctagtggtgaccaaggacggtgtttatgtgctggacctcgcagcaaaagtcgacgctacagctgactacatttgtaaagtaaagtggggagacattgagtttcctccgccctttggcagggaggcttaccctgaagaggcctacatagccgatcttgacgccaaaagtggcgctagtttgaaattgacacttctgaatccgaaaggccggatctggacgatggtggctggaggcggcgcttccgttgtttactccgataccatatgtgatctggggggcgtgaacgagttagccaactacggcgaatattctggagccccatccgagcagcaaacatatgattacgcgaagaccattctttctctcatgacaagagagaagcaccccgacggtaagatactgatcatcggaggctctattgccaattttaccaatgttgccgccacctttaaggggatagtgcgcgctatacgggattatcaaggacccctgaaagagcacgaggtcacaattttcgtcagaagagggggccccaactaccaggaaggtctcagagtgatgggagaggtggggaaaactactgggatcccaatacatgtgttcggaaccgagacacatatgactgctatcgtggggatggccctgggccatcgtccaattcctaatcagccacctacagccgctcacaccgctaacttcctccttaacgcaagtggttccaccagcacgccggcgccttctaggaccgcttccttttcagagagccgtgcggatgaagtggcacccgccaagaaggcaaaaccagccatgccacagggaaaatctaccactctattctcacgtcacacaaaagccatagtctggggcatgcaaacccgtgccgtccagggtatgcttgacttcgactacgtgtgctctagagatgaaccttctgttgctgcaatggtgtatccctttaccggtgaccacaaacagaagttttattggggacacaaggaaattctgatccctgtgtttaagaatatggcagacgccatgcgcaagcaccccgaggtggatgtgctgatcaatttcgctagcctacggtccgcctatgatagtaccatggagacgatgaactacgctcagatcaggacaatcgctataattgcagaggggattcctgaggcccttacccgcaagttgattaaaaaagctgaccagaaaggagttaccatcatcggcccggccactgtagggggcataaagcccggctgcttcaagatcgggaataccggcggtatgctagataatatactcgcaagcaaattgtacagacctgggagcgtcgcttatgtgtctaggtccggcggcatgtctaacgagctgaacaatattataagcagaacaaccgatggggtctatgaaggcgtcgcaatcggaggcgaccggtacccgggttcgaccttcatggatcacgttctcaggtaccaggacaccccaggggtaaaaatgatcgtggtgctgggtgaaatcggaggaacagaagaatacaagatctgtagaggcattaaggagggcaggttaactaagcccatcgtgtgttggtgcatcggaacgtgtgcaacaatgttctcttccgaggtccagtttggacacgccggcgcttgcgctaatcaggctagtgagaccgccgtggcaaagaatcaggcgctaaaagaagctggcgtgtttgtcccaagaagttttgatgaactgggagagattatccaaagcgtctacgaggacctggttgcgaacggggtgatcgtgcccgcccaggaggtgccccctccaaccgtcccaatggactatagctgggcgcgcgagctaggacttattaggaaacccgcgtcgtttatgaccagcatctgtgacgagagaggccaggaactcatctacgcaggtatgccaataactgaggtgtttaaggaggaaatgggaatcggtggcgtcctgggtttgctgtggtttcaaaaaaggctgccaaaatatagctgccagttcatagaaatgtgcctaatggttaccgcagaccacggtcctgccgtctctggggctcacaatacaatcatctgtgccagggcaggcaaggacctggtttcctctctgacttcaggactcctgacaattggagataggttcggtggggcccttgatgcggcagcaaagatgttttccaaggctttcgactctgggatcatcccaatggaatttgttaacaaaatgaagaaagaaggcaagctcattatgggaataggacaccgggtcaagagtattaataacccggatatgcgggtccagatactaaaagattacgtgagacaacacttccctgccactcccctcctggactatgccctggaagtcgaaaagattaccacgtccaagaaacccaatctgatcctcaatgtggatggacttattggcgtcgcttttgtggacatgctgcgcaattgtggttctttcacaagagaagaggcggatgagtacatcgacatcggggctttaaacgggatctttgtgcttggaaggtcaatgggcttcattggtcattatctggatcagaaaaggctgaagcaagggctgtatagacatccctgggatgatatcagttatgtgctacccgagcacatgtcaatgtag

SEQ ID NO: 115163 - DNA, 2493 bp, Artificial Sequence
  derived and/or modified sequence
atgagcgccaaggccatcagcgagcagaccggcaaggagctgctgtacaagtttatttgcacaacatccgcaattcagaataggtttaagtacgcgcgggtaactcctgatacagattgggctagacttctgcaagaccacccctggctgctttcgcagaatctcgttgtgaaaccagaccagttgatcaaaagacgcggcaagctgggccttgttggcgtgaacctaaccctggacggagtgaaatcgtggctaaaaccccgactaggtcaagaagcaaccggcatcgtgcgcgccattagagattaccaggggccactcaaggagcatgaagttacaattttcgtccgaaggggaggcccgaactaccaagaagggctgagggtgatgggggaagttggtaagacgaccggcatccctattcatgtttttggcaccgagacacatatgaccgccattgtggggatggccctcggacaccggcctatccccaaccagcccccgactgcggcacatactgccaactttctcctgaacgcctctggctcaacatctacgccagcccccagtaggaccgcaagctttagtgaatcgcgtgccgatgaggtggcaccggcaaagaaagccaaacccgccatgcctcagggcaagtcaacaactctcttctcaagacacactaaggccatcgtctggggcatgcagacccgcgccgtccagggcatgctggatttcgactacgtgtgtagtcgagatgagcccagcgtcgctgcgatggtctacccattcacaggtgaccataagcagaaattctattgggggcacaaagaaatcctcatcccagtcttcaagaatatggccgacgccatgcgaaaacacccagaggtggacgtcttaataaatttcgcatcactgcggagcgcctacgattcgactatggagacgatgaattatgcacagataagaacaatagccataatagccgagggcattcccgaagccctgacacgtaagctgatcaaaaaagccgaccagaaaggggtgaccattatagggccggccactgtcggcggcattaaaccaggatgtttcaagataggcaacactggcggcatgctggataatatactcgcatccaaactctacagacccggctcagtggcttacgtttcccgctccggcggcatgtctaacgagctgaacaatattatttcgcgcaccaccgatggggtttacgaaggtgtggccattggcggggaccggtatccaggctctacattcatggatcatgttctaagatatcaggatacacccggagtgaaaatgattgtggtgctgggagaaattggaggcacggaggagtacaaaatttgccggggtattaaagaaggcagacttaccaagccaattgtgtgctggtgcatcggcacatgcgcaaccatgttctcaagtgaggttcagttcggccacgccggtgcctgcgcaaatcaggcctctgaaaccgccgttgctaagaaccaagctcttaaggaagctggggtcttcgtgcccagaagtttcgatgaactgggagagataatccagtctgtgtatgaggacctggtcgccaatggcgtgattgttcctgcccaggaagtccccccgccgaccgtgcctatggattactcttgggccagggagctggggctcatcagaaagcccgcgagctttatgaccagcatctgtgacgagcgagggcaggaactgatctacgctggcatgcctattacagaagtattcaaagaagaaatggggatcgggggcgtgctcggcctactgtggtttcaaaaacgactacctaaatattcttgtcaattcatcgaaatgtgcctcatggtcaccgctgaccatggtcccgctgtgtctggcgctcacaacaccattatttgtgccagagcgggcaaggacttggtgtcatccctgacctctggactgctgacaatcggagaccgctttggtggcgctctggacgctgccgctaagatgttcagcaaagcctttgacagtggaatcatcccaatggagttcgtgaataagatgaaaaaagaaggcaagctgatcatgggcattggccacagggtgaaatcgataaacaatcctgatatgcgcgtacaaatactgaaagactatgtcagacagcattttcctgcaaccccgctcctggactacgcgttagaggttgaaaaaatcactactagcaaaaagcccaacctgatcctcaacgttgacggcttgattggcgttgcttttgttgacatgctgcgcaactgcggatcttttaccagggaagaggcagatgagtatatagacatcggcgccctaaacgggatctttgtactgggtaggtcaatgggctttattggccactacttagaccaaaaaagattaaaacagggcttatatcggcacccctgggacgatatttcttatgtacttcctgagcatatgagcatgtag

SEQ ID NO: 115164 - DNA, 3276 bp, Artificial Sequence
  derived and/or modified sequence
atgtctgccaaagccatctctgagcagacggggaaagagctgctgtacaaattcatctgtaccacctccgccatccagaatcgttttaagtacgcccgtgtgacacctgacacggactgggcacgcctgctgcaggaccacccttggctgttatctcagaatttggtggtgaagccagatcagctcatcaaacgcagaggtaagctgggactggtgggagtcaaccttacgctggacggtgtcaagtcatggctgaagccccgtctcggtcaagaagccacagtgggaaaggccacaggctttctgaaaaactttctgattgaaccgtttgtgcctcactcgcaggcagaggagttctacgtttgtatatacgccacaagagagggggactatgtcttgttccaccacgagggcggtgtcgatgtcggtgacgtggatgcaaaggcccagaaattactcgtcggggtggatgaaaagctcaatccagaagacatcaaaaaacacctcctggtccatgcgcctgaggacaagaaagagatcctggcttcattcatttcaggactatttaacttttacgaggatttgtactttacatacctcgaaatcaatccacttgtagtcaccaaggatggcgtgtacgttctggacctggccgctaaagtggacgccaccgcagattacatctgtaaggtgaaatggggcgatattgagtttccgcctccgtttgggagggaagcctacccagaagaggcatacattgctgacctggacgcgaagtccggtgcttccctgaagctgaccctgctcaaccccaaggggagaatctggaccatggtcgccggtgggggtgcttccgtcgtgtatagcgataccatttgtgacctcggcggtgtcaacgaactcgcgaattacggtgagtacagtggggcaccatctgaacagcagacctacgattatgccaagactattctgagtctcatgacgcgagagaagcatcccgatgggaagattttaataattggaggcagcattgccaattttaccaacgtcgccgcaacgttcaagggtatcgtgcgcgcaatacgagattaccaggggcctttgaaggaacacgaggtcacaatctttgtgaggagggggggacctaactatcaggagggactcagggtgatgggtgaggtgggaaagaccactggcatcccgatacatgtgttcggcacagagactcacatgacagccatcgtgggcatggctctgggccatcgtcctatcccaaaccagccaccaacggccgctcataccgccaatttcctcctcaatgcatctggaagcacgtccactcccgcaccctctaggacagccagcttttcagaatcccgggcagatgaagtagcaccagcaaagaaagctaagcctgcgatgccgcagggcaaaagcacaaccctctttagccgccacaccaaggccatcgtgtggggtatgcaaactcgcgctgtgcaggggatgttggactttgactatgtgtgcagccgtgacgaacctagcgtggctgctatggtgtacccattcaccggggatcacaagcagaagttctattggggacataaggagattctgatacctgttttcaaaaacatggccgacgcaatgcgaaagcatcccgaagtggacgtgctgataaactttgcttcactaagatcagcctacgacagcacaatggagactatgaactatgctcagattagaacaattgctataatagcagaagggatccctgaggcactgactcgtaagttgatcaaaaaggcagaccagaagggagtaaccattatcgggcctgcaaccgtcggagggatcaagccgggatgctttaagataggcaacacaggtggaatgcttgataatatccttgccagcaaattgtacaggccgggatccgtcgcctatgtctccaggagcggcggaatgtccaacgaattgaacaacatcatatcacgcaccaccgatggcgtttacgagggggtggccatcggcggtgacaggtatcccggaagtactttcatggaccacgtgctgcgttaccaggatacaccgggtgtcaagatgatagtagtcctaggcgagatcggagggaccgaggaatacaaaatttgtcgcggaattaaggagggtcggttaacaaaacctatcgtctgctggtgtatcgggacctgcgccaccatgttttctagtgaagtccagttcggccacgccggtgcttgcgctaatcaggccagtgaaaccgcagtcgcaaagaaccaagccctcaaagaagctggcgtgtttgtgcccagatccttcgatgagctcggagaaattatccagtcagtttatgaggacctagtcgctaatggtgtcattgtgcctgcccaagaggtaccgcctccaacagtgcctatggattactcttgggctcgtgaactcggcttgatccggaaaccagcgtcatttatgacctcaatctgcgacgagcgcggacaggagctcatttacgcagggatgcctatcactgaggtcttcaaggaggaaatgggaatcgggggagttctcggcctcctttggttccaaaagaggttgccaaagtacagctgccagttcatcgaaatgtgcttgatggttaccgcggatcatggacctgccgtttccggtgctcacaatacgatcatctgcgctagagccggaaaagaccttgtgtctagcctgacctcagggctcctcaccatcggtgaccgtttcggcggagctctggacgcagctgccaaaatgttcagcaaggcatttgacagtggtattatacctatggagttcgtgaacaagatgaagaaagagggaaagttgatcatggggatagggcacagagttaagagtatcaataaccctgacatgcgcgtgcagatccttaaagactacgtgcggcaacactttcccgctacccctttactggattatgctctggaagtggagaagatcacgacatctaagaagcctaatctgattttgaacgtggacggattgatcggggtcgcgtttgtcgacatgctcaggaattgtggctcttttacccgcgaggaggcagatgagtatattgatattggggcacttaacggcatcttcgtcctgggtcgatccatgggattcattggtcattacttggatcagaagaggttgaagcaggggctgtatcggcacccatgggacgatatctcatacgttctacctgagcacatgtcgatgtag

SEQ ID NO: 115165 - DNA, 3276 bp, Artificial Sequence
  derived and/or modified sequence
atgtccgctaaagcaatcagcgaacagacaggaaaagagcttctgtataagtttatttgcactacctcggcgattcagaaccgctttaaatatgcccgagtaacccctgacaccgactgggcccgtctactgcaggaccacccctggctgctctctcagaatctcgtggtgaagcccgaccagctgatcaagaggcgaggtaagctgggcctggttggcgtaaatctcaccctggacggagtgaaatcctggctgaagccgagactcggccaggaagcaacggtgggaaaggctactggtttcctgaaaaatttccttatcgaaccgttcgtgcctcatagccaggcggaggagttctatgtgtgcatttatgccaccagggaaggggattacgttcttttccaccacgaaggtggagtggatgtcggcgatgttgacgccaaggcccagaaactcctggtgggcgtcgatgagaagttgaaccccgaggacattaaaaagcatctccttgtgcacgcacctgaagataaaaaggaaattctggcgtcctttatcagcggactgttcaatttttacgaggacctgtactttacttacctagaaattaacccgctggtggtgactaaggacggcgtgtacgtgctggatctcgcggctaaagtagatgccacagccgactatatctgcaaagtaaagtggggggacattgagttcccccctcctttcggacgcgaggcctaccctgaggaggcttacatagccgacctggacgccaagagcggcgcttcgctgaagctgaccctgctgaatcccaaagggagaatttggacaatggttgccggtgggggagcctcagtggtgtactccgatactatatgcgatctggggggagtaaacgagctggccaattatggggaatatagtggagcaccttccgaacagcagacatacgactatgctaagaccatcttgtctttgatgactcgtgagaaacatccagatggcaaaattctcatcattggaggaagcatcgcgaatttcaccaatgtagctgccacttttaaggggattgttcgcgctatccgggattaccagggaccattgaaggagcacgaggtgaccatctttgtgcggagaggcggaccaaattatcaggagggtctgcgggttatgggggaagtaggaaaaactactggcatcccgatacacgtgtttggaaccgaaacgcatatgacggcaattgtgggaatggccttgggacacagacccattccaaaccagccacctactgctgctcatactgcaaattttcttttgaatgcctctggttccaccagcacacccgcacccagcagaacggcaagtttctccgagtcccgcgcagatgaggtggcccctgccaagaaagccaagccagccatgcctcaggggaaatcgaccaccctcttcagtcgccacaccaaggctatcgtgtgggggatgcagacccgagccgtgcaggggatgctggattttgattacgtttgtagtagagacgagcccagtgtggccgcaatggtctatccatttacaggcgatcataagcagaaattttactggggacataaggagatactgatccccgtctttaagaatatggctgacgctatgagaaagcacccagaggttgacgtcctcattaactttgcctccctgcgaagcgcttatgactctactatggagacaatgaactacgcccagatccgtacaatcgctattatcgcagagggtatccccgaagccctgacgagaaagcttataaaaaaagcagaccagaaaggggtgaccattataggacccgctacagttggaggtatcaagcctggctgcttcaagattggcaataccgggggaatgttggacaacatcctggcatcgaagctataccgccctgggtctgttgcgtatgtttcgagatccggcggaatgtccaacgagcttaacaacataatctctcgcaccactgacggtgtgtatgagggagtggccattggaggggaccgttatcccggttcaacatttatggaccacgtcttgcgctatcaggacacccccggtgtgaaaatgattgtcgtgctcggggagatagggggaactgaggaatataagatatgtcggggaatcaaagaagggaggttaaccaagcctattgtgtgctggtgtatcggcacatgcgcgactatgtttagcagtgaggtgcagtttgggcatgcaggcgcatgtgcaaatcaggcgtcggagaccgccgtggcaaaaaaccaggccctcaaggaggcgggtgtgtttgttccgcgttccttcgacgaacttggagagatcatccagtcagtgtacgaggacttggtagccaacggagtgatcgttccagctcaggaggtccctccccctacagtgcccatggactattcttgggccagagaactggggctgatccgcaagccggctagctttatgaccagcatatgcgacgaaaggggtcaggaactgatttatgcaggtatgcctattactgaagtgtttaaagaagaaatgggcatcggcggagttctcggactactgtggttccagaaacgtctgccaaagtactcttgccagttcattgagatgtgcctgatggtgactgcagatcacggaccggctgtgtctggcgcacacaacaccatcatctgtgcacgcgctgggaaagatctcgtgtcgtctctcacctctggcctgttgaccatcggagatagatttggaggggcattagatgccgctgcaaaaatgttttccaaggccttcgactctggcattatccctatggagtttgtaaataagatgaaaaaggagggcaagctcattatgggaatcgggcacagagtgaaaagcatcaataacccggatatgcgcgtccagatcctgaaagactacgtgcgacagcactttcctgctacgccattactggattacgccctcgaagtggagaagatcaccacctcaaagaaaccgaatttgatcctcaacgtcgacgggctcatcggggtggcttttgtggacatgctccgaaattgcggttccttcacaagagaggaggccgatgaatatattgacataggcgctttaaacgggatcttcgtactgggacgttcaatgggcttcatcggccattacctcgatcaaaagcggttgaaacagggcctctacagacatccttgggatgatatctcgtatgtactacctgagcacatgtccatgtag

SEQ ID NO: 115166 - DNA, 2493 bp, Artificial Sequence
  derived and/or modified sequence
atgtctgccaaagcaatctccgagcagacaggcaaggaactcttgtacaagttcatctgtaccaccagcgccattcagaatagatttaagtacgcacgcgtcacacctgatacagactgggcaagacttctccaagaccacccttggttgctgtcccagaatctcgttgttaagccagaccagctaataaaacggaggggcaagctgggcctggtgggcgtgaatctaactttggatggagtgaaatcatggctcaagccccgacttggtcaggaagctacgggtatagtgcgggcaatccgcgattaccaagggcctttgaaagagcatgaagtgacaattttcgtccgacggggtggccctaactatcaggaaggcctgcgcgtcatgggcgaagtcgggaaaacaactggcatacccatccacgtatttgggaccgagactcacatgaccgctatcgtgggcatggccttaggtcataggcctatccctaaccagccaccaactgccgctcacacagccaattttcttctaaacgcgagtggctccacctcgactcccgctccttcccggacggcgagcttcagcgaaagccgagctgatgaagtggcacccgctaagaaggccaagcccgcaatgccccagggaaagagtacaactctcttctctaggcacactaaagcaattgtgtgggggatgcagacacgtgcggtacaggggatgctggacttcgactacgtttgcagccgggacgagccatctgtggctgccatggtctacccctttaccggggatcataagcaaaagttctactggggccacaaggagatcttaattcccgtgttcaagaacatggccgacgcgatgaggaaacaccccgaggtggacgtgctaatcaatttcgcaagcctccgaagcgcttacgactctaccatggagaccatgaactacgcacagattagaaccattgccattattgccgaaggtattcccgaggcactcacacggaagctgataaaaaaagccgatcagaagggggtgactattatcggtcctgctacagtgggcggtatcaaaccgggatgctttaagatcggaaacaccgggggtatgctggacaacatcttagcatctaaattgtacagaccagggtcagtggcatatgtctctcgttctggaggcatgtcaaacgagctgaataatatcatttctaggactaccgacggagtttatgaaggtgtggccatcgggggagataggtatccaggcagtacattcatggatcacgtcctcaggtaccaggacacccccggagtaaagatgattgtggtgttaggcgagattggaggaacggaggagtacaaaatctgcagaggcataaaggaggggagactcactaagccaattgtttgttggtgcataggcacctgtgctactatgtttagctcagaggttcagtttgggcatgcaggtgcctgtgcgaaccaggccagtgaaactgccgtagcaaagaaccaagccctcaaggaggctggcgtgtttgtgccacgctcatttgatgagctgggcgagatcatccaatccgtatacgaggacttagtcgcaaacggggtgattgtgccagcccaggaggtgccaccgcctaccgtgcctatggactactcatgggccagagagctgggtctgatccgaaagccggctagctttatgacttctatctgcgacgagagaggacaggagctgatttacgcaggtatgcctatcactgaggtctttaaggaggagatgggcattggaggtgtgctgggcctgctgtggttccagaagcggttgccgaagtatagctgccagttcatagaaatgtgcctcatggttactgccgaccacgggccagctgtgtcaggcgctcacaataccattatatgcgccagggcaggaaaggacctggtgtcaagtctcacatcaggtctgctgactatcggtgatcggttcggcggagcgctcgacgcagcagctaaaatgtttagcaaggcattcgactcgggcattatccccatggaattcgtaaacaagatgaaaaaggagggaaaactaatcatgggaatagggcaccgcgttaaatctatcaataaccccgacatgcgtgtgcaaattttaaaagactatgtgcggcaacacttccctgcaacacctctcttggactacgctctcgaggtagagaaaatcacaacctcaaagaaacctaacctaatactgaatgtagacgggctgattggcgtggctttcgttgatatgctgagaaattgtgggtcttttaccagggaggaggcagacgagtacatcgatattggcgctctgaatgggatctttgtcctagggaggagcatggggtttatagggcattatttggaccaaaagcgcttaaaacaaggactctaccgccacccttgggatgacatctcctacgttcttccggagcacatgtccatgtag

SEQ ID NO: 115167 - DNA, 4318 bp, Artificial Sequence
  derived and/or modified sequence
agccgatgggggcggggaaaagtccggctgggccgggacaaaagccggatcccgggaagctaccggctgctggggtgctccggattttgcggggttcgtcgggcctgtggaagaagcgccgcgcacggacttcggcagaggtagagcaggtctctctgcagccatgtcggccaaggcaatttcagagcagacgggcaaagaactcctttacaagttcatctgtaccacctcagccatccagaatcggttcaagtatgctcgggtcactcctgacacagactgggcccgcttgctgcaggaccacccctggctgctcagccagaacttggtagtcaagccagaccagctgatcaaacgtcgtggaaaacttggtctcgttggggtcaacctcactctggatggggtcaagtcctggctgaagccacggctgggacaggaagccacagttggcaaggccacaggcttcctcaagaactttctgatcgagcccttcgtcccccacagtcaggctgaggagttctatgtctgcatctatgccacccgagaaggggactacgtcctgttccaccacgaggggggtgtggacgtgggtgatgtggacgccaaggcccagaagctgcttgttggcgtggatgagaaactgaatcctgaggacatcaaaaaacacctgttggtccacgcccctgaagacaagaaagaaattctggccagttttatctccggcctcttcaatttctacgaggacttgtacttcacctacctcgagatcaatccccttgtagtgaccaaagatggagtctatgtccttgacttggcggccaaggtggacgccactgccgactacatctgcaaagtgaagtggggtgacatcgagttccctccccccttcgggcgggaggcatatccagaggaagcctacattgcagacctcgatgccaaaagtggggcaagcctgaagctgaccttgctgaaccccaaagggaggatctggaccatggtggccgggggtggcgcctctgtcgtgtacagcgataccatctgtgatctagggggtgtcaacgagctggcaaactatggggagtactcaggcgcccccagcgagcagcagacctatgactatgccaagactatcctctccctcatgacccgagagaagcacccagatggcaagatcctcatcattggaggcagcatcgcaaacttcaccaacgtggctgccacgttcaagggcatcgtgagagcaattcgagattaccagggccccctgaaggagcacgaagtcacaatctttgtccgaagaggtggccccaactatcaggagggcttacgggtgatgggagaagtcgggaagaccactgggatccccatccatgtctttggcacagagactcacatgacggccattgtgggcatggccctgggccaccggcccatccccaaccagccacccacagcggcccacactgcaaacttcctcctcaacgccagcgggagcacatcgacgccagcccccagcaggacagcatctttttctgagtccagggccgatgaggtggcgcctgcaaagaaggccaagcctgccatgccacaaggaaagagcaccaccctcttcagccgccacaccaaggccattgtgtggggcatgcagacccgggccgtgcaaggcatgctggactttgactatgtctgctcccgagacgagccctcagtggctgccatggtctaccctttcactggggaccacaagcagaagttttactgggggcacaaagagatcctgatccctgtcttcaagaacatggctgatgccatgaggaagcatccggaggtagatgtgctcatcaactttgcctctctccgctctgcctatgacagcaccatggagaccatgaactatgcccagatccggaccatcgccatcatagctgaaggcatccctgaggccctcacgagaaagctgatcaagaaggcggaccagaagggagtgaccatcatcggacctgccactgttggaggcatcaagcctgggtgctttaagattggcaacacaggtgggatgctggacaacatcctggcctccaaactgtaccgcccaggcagcgtggcctatgtctcacgttccggaggcatgtccaacgagctcaacaatatcatctctcggaccacggatggcgtctatgagggcgtggccattggtggggacaggtacccgggctccacattcatggatcatgtgttacgctatcaggacactccaggagtcaaaatgattgtggttcttggagagattgggggcactgaggaatataagatttgccggggcatcaaggagggccgcctcactaagcccatcgtctgctggtgcatcgggacgtgtgccaccatgttctcctctgaggtccagtttggccatgctggagcttgtgccaaccaggcttctgaaactgcagtagccaagaaccaggctttgaaggaagcaggagtgtttgtgccccggagctttgatgagcttggagagatcatccagtctgtatacgaagatctcgtggccaatggagtcattgtacctgcccaggaggtgccgcccccaaccgtgcccatggactactcctgggccagggagcttggtttgatccgcaaacctgcctcgttcatgaccagcatctgcgatgagcgaggacaggagctcatctacgcgggcatgcccatcactgaggtcttcaaggaagagatgggcattggcggggtcctcggcctcctctggttccagaaaaggttgcctaagtactcttgccagttcattgagatgtgtctgatggtgacagctgatcacgggccagccgtctctggagcccacaacaccatcatttgtgcgcgagctgggaaagacctggtctccagcctcacctcggggctgctcaccatcggggatcggtttgggggtgccttggatgcagcagccaagatgttcagtaaagcctttgacagtggcattatccccatggagtttgtgaacaagatgaagaaggaagggaagctgatcatgggcattggtcaccgagtgaagtcgataaacaacccagacatgcgagtgcagatcctcaaagattacgtcaggcagcacttccctgccactcctctgctcgattatgcactggaagtagagaagattaccacctcgaagaagccaaatcttatcctgaatgtagatggtctcatcggagtcgcatttgtagacatgcttagaaactgtgggtcctttactcgggaggaagctgatgaatatattgacattggagccctcaatggcatctttgtgctgggaaggagtatggggttcattggacactatcttgatcagaagaggctgaagcaggggctgtatcgtcatccgtgggatgatatttcatatgttcttccggaacacatgagcatgtaacagagccaggaaccctactgcagtaaactgaagacaagatctcttcccccaagaaaaagtgtacagacagctggcagtggagcctgctttatttagcaggggcctggaatgtaaacagccactggggtacaggcaccgaagaccaacatccacaggctaacaccccttcagtccacacaaagaagcttcatattttttttataagcatagaaataaaaaccaagccaatatttgtgactttgctctgctacctgctgtatttattatatggaagcatctaagtactgtcaggatggggtcttcctcattgtagggcgttaggatgttgctttctttttccattagttaaacatttttttctcctttggaggaagggaatgaaacatttatggcctcaagatactatacatttaaagcaccccaatgtctctctttttttttttttacttccctttcttcttccttatataacatgaagaacattgtattaatctgatttttaaagatctttttgtatgttacgtgttaagggcttgtttggtatcccactgaaatgttctgtgttgcagaccagagtctgtttatgtcagggggatggggccattgcatccttagccattgtcacaaaatatgtggagtagtaacttaatatgtaaagttgtaacatacatacatttaaaatggaaatgcagaaagctgtgaaatgtcttgtgtcttatgttctctgtatttatgcagctgatttgtctgtctgtaactgaagtgtgggtccaaggactcctaactactttgcatctgtaatccacaaagattctgggcagctgccacctcagtctcttctctgtattatcatagtctggtttaaataaactatatagt

SEQ ID NO: 115168 - DNA, 3535 bp, Artificial Sequence
  derived and/or modified sequence
gtagagcaggtctctctgcagccatgtcggccaaggcaatttcagagcagacgggcaaagaactcctttacaagttcatctgtaccacctcagccatccagaatcggttcaagtatgctcgggtcactcctgacacagactgggcccgcttgctgcaggaccacccctggctgctcagccagaacttggtagtcaagccagaccagctgatcaaacgtcgtggaaaacttggtctcgttggggtcaacctcactctggatggggtcaagtcctggctgaagccacggctgggacaggaagccacagttggcaaggccacaggcttcctcaagaactttctgatcgagcccttcgtcccccacagtcaggctgaggagttctatgtctgcatctatgccacccgagaaggggactacgtcctgttccaccacgaggggggtgtggacgtgggtgatgtggacgccaaggcccagaagctgcttgttggcgtggatgagaaactgaatcctgaggacatcaaaaaacacctgttggtccacgcccctgaagacaagaaagaaattctggccagttttatctccggcctcttcaatttctacgaggacttgtacttcacctacctcgagatcaatccccttgtagtgaccaaagatggagtctatgtccttgacttggcggccaaggtggacgccactgccgactacatctgcaaagtgaagtggggtgacatcgagttccctccccccttcgggcgggaggcatatccagaggaagcctacattgcagacctcgatgccaaaagtggggcaagcctgaagctgaccttgctgaaccccaaagggaggatctggaccatggtggccgggggtggcgcctctgtcgtgtacagcgataccatctgtgatctagggggtgtcaacgagctggcaaactatggggagtactcaggcgcccccagcgagcagcagacctatgactatgccaagactatcctctccctcatgacccgagagaagcacccagatggcaagatcctcatcattggaggcagcatcgcaaacttcaccaacgtggctgccacgttcaagggcatcgtgagagcaattcgagattaccagggccccctgaaggagcacgaagtcacaatctttgtccgaagaggtggccccaactatcaggagggcttacgggtgatgggagaagtcgggaagaccactgggatccccatccatgtctttggcacagagactcacatgacggccattgtgggcatggccctgggccaccggcccatccccaaccagccacccacagcggcccacactgcaaacttcctcctcaacgccagcgggagcacatcgacgccagcccccagcaggacagcatctttttctgagtccagggccgatgaggtggcgcctgcaaagaaggccaagcctgccatgccacaaggaaagagcaccaccctcttcagccgccacaccaaggccattgtgtggggcatgcagacccgggccgtgcaaggcatgctggactttgactatgtctgctcccgagacgagccctcagtggctgccatggtctaccctttcactggggaccacaagcagaagttttactgggggcacaaagagatcctgatccctgtcttcaagaacatggctgatgccatgaggaagcatccggaggtagatgtgctcatcaactttgcctctctccgctctgcctatgacagcaccatggagaccatgaactatgcccagatccggaccatcgccatcatagctgaaggcatccctgaggccctcacgagaaagctgatcaagaaggcggaccagaagggagtgaccatcatcggacctgccactgttggaggcatcaagcctgggtgctttaagattggcaacacaggtgggatgctggacaacatcctggcctccaaactgtaccgcccaggcagcgtggcctatgtctcacgttccggaggcatgtccaacgagctcaacaatatcatctctcggaccacggatggcgtctatgagggcgtggccattggtggggacaggtacccgggctccacattcatggatcatgtgttacgctatcaggacactccaggagtcaaaatgattgtggttcttggagagattgggggcactgaggaatataagatttgccggggcatcaaggagggccgcctcactaagcccatcgtctgctggtgcatcgggacgtgtgccaccatgttctcctctgaggtccagtttggccatgctggagcttgtgccaaccaggcttctgaaactgcagtagccaagaaccaggctttgaaggaagcaggagtgtttgtgccccggagctttgatgagcttggagagatcatccagtctgtatacgaagatctcgtggccaatggagtcattgtacctgcccaggaggtgccgcccccaaccgtgcccatggactactcctgggccagggagcttggtttgatccgcaaacctgcctcgttcatgaccagcatctgcgatgagcgaggacaggagctcatctacgcgggcatgcccatcactgaggtcttcaaggaagagatgggcattggcggggtcctcggcctcctctggttccagaaaaggttgcctaagtactcttgccagttcattgagatgtgtctgatggtgacagctgatcacgggccagccgtctctggagcccacaacaccatcatttgtgcgcgagctgggaaagacctggtctccagcctcacctcggggctgctcaccatcggggatcggtttgggggtgccttggatgcagcagccaagatgttcagtaaagcctttgacagtggcattatccccatggagtttgtgaacaagatgaagaaggaagggaagctgatcatgggcattggtcaccgagtgaagtcgataaacaacccagacatgcgagtgcagatcctcaaagattacgtcaggcagcacttccctgccactcctctgctcgattatgcactggaagtagagaagattaccacctcgaagaagccaaatcttatcctgaatgtagatggtctcatcggagtcgcatttgtagacatgcttagaaactgtgggtcctttactcgggaggaagctgatgaatatattgacattggagccctcaatggcatctttgtgctgggaaggagtatggggttcattggacactatcttgatcagaagaggctgaagcaggggctgtatcgtcatccgtgggatgatatttcatatgttcttccggaacacatgagcatgtaacagagccaggaaccctactgcagtaaactgaagacaagatctcttcccccaagaaaaagtgtacagacagctggcagtggagcctgctttatttagcaggggcctggaatgtaaacagccactggggtacaggcaccgaagaccaacatccacaggctaacaccccttcagtccacacaaagaagcttcatattttttttataagcatagaaataaaaaccaagccaatatttgtg

SEQ ID NO: 115169 - DNA, 2974 bp, Artificial Sequence
  derived and/or modified sequence
gacaaaagccggatcccgggaagctaccggctgctggggtgctccggattttgcggggttcgtcgggcctgtggaagaagcgccgcgcacggacttcggcagaggtagagcaggtctctctgcagccatgtcggccaaggcaatttcagagcagacgggcaaagaactcctttacaagttcatctgtaccacctcagccatccagaatcggttcaagtatgctcgggtcactcctgacacagactgggcccgcttgctgcaggaccacccctggctgctcagccagaacttggtagtcaagccagaccagctgatcaaacgtcgtggaaaacttggtctcgttggggtcaacctcactctggatggggtcaagtcctggctgaagccacggctgggacaggaagccacaggcatcgtgagagcaattcgagattaccagggccccctgaaggagcacgaagtcacaatctttgtccgaagaggtggccccaactatcaggagggcttacgggtgatgggagaagtcgggaagaccactgggatccccatccatgtctttggcacagagactcacatgacggccattgtgggcatggccctgggccaccggcccatccccaaccagccacccacagcggcccacactgcaaacttcctcctcaacgccagcgggagcacatcgacgccagcccccagcaggacagcatctttttctgagtccagggccgatgaggtggcgcctgcaaagaaggccaagcctgccatgccacaaggaaagagcaccaccctcttcagccgccacaccaaggccattgtgtggggcatgcagacccgggccgtgcaaggcatgctggactttgactatgtctgctcccgagacgagccctcagtggctgccatggtctaccctttcactggggaccacaagcagaagttttactgggggcacaaagagatcctgatccctgtcttcaagaacatggctgatgccatgaggaagcatccggaggtagatgtgctcatcaactttgcctctctccgctctgcctatgacagcaccatggagaccatgaactatgcccagatccggaccatcgccatcatagctgaaggcatccctgaggccctcacgagaaagctgatcaagaaggcggaccagaagggagtgaccatcatcggacctgccactgttggaggcatcaagcctgggtgctttaagattggcaacacaggtgggatgctggacaacatcctggcctccaaactgtaccgcccaggcagcgtggcctatgtctcacgttccggaggcatgtccaacgagctcaacaatatcatctctcggaccacggatggcgtctatgagggcgtggccattggtggggacaggtacccgggctccacattcatggatcatgtgttacgctatcaggacactccaggagtcaaaatgattgtggttcttggagagattgggggcactgaggaatataagatttgccggggcatcaaggagggccgcctcactaagcccatcgtctgctggtgcatcgggacgtgtgccaccatgttctcctctgaggtccagtttggccatgctggagcttgtgccaaccaggcttctgaaactgcagtagccaagaaccaggctttgaaggaagcaggagtgtttgtgccccggagctttgatgagcttggagagatcatccagtctgtatacgaagatctcgtggccaatggagtcattgtacctgcccaggaggtgccgcccccaaccgtgcccatggactactcctgggccagggagcttggtttgatccgcaaacctgcctcgttcatgaccagcatctgcgatgagcgaggacaggagctcatctacgcgggcatgcccatcactgaggtcttcaaggaagagatgggcattggcggggtcctcggcctcctctggttccagaaaaggttgcctaagtactcttgccagttcattgagatgtgtctgatggtgacagctgatcacgggccagccgtctctggagcccacaacaccatcatttgtgcgcgagctgggaaagacctggtctccagcctcacctcggggctgctcaccatcggggatcggtttgggggtgccttggatgcagcagccaagatgttcagtaaagcctttgacagtggcattatccccatggagtttgtgaacaagatgaagaaggaagggaagctgatcatgggcattggtcaccgagtgaagtcgataaacaacccagacatgcgagtgcagatcctcaaagattacgtcaggcagcacttccctgccactcctctgctcgattatgcactggaagtagagaagattaccacctcgaagaagccaaatcttatcctgaatgtagatggtctcatcggagtcgcatttgtagacatgcttagaaactgtgggtcctttactcgggaggaagctgatgaatatattgacattggagccctcaatggcatctttgtgctgggaaggagtatggggttcattggacactatcttgatcagaagaggctgaagcaggggctgtatcgtcatccgtgggatgatatttcatatgttcttccggaacacatgagcatgtaacagagccaggaaccctactgcagtaaactgaagacaagatctcttcccccaagaaaaagtgtacagacagctggcagtggagcctgctttatttagcaggggcctggaatgtaaacagccactggggtacaggcaccgaagaccaacatccacaggctaacaccccttcagtccacacaaagaagcttcatattttttttataagcatagaaataaaaaccaagccaatatttgtgactttgctctgctacctgctgtatttattatatggaagcatctaagtactgtcaggatggggtcttcctcattgtagggcgttaggatgttgctttctttttccattagttaaacatt

SEQ ID NO: 115170 - DNA, 3276 bp, Artificial Sequence
  derived and/or modified sequence
atgagcgccaaggccatcagcgagcagaccggcaaggagctgctgtacaagttcatctgcaccaccagcgccatccagaacagattcaagtacgccagagtgacccccgacaccgactgggccagactgctgcaggaccacccctggctgctgagccagaacctggtggtgaagcccgaccagctgatcaagagaagaggcaagctgggcctggtgggcgtgaacctgaccctggacggcgtgaagagctggctgaagcccagactgggccaggaggccaccgtgggcaaggccaccggcttcctgaagaacttcctgatcgagcccttcgtgccccacagccaggccgaggagttctacgtgtgcatctacgccaccagagagggcgactacgtgctgttccaccacgagggcggcgtggacgtgggcgacgtggacgccaaggcccagaagctgctggtgggcgtggacgagaagctgaaccccgaggacatcaagaagcacctgctggtgcacgcccccgaggacaagaaggagatcctggccagcttcatcagcggcctgttcaacttctacgaggacctgtacttcacctacctggagatcaaccccctggtggtgaccaaggacggcgtgtacgtgctggacctggccgccaaggtggacgccaccgccgactacatctgcaaggtgaagtggggcgacatcgagttccccccccccttcggcagagaggcctaccccgaggaggcctacatcgccgacctggacgccaagagcggcgccagcctgaagctgaccctgctgaaccccaagggcagaatctggaccatggtggccggcggcggcgccagcgtggtgtacagcgacaccatctgcgacctgggcggcgtgaacgagctggccaactacggcgagtacagcggcgcccccagcgagcagcagacctacgactacgccaagaccatcctgagcctgatgaccagagagaagcaccccgacggcaagatcctgatcatcggcggcagcatcgccaacttcaccaacgtggccgccaccttcaagggcatcgtgagagccatcagagactaccagggccccctgaaggagcacgaggtgaccatcttcgtgagaagaggcggccccaactaccaggagggcctgagagtgatgggcgaggtgggcaagaccaccggcatccccatccacgtgttcggcaccgagacccacatgaccgccatcgtgggcatggccctgggccacagacccatccccaaccagccccccaccgccgcccacaccgccaacttcctgctgaacgccagcggcagcaccagcacccccgcccccagcagaaccgccagcttcagcgagagcagagccgacgaggtggcccccgccaagaaggccaagcccgccatgccccagggcaagagcaccaccctgttcagcagacacaccaaggccatcgtgtggggcatgcagaccagagccgtgcagggcatgctggacttcgactacgtgtgcagcagagacgagcccagcgtggccgccatggtgtaccccttcaccggcgaccacaagcagaagttctactggggccacaaggagatcctgatccccgtgttcaagaacatggccgacgccatgagaaagcaccccgaggtggacgtgctgatcaacttcgccagcctgagaagcgcctacgacagcaccatggagaccatgaactacgcccagatcagaaccatcgccatcatcgccgagggcatccccgaggccctgaccagaaagctgatcaagaaggccgaccagaagggcgtgaccatcatcggccccgccaccgtgggcggcatcaagcccggctgcttcaagatcggcaacaccggcggcatgctggacaacatcctggccagcaagctgtacagacccggcagcgtggcctacgtgagcagaagcggcggcatgagcaacgagctgaacaacatcatcagcagaaccaccgacggcgtgtacgagggcgtggccatcggcggcgacagataccccggcagcaccttcatggaccacgtgctgagataccaggacacccccggcgtgaagatgatcgtggtgctgggcgagatcggcggcaccgaggagtacaagatctgcagaggcatcaaggagggcagactgaccaagcccatcgtgtgctggtgcatcggcacctgcgccaccatgttcagcagcgaggtgcagttcggccacgccggcgcctgcgccaaccaggccagcgagaccgccgtggccaagaaccaggccctgaaggaggccggcgtgttcgtgcccagaagcttcgacgagctgggcgagatcatccagagcgtgtacgaggacctggtggccaacggcgtgatcgtgcccgcccaggaggtgcccccccccaccgtgcccatggactacagctgggccagagagctgggcctgatcagaaagcccgccagcttcatgaccagcatctgcgacgagagaggccaggagctgatctacgccggcatgcccatcaccgaggtgttcaaggaggagatgggcatcggcggcgtgctgggcctgctgtggttccagaagagactgcccaagtacagctgccagttcatcgagatgtgcctgatggtgaccgccgaccacggccccgccgtgagcggcgcccacaacaccatcatctgcgccagagccggcaaggacctggtgagcagcctgaccagcggcctgctgaccatcggcgacagattcggcggcgccctggacgccgccgccaagatgttcagcaaggccttcgacagcggcatcatccccatggagttcgtgaacaagatgaagaaggagggcaagctgatcatgggcatcggccacagagtgaagagcatcaacaaccccgacatgagagtgcagatcctgaaggactacgtgagacagcacttccccgccacccccctgctggactacgccctggaggtggagaagatcaccaccagcaagaagcccaacctgatcctgaacgtggacggcctgatcggcgtggccttcgtggacatgctgagaaactgcggcagcttcaccagagaggaggccgacgagtacatcgacatcggcgccctgaacggcatcttcgtgctgggcagaagcatgggcttcatcggccactacctggaccagaagagactgaagcagggcctgtacagacacccctgggacgacatcagctacgtgctgcccgagcacatgagcatgtag

SEQ ID NO: 115171 - DNA, 2493 bp, Artificial Sequence
  derived and/or modified sequence
atgagcgccaaggccatcagcgagcagaccggcaaggagctgctgtacaagttcatctgcaccaccagcgccatccagaacagattcaagtacgccagagtgacccccgacaccgactgggccagactgctgcaggaccacccctggctgctgagccagaacctggtggtgaagcccgaccagctgatcaagagaagaggcaagctgggcctggtgggcgtgaacctgaccctggacggcgtgaagagctggctgaagcccagactgggccaggaggccaccggcatcgtgagagccatcagagactaccagggccccctgaaggagcacgaggtgaccatcttcgtgagaagaggcggccccaactaccaggagggcctgagagtgatgggcgaggtgggcaagaccaccggcatccccatccacgtgttcggcaccgagacccacatgaccgccatcgtgggcatggccctgggccacagacccatccccaaccagccccccaccgccgcccacaccgccaacttcctgctgaacgccagcggcagcaccagcacccccgcccccagcagaaccgccagcttcagcgagagcagagccgacgaggtggcccccgccaagaaggccaagcccgccatgccccagggcaagagcaccaccctgttcagcagacacaccaaggccatcgtgtggggcatgcagaccagagccgtgcagggcatgctggacttcgactacgtgtgcagcagagacgagcccagcgtggccgccatggtgtaccccttcaccggcgaccacaagcagaagttctactggggccacaaggagatcctgatccccgtgttcaagaacatggccgacgccatgagaaagcaccccgaggtggacgtgctgatcaacttcgccagcctgagaagcgcctacgacagcaccatggagaccatgaactacgcccagatcagaaccatcgccatcatcgccgagggcatccccgaggccctgaccagaaagctgatcaagaaggccgaccagaagggcgtgaccatcatcggccccgccaccgtgggcggcatcaagcccggctgcttcaagatcggcaacaccggcggcatgctggacaacatcctggccagcaagctgtacagacccggcagcgtggcctacgtgagcagaagcggcggcatgagcaacgagctgaacaacatcatcagcagaaccaccgacggcgtgtacgagggcgtggccatcggcggcgacagataccccggcagcaccttcatggaccacgtgctgagataccaggacacccccggcgtgaagatgatcgtggtgctgggcgagatcggcggcaccgaggagtacaagatctgcagaggcatcaaggagggcagactgaccaagcccatcgtgtgctggtgcatcggcacctgcgccaccatgttcagcagcgaggtgcagttcggccacgccggcgcctgcgccaaccaggccagcgagaccgccgtggccaagaaccaggccctgaaggaggccggcgtgttcgtgcccagaagcttcgacgagctgggcgagatcatccagagcgtgtacgaggacctggtggccaacggcgtgatcgtgcccgcccaggaggtgcccccccccaccgtgcccatggactacagctgggccagagagctgggcctgatcagaaagcccgccagcttcatgaccagcatctgcgacgagagaggccaggagctgatctacgccggcatgcccatcaccgaggtgttcaaggaggagatgggcatcggcggcgtgctgggcctgctgtggttccagaagagactgcccaagtacagctgccagttcatcgagatgtgcctgatggtgaccgccgaccacggccccgccgtgagcggcgcccacaacaccatcatctgcgccagagccggcaaggacctggtgagcagcctgaccagcggcctgctgaccatcggcgacagattcggcggcgccctggacgccgccgccaagatgttcagcaaggccttcgacagcggcatcatccccatggagttcgtgaacaagatgaagaaggagggcaagctgatcatgggcatcggccacagagtgaagagcatcaacaaccccgacatgagagtgcagatcctgaaggactacgtgagacagcacttccccgccacccccctgctggactacgccctggaggtggagaagatcaccaccagcaagaagcccaacctgatcctgaacgtggacggcctgatcggcgtggccttcgtggacatgctgagaaactgcggcagcttcaccagagaggaggccgacgagtacatcgacatcggcgccctgaacggcatcttcgtgctgggcagaagcatgggcttcatcggccactacctggaccagaagagactgaagcagggcctgtacagacacccctgggacgacatcagctacgtgctgcccgagcacatgagcatgtag

SEQ ID NO: 115172 - protein, 610 aa, Artificial Sequence
  derived and/or modified sequence
MVPSCPFIYIIRKDVDVYSQILRKLFNESHGIFLGLQRIDEELTGKSRKSQLVRVSKNYRSVIRACMEEMHQVAIAAKDPANGRQFSSQVSILSAMELIWNLCEILFIEVAPAGPLLLHLLDWVRLHVCEVDSLSADVLGSENPSKHDSFWNLVTILVLQGRLDEARQMLSKEADASPASAGICRIMGDLMRTMPILSPGNTQTLTELELKWQHWHEECERYLQDSTFATSPHLESLLKIMLGDEAALLEQKELLSNWYHFLVTRLLYSNPTVKPIDLHYYAQSSLDLFLGGESSPEPLDNILLAAFEFDIHQVIKECSIALSNWWFVAHLTDLLDHCKLLQSHNLYFGSNMREFLLLEYASGLFAHPSLWQLGVDYFDYCPELGRVSLELHIERIPLNTEQKALKVLRICEQRQMTEQVRSICKILAMKAVRNNRLGSALSWSIRAKDAAFATLVSDRFLRDYCERGCFSDLDLIDNLGPAMMLSDRLTFLGKYREFHRMYGEKRFADAASLLLSLMTSRIAPRSFWMTLLTDALPLLEQKQVIFSAEQTYELMRCLEDLTSRRPVHGESDTEQLQDDDIETTKVEMLRLSLARNLARAIIREGSLEGS

SEQ ID NO: 115173 - DNA, 1833 bp, Artificial Sequence
  derived and/or modified sequence
atggtgccctcatgtccatttatatacatcatccggaaagacgtggatgtttatagtcagatattgcgcaaactgttcaacgaaagtcacgggatctttctcgggctgcagcgtattgacgaggaactgactgggaaaagccggaagtcacagctggtgcgggtgagcaagaactataggtcagtgatccgggcttgtatggaggagatgcaccaagtcgccatagccgccaaggatccagctaacggcaggcagttctcctcccaagtctccatcctttccgcaatggaactaatttggaacctgtgcgaaattctgtttattgaagtcgcccctgcaggaccactgctcttgcatctactggattgggtacgtctgcacgtctgcgaggtggacagcttaagcgccgatgtactggggtctgagaacccttcaaaacacgattctttttggaacctcgtgacaattctggtgttgcaaggacgactggacgaggctaggcagatgttgtcgaaggaagctgatgcctcacccgcctcagccggaatatgcaggatcatgggcgatctgatgcgtaccatgccaattttaagccctggcaatacacagactttgaccgaactggaattaaaatggcagcactggcatgaagaatgcgagagatacctgcaggattctacatttgctacctccccccatctcgaatccctgctaaaaattatgctgggggacgaagctgcattgcttgagcagaaagagctcttatcgaattggtaccatttcctggtcactaggttgttatacagtaacccaactgtgaaacccattgatctgcattattacgcccagtctagccttgacttgttcctgggtggcgaaagttcccctgagcctctggacaatattctgttagccgcattcgaatttgacattcaccaggtgataaaggagtgctccatcgcattaagcaattggtggtttgtcgcccatctaaccgaccttctggaccactgtaaattgctgcaatctcataacctgtattttgggagcaatatgcgggagtttctcttactcgagtacgctagcggcctgttcgcgcatccaagcttgtggcagcttggagtggactactttgactattgccccgaattaggcagagtctctttggagctgcatatcgaacgcatcccactgaacacagagcaaaaagccctgaaggtgctcaggatttgcgagcaaaggcagatgactgagcaagtgcgctctatctgtaagatccttgctatgaaggcagtgaggaacaacaggttgggatcagcgcttagctggtccattcgagccaaagatgcagcgttcgccaccctggtctccgaccggtttttaagggactattgtgagcggggttgcttttcagaccttgacctgatcgacaatttaggcccggctatgatgttgtccgacagacttacttttcttggcaaatacagagaattccaccgtatgtacggggagaagcggtttgctgatgccgcctctctcctcctgagcctgatgactagcagaattgcgccaagatctttttggatgaccctcctaacggatgcgttgcccctgctcgaacagaagcaggttatcttctccgccgaacagacttatgagctcatgcgctgtttggaggacctaacttcacgaagaccagtccatggtgaatctgacaccgagcagctgcaggacgacgatattgagaccacaaaggtggagatgttgcgtctttctttggccagaaacctagcaagagccattatccgcgagggatctttggaaggctcatag

SEQ ID NO: 115174 - DNA, 1833 bp, Artificial Sequence
  derived and/or modified sequence
atggtgcccagctgccccttcatctacatcatcaggaaggatgtggatgtgtacagccagatcctgaggaagctgttcaatgaaagccacggcatcttcctgggcctgcagagaattgatgaggagctgaccgggaagagcaggaagagccagctggtgcgggtgtccaagaactacagaagtgtcatccgggcctgcatggaggagatgcaccaggtggccatcgccgccaaggaccctgccaacggccggcagttcagcagccaggtgtccatcctgagcgccatggagctgatctggaacctgtgtgagatcctcttcatcgaggtggccccagctggccccctgctgctgcacctgctggactgggtgcggctgcacgtgtgtgaggtggacagcctgtctgcagatgtgctgggcagcgagaaccccagcaagcatgacagcttctggaacctggtgaccatcctggtgctgcagggccgcctggatgaggcccggcagatgctgagcaaggaggctgatgccagccctgccagcgctggcatctgccgcatcatgggagacctgatgaggaccatgcccatcctgagccctggcaacacccagaccctgacagagctggagctgaagtggcagcactggcatgaggagtgtgagcgctacctgcaggacagcacctttgccaccagcccccacctggagagcctgctgaagatcatgctgggagatgaggccgccctgctggagcagaaggagctgctgagcaactggtaccacttcctggtgacccggctgctgtacagcaaccccaccgtgaagcccatcgacctgcactactatgcccagagcagcctggacctcttcctgggcggggagagcagccctgagcccctggacaacatcctgctggccgcctttgaatttgacatccaccaggtgatcaaggaatgttccatcgccctgagcaactggtggtttgtggcccacctgacagacctgctggaccactgcaagctgctgcagagccacaacctgtacttcggcagcaacatgagggagttcctgctgctggagtatgccagcggcctgtttgcccaccccagcctgtggcagctgggcgtggactactttgactactgcccagagctgggccgggtgtccctggagctgcacatcgagcgcatccccctgaacacagagcagaaggccctgaaggtgctgcgcatctgtgagcagaggcagatgacagagcaggtgcgcagcatctgcaagatcctggccatgaaggctgtgaggaacaaccggctgggcagcgccctgtcctggagcatccgggccaaggatgctgcctttgccaccctggtgtctgaccgcttcctgcgggactactgtgagcggggctgcttcagtgacctggacctgattgacaacctgggccctgccatgatgctgagtgaccggctgaccttcctgggcaagtaccgggagttccacaggatgtacggggagaagagatttgctgatgctgccagcctgctgctgagcctgatgaccagccgcatcgcccccaggagcttctggatgaccctgctgacagatgccctgcccctgctggagcagaagcaggtgatcttctctgctgagcagacctatgagctgatgcgctgcctggaggacctgaccagccggcggcctgtgcacggggagagtgacacagagcagctgcaggatgatgacatcgagaccaccaaggtggagatgctgcggctgagcctggccaggaacctggcccgggccatcatccgggagggcagcctggagggcagctag

SEQ ID NO: 115175 - DNA, 1833 bp, Artificial Sequence
  derived and/or modified sequence
atggtgcccagctgccccttcatctacatcatccggaaggacgtggacgtgtacagccaaattctgcggaaactgtttaacgagtcacatggtatattcctaggcctgcagcggatcgacgaggaactgaccggtaagtccaggaagtcacagttagtgcgggtgtccaaaaactatcggtctgtgatccgggcgtgcatggaagagatgcatcaagtggccatcgccgcgaaggatcctgcgaacgggagacaatttagtagccaagtgtccattctgtccgcaatggagctgatctggaatctttgtgagattctctttatcgaagttgcgcccgctggacctttgctcctccatctcctggattgggttcggttacatgtctgcgaagtggactcactgagtgctgatgtgctggggtctgaaaacccctctaagcacgacagtttctggaatctggtgacaattctggtcctccagggcagactagatgaggcacgacaaatgctgagtaaagaggctgatgctagccctgcaagtgctggcatatgtagaatcatgggcgaccttatgcggactatgccgatcctgagccccggcaacacgcagactctgaccgagctggagctgaagtggcagcactggcatgaggaatgtgagaggtatcttcaggactcaacgttcgccacaagcccgcatttggaatcattgctgaaaatcatgctcggcgacgaggccgccctcctggagcaaaaggaactcctgtccaactggtatcacttcttggtcacccgccttttgtactctaaccccacagtaaaacctatcgatctgcattactacgcccagtcctctctggacttgttccttggaggagaaagttctccagaacccctggacaacatactgctggccgcatttgagttcgacatccaccaggtcataaaggagtgcagcattgctctgtcaaactggtggttcgtcgctcacctgactgatctgctcgaccactgcaagctactgcagtcccacaacctatatttcggcagtaacatgagggagttccttctgcttgagtatgctagcggcctcttcgcacacccttccctatggcagttgggcgtggattactttgattattgtcctgaattagggagagtcagcctggagctgcacattgagcggatacccttgaacactgaacagaaggcgctcaaggtgttgcgcatttgcgaacagcgccagatgacagaacaggttagaagtatctgtaaaatcctggccatgaaagccgtccgaaataacaggttgggttcagctttgtcatggtctatacgcgctaaagacgcagccttcgccacgcttgtgtccgatcgctttttgcgagactattgtgagcgaggttgttttagtgacctggaccttattgataatctaggtcccgctatgatgctcagcgaccggctaacatttctcggcaagtaccgagagtttcatagaatgtatggcgagaagaggttcgccgacgccgcttctcttctgttaagccttatgaccagtagaatcgccccccgctccttttggatgacacttctcacggacgctctaccattgctggagcagaaacaggtaattttttctgcagagcagacatacgagcttatgaggtgtttggaggatctcacttctcgcaggcctgtacatggagagtccgacaccgaacagctccaggacgatgacatcgagacaaccaaggtggaaatgctgagactcagcttggcgagaaaccttgcaagagccataatcagagaggggagtttagagggctcctag

SEQ ID NO: 115176 - DNA, 1833 bp, Artificial Sequence
  derived and/or modified sequence
atggtccctagctgccctttcatctatattatccggaaggacgtggacgtttacagtcaaattctgagaaagctgtttaacgaaagtcacggcattttcctgggactgcagcggatcgacgaagaactcactgggaaaagcaggaagtctcagcttgtcagggtctccaagaactatcggtcggtgatacgcgcttgtatggaagaaatgcaccaggtggcaatcgcagctaaagaccctgctaatggtaggcaattcagcagtcaggtgtcaatcctctcagctatggaacttatttggaatctgtgcgagatcttattcatcgaagttgctcccgctggcccacttctactacacctgttggattgggtgaggcttcatgtttgcgaagtcgactctcttagtgcggacgtacttggctccgagaatccttcgaaacacgattcattctggaaccttgtgacaatcctggtgctgcagggccgtttggatgaggcacggcaaatgttgtcgaaggaggccgatgcttctccagctagcgccggaatttgccgaattatgggagacctcatgcgtaccatgcctatcttatccccgggtaacactcagacactgacagaactcgagctcaagtggcagcattggcatgaagagtgtgaacggtatctacaggatagcactttcgctacatcaccccacttggagagcctgctgaaaatcatgctgggcgatgaggccgctctactggaacagaaagaactgctgtccaactggtaccattttctcgttacacgcttgctgtacagcaacccaacagtcaagcctattgacttgcattactatgcccaaagttccctcgacttgttcctgggcggagagtcctcccccgagcccctagataacattctgctggccgcatttgaattcgatatacaccaggtgatcaaagaatgcagtatcgctctcagtaattggtggttcgtggcgcacttaacagatctgctggatcactgcaagctgcttcagtcccataatctctactttggctctaacatgcgggaattccttcttctggagtatgcctctgggctgttcgctcatccaagcctctggcagctaggagtggattatttcgactattgccctgagctcggtcgggtcagtctggaactccacatcgagcgtattcccctgaatacagaacaaaaagccctcaaagttctcaggatatgtgagcagcggcagatgaccgagcaggtcagatctatctgcaagatcctggccatgaaggctgtcaggaataatagactaggcagtgctctgtcatggagtatccgtgctaaggacgcggctttcgcaactttggtgtccgacaggttcctgcgggactactgtgaaagaggctgtttcagcgacctggatctgatcgacaatctgggacctgcaatgatgctgagcgaccgactgacgttcctgggaaaataccgcgagtttcacaggatgtacggcgagaaaagattcgcggatgcagcctcacttttattgtcactgatgacaagccggattgcccctaggtctttttggatgacactgcttactgatgcactacctcttctcgagcaaaaacaggtaattttttcagctgagcagacctacgagctcatgcggtgcctcgaagaccttaccagcagacgcccagtgcatggcgaaagtgacactgagcagctgcaggacgatgacattgaaactaccaaagtggagatgttgagacttagtctagctaggaacctggcacgggctatcatccgagaagggagccttgagggaagttag

SEQ ID NO: 115177 - DNA, 1833 bp, Artificial Sequence
  derived and/or modified sequence
atggtgcccagctgccccttcatctacatcatcagaaaggacgtggacgtgtacagccagatcctgagaaagctgttcaacgagagccacggcatcttcctgggcctgcagagaatcgacgaggagctgaccggcaagagcagaaagagccagctggtgagagtgagcaagaactacagaagcgtgatcagagcctgcatggaggagatgcaccaggtggccatcgccgccaaggaccccgccaacggcagacagttcagcagccaggtgagcatcctgagcgccatggagctgatctggaacctgtgcgagatcctgttcatcgaggtggcccccgccggccccctgctgctgcacctgctggactgggtgagactgcacgtgtgcgaggtggacagcctgagcgccgacgtgctgggcagcgagaaccccagcaagcacgacagcttctggaacctggtgaccatcctggtgctgcagggcagactggacgaggccagacagatgctgagcaaggaggccgacgccagccccgccagcgccggcatctgcagaatcatgggcgacctgatgagaaccatgcccatcctgagccccggcaacacccagaccctgaccgagctggagctgaagtggcagcactggcacgaggagtgcgagagatacctgcaggacagcaccttcgccaccagcccccacctggagagcctgctgaagatcatgctgggcgacgaggccgccctgctggagcagaaggagctgctgagcaactggtaccacttcctggtgaccagactgctgtacagcaaccccaccgtgaagcccatcgacctgcactactacgcccagagcagcctggacctgttcctgggcggcgagagcagccccgagcccctggacaacatcctgctggccgccttcgagttcgacatccaccaggtgatcaaggagtgcagcatcgccctgagcaactggtggttcgtggcccacctgaccgacctgctggaccactgcaagctgctgcagagccacaacctgtacttcggcagcaacatgagagagttcctgctgctggagtacgccagcggcctgttcgcccaccccagcctgtggcagctgggcgtggactacttcgactactgccccgagctgggcagagtgagcctggagctgcacatcgagagaatccccctgaacaccgagcagaaggccctgaaggtgctgagaatctgcgagcagagacagatgaccgagcaggtgagaagcatctgcaagatcctggccatgaaggccgtgagaaacaacagactgggcagcgccctgagctggagcatcagagccaaggacgccgccttcgccaccctggtgagcgacagattcctgagagactactgcgagagaggctgcttcagcgacctggacctgatcgacaacctgggccccgccatgatgctgagcgacagactgaccttcctgggcaagtacagagagttccacagaatgtacggcgagaagagattcgccgacgccgccagcctgctgctgagcctgatgaccagcagaatcgcccccagaagcttctggatgaccctgctgaccgacgccctgcccctgctggagcagaagcaggtgatcttcagcgccgagcagacctacgagctgatgagatgcctggaggacctgaccagcagaagacccgtgcacggcgagagcgacaccgagcagctgcaggacgacgacatcgagaccaccaaggtggagatgctgagactgagcctggccagaaacctggccagagccatcatcagagagggcagcctggagggcagctag

SEQ ID NO: 115178 - protein, 595 aa, Artificial Sequence
  derived and/or modified sequence
MECQSAQVISASSDTTVKVWNAHKGFCMSTLRTHKDYVKALAYAKDKELVASAGLDRQIFLWDVNTLTALTASNNTVTTSSLSGNKDSIYSLAMNQLGTIIVSGSTEKVLRVWDPRTCAKLMKLKGHTDNVKALLLNRDGTQCLSGSSDGTIRLWSLGQQRCIATYRVHDEGVWALQVNDAFTHVYSGGRDRKIYCTDLRNPDIRVLICEEKAPVLKMELDRSADPPPAIWVATTKSTVNKWTLKGIHNFRASGDYDNDCTNPITPLCTQPDQVIKGGASIIQCHILNDKRHILTKDTNNNVAYWDVLKACKVEDLGKVDFEDEIKKRFKMVYVPNWFSVDLKTGMLTITLDESDCFAAWVSAKDAGFSSPDGSDPKLNLGGLLLQALLEYWPRTHVNPMDEEENEVNHVNGEQENRVQKGNGYFQVPPHTPVIFGEAGGRTLFRLLCRDSGGETESMLLNETVPQWVIDITVDKNMPKFNKIPFYLQPHASSGAKTLKKDRLSASDMLQVRKVMEHVYEKIINLDNESQTTSSSNNEKPGEQEKEEDIAVLAEEKIELLCQDQVLDPNMDLRTVKHFIWKSGGDLTLHYRQKST

SEQ ID NO: 115179 - protein, 121 aa, Artificial Sequence
  derived and/or modified sequence
MPKFNKIPFYLQPHASSGAKTLKKDRLSASDMLQVRKVMEHVYEKIINLDNESQTTSSSNNEKPGEQEKEEDIAVLAEEKIELLCQDQVRVLDPNMDLRTVKHFIWKSGGDLTLHYRQKST

SEQ ID NO: 115180 - protein, 402 aa, Artificial Sequence
  derived and/or modified sequence
MAAHHRQNTAGRRKVQCLSGSSDGTIRLWSLGQQRCIATYRVHDEGVWALQVNDAFTHVYSGGRDRKIYCTDLRNPDIRVLICEEKAPVLKMELDRSADPPPAIWVATTKSTVNKWACKVEDLGKVDFEDEIKKRFKMVYVPNWFSVDLKTGMLTITLDESDCFAAWVSAKDAGFSSPDGSDPKLNLGGLLLQALLEYWPRTHVNPMDEEENEVNHVNGEQENRVQKGNGYFQVPPHTPVIFGEAGGRTLFRLLCRDSGGETESMLLNETVPQWVIDITVDKNMPKFNKIPFYLQPHASSGAKTLKKDRLSASDMLQVRKVMEHVYEKIINLDNESQTTSSSNNEKPGEQEKEEDIAVLAEEKIELLCQDQVLDPNMDLRTVKHFIWKSGGDLTLHYRQKST

SEQ ID NO: 115181 - DNA, 1788 bp, Artificial Sequence
  derived and/or modified sequence
atggagtgccagagcgcccaggtgatcagcgccagcagcgacaccaccgtgaaggtgtggaacgcccacaagggcttctgcatgagcaccctgagaacccacaaggactacgtgaaggccctggcctacgccaaggacaaggagctggtggccagcgccggcctggacagacagatcttcctgtgggacgtgaacaccctgaccgccctgaccgccagcaacaacaccgtgaccaccagcagcctgagcggcaacaaggacagcatctacagcctggccatgaaccagctgggcaccatcatcgtgagcggcagcaccgagaaggtgctgagagtgtgggaccccagaacctgcgccaagctgatgaagctgaagggccacaccgacaacgtgaaggccctgctgctgaacagagacggcacccagtgcctgagcggcagcagcgacggcaccatcagactgtggagcctgggccagcagagatgcatcgccacctacagagtgcacgacgagggcgtgtgggccctgcaggtgaacgacgccttcacccacgtgtacagcggcggcagagacagaaagatctactgcaccgacctgagaaaccccgacatcagagtgctgatctgcgaggagaaggcccccgtgctgaagatggagctggacagaagcgccgaccccccccccgccatctgggtggccaccaccaagagcaccgtgaacaagtggaccctgaagggcatccacaacttcagagccagcggcgactacgacaacgactgcaccaaccccatcacccccctgtgcacccagcccgaccaggtgatcaagggcggcgccagcatcatccagtgccacatcctgaacgacaagagacacatcctgaccaaggacaccaacaacaacgtggcctactgggacgtgctgaaggcctgcaaggtggaggacctgggcaaggtggacttcgaggacgagatcaagaagagattcaagatggtgtacgtgcccaactggttcagcgtggacctgaagaccggcatgctgaccatcaccctggacgagagcgactgcttcgccgcctgggtgagcgccaaggacgccggcttcagcagccccgacggcagcgaccccaagctgaacctgggcggcctgctgctgcaggccctgctggagtactggcccagaacccacgtgaaccccatggacgaggaggagaacgaggtgaaccacgtgaacggcgagcaggagaacagagtgcagaagggcaacggctacttccaggtgcccccccacacccccgtgatcttcggcgaggccggcggcagaaccctgttcagactgctgtgcagagacagcggcggcgagaccgagagcatgctgctgaacgagaccgtgccccagtgggtgatcgacatcaccgtggacaagaacatgcccaagttcaacaagatccccttctacctgcagccccacgccagcagcggcgccaagaccctgaagaaggacagactgagcgccagcgacatgctgcaggtgagaaaggtgatggagcacgtgtacgagaagatcatcaacctggacaacgagagccagaccaccagcagcagcaacaacgagaagcccggcgagcaggagaaggaggaggacatcgccgtgctggccgaggagaagatcgagctgctgtgccaggaccaggtgctggaccccaacatggacctgagaaccgtgaagcacttcatctggaagagcggcggcgacctgaccctgcactacagacagaagagcacctag

SEQ ID NO: 115182 - DNA, 366 bp, Artificial Sequence
  derived and/or modified sequence
atgcccaagttcaacaagatccccttctacctgcagccccacgccagcagcggcgccaagaccctgaagaaggacagactgagcgccagcgacatgctgcaggtgagaaaggtgatggagcacgtgtacgagaagatcatcaacctggacaacgagagccagaccaccagcagcagcaacaacgagaagcccggcgagcaggagaaggaggaggacatcgccgtgctggccgaggagaagatcgagctgctgtgccaggaccaggtgagagtgctggaccccaacatggacctgagaaccgtgaagcacttcatctggaagagcggcggcgacctgaccctgcactacagacagaagagcacctag

SEQ ID NO: 115183 - DNA, 1209 bp, Artificial Sequence
  derived and/or modified sequence
atggccgcccaccacagacagaacaccgccggcagaagaaaggtgcagtgcctgagcggcagcagcgacggcaccatcagactgtggagcctgggccagcagagatgcatcgccacctacagagtgcacgacgagggcgtgtgggccctgcaggtgaacgacgccttcacccacgtgtacagcggcggcagagacagaaagatctactgcaccgacctgagaaaccccgacatcagagtgctgatctgcgaggagaaggcccccgtgctgaagatggagctggacagaagcgccgaccccccccccgccatctgggtggccaccaccaagagcaccgtgaacaagtgggcctgcaaggtggaggacctgggcaaggtggacttcgaggacgagatcaagaagagattcaagatggtgtacgtgcccaactggttcagcgtggacctgaagaccggcatgctgaccatcaccctggacgagagcgactgcttcgccgcctgggtgagcgccaaggacgccggcttcagcagccccgacggcagcgaccccaagctgaacctgggcggcctgctgctgcaggccctgctggagtactggcccagaacccacgtgaaccccatggacgaggaggagaacgaggtgaaccacgtgaacggcgagcaggagaacagagtgcagaagggcaacggctacttccaggtgcccccccacacccccgtgatcttcggcgaggccggcggcagaaccctgttcagactgctgtgcagagacagcggcggcgagaccgagagcatgctgctgaacgagaccgtgccccagtgggtgatcgacatcaccgtggacaagaacatgcccaagttcaacaagatccccttctacctgcagccccacgccagcagcggcgccaagaccctgaagaaggacagactgagcgccagcgacatgctgcaggtgagaaaggtgatggagcacgtgtacgagaagatcatcaacctggacaacgagagccagaccaccagcagcagcaacaacgagaagcccggcgagcaggagaaggaggaggacatcgccgtgctggccgaggagaagatcgagctgctgtgccaggaccaggtgctggaccccaacatggacctgagaaccgtgaagcacttcatctggaagagcggcggcgacctgaccctgcactacagacagaagagcacctag

SEQ ID NO: 115184 - DNA, 1788 bp, Artificial Sequence
  derived and/or modified sequence
atggagtgccagtcagcccaggtcatctctgcctcttcagacacaaccgtgaaggtttggaacgctcacaagggtttttgtatgtctacactgcggacacacaaagactacgtcaaagcactcgcttatgcaaaagacaaggagctggttgcctccgccgggctggataggcagatttttctgtgggacgtgaataccctgaccgctctcaccgcttccaacaacaccgtgacaacatctagtttgtccggaaataaagacagtatctacagccttgccatgaatcagctggggaccattatcgtcagcggttcgactgagaaggttcttagggtatgggatccccgcacctgtgcaaaactgatgaaactgaagggacacacagataacgtgaaagctctgctactgaaccgcgatgggacacagtgcctctccggatcctcagatggcactatccggttgtggagtctgggccagcagagatgcatcgcaacttaccgtgtgcatgatgagggcgtgtgggcccttcaggtcaatgacgcgtttactcacgtgtactctggaggccgggatcgaaagatctactgcaccgaccttagaaatcccgacattagagtcctaatctgcgaggagaaggcccctgttctgaagatggagctggaccgttccgcagacccaccacccgcaatctgggtcgctaccaccaagtcaacggtgaacaaatggaccctgaaagggatacacaattttcgagcttctggtgactatgataatgattgcacaaacccaattacacctctatgcacacagccagatcaggttatcaagggaggcgccagcatcattcagtgccatattctgaacgataagcgacacattctgactaaggacacaaacaataacgttgcttactgggacgttcttaaagcctgtaaggttgaagatctgggtaaggtcgattttgaagacgagatcaagaaacgcttcaaaatggtctatgtacccaattggttcagcgttgacctcaagactggcatgctgaccatcactctagacgagagcgactgttttgccgcttgggtgagcgccaaggacgcaggcttctcaagcccagacggctcagacccgaagctaaacctggggggccttttactgcaggccctccttgagtattggcctcggacacacgtgaaccctatggatgaagaggagaatgaagtgaatcacgttaatggagagcaggagaatcgcgtgcaaaaggggaatgggtactttcaggtccccccacatactcccgtaatctttggtgaggcaggcggacgaaccctttttaggctgttatgcagagatagcggaggcgagacagagagtatgctgctcaatgaaaccgttccacagtgggtcatcgacatcacagtagataagaatatgccaaaatttaataaaataccattctacctccagccacacgcttcttcaggcgctaagaccttgaagaaggatcgcctgtccgccagcgacatgttgcaagttcgcaaggttatggagcacgtgtacgagaagattataaacctcgataatgaatcccagactacttccagctctaacaatgaaaaaccaggagagcaagagaaagaagaggatatcgctgtactcgccgaggagaagatcgagttactttgtcaagaccaagtgttggatcctaatatggacctgcggacagtgaaacattttatttggaaaagtgggggagatctgaccttgcactaccgccagaagtccacatag

SEQ ID NO: 115185 - DNA, 366 bp, Artificial Sequence
  derived and/or modified sequence
atgccaaaattcaataaaattcctttttacctacagcctcacgcttccagcggggcaaagaccctgaaaaaagacagactgagcgctagtgatatgctccaagtcagaaaagttatggagcatgtgtatgagaaaatcattaacttagacaatgagagtcaaaccacaagctcctctaacaacgagaagcccggtgaacaggaaaaagaagaggacatagccgtgctggctgaggaaaaaatcgaactcctgtgccaggatcaggtccgagtgctcgaccctaacatggacctgcggacggtcaaacatttcatctggaaaagcggcggggatcttactctgcactacagacaaaaatctacgtag

SEQ ID NO: 115186 - DNA, 1209 bp, Artificial Sequence
  derived and/or modified sequence
atggccgcacatcacagacaaaacacagcaggacgacggaaggtgcagtgtctcagtggatctagtgacggaactattcgtttgtggtctttgggccagcagagatgcattgctacttaccgagtgcatgacgagggtgtgtgggcactccaagtgaacgatgcattcactcacgtctactctgggggtcgagacagaaagatatattgcaccgacctacggaatcctgatatacgggtgcttatctgcgaggaaaaagcccccgttctaaaaatggagcttgatagaagcgctgacccccctcccgcaatctgggttgctaccactaagtcaacagtaaataaatgggcttgtaaggtcgaagatcttgggaaggtggatttcgaagacgagatcaaaaagcgttttaaaatggtgtacgtccccaactggttttccgttgatctaaagacgggaatgctgaccataacccttgatgagtcagactgctttgccgcctgggtctctgccaaggatgcagggttcagttctcctgacgggtccgacccaaagctgaacttaggtgggctgctccttcaagcactgttggaatactggccccgcacccatgtgaaccccatggatgaggaggagaatgaggtaaaccatgtaaatggagagcaggaaaatcgcgtccagaagggtaacggatacttccaggtacccccccacaccccggtaattttcggcgaagccggagggagaaccttattccgactgctatgtcgggactctggtggtgaaacagagtctatgttgttaaacgagaccgttccccaatgggtgattgacatcaccgtggataaaaacatgcccaagttcaacaagatcccgttctacctgcagccacacgcttcttccggcgccaagactttaaaaaaggacagactttctgcttctgacatgctgcaggtccggaaggttatggaacacgtgtatgaaaagatcattaatctggataacgagtcccagactacttcgagcagcaataatgaaaagcctggcgagcaggaaaaggaggaggacatagctgtgctcgccgaagaaaagatcgagctgttgtgccaagatcaggtgctggatcctaatatggacttgagaactgtcaaacatttcatttggaagagtggcggtgatctgaccctccactaccgtcagaagagtacatag

SEQ ID NO: 115187 - DNA, 1788 bp, Artificial Sequence
  derived and/or modified sequence
atggagtgccagagcgcccaggtgatcagcgccagcagtgacaccaccgtgaaggtgtggaatgcccacaagggcttctgcatgagcaccctgcggacccacaaggactatgtgaaggccctggcctatgccaaggacaaggagctggtggccagcgctggcctggaccggcagatcttcctgtgggatgtgaacaccctgacagccctgacagccagcaacaacacagtgaccaccagcagcctgagcggcaacaaggacagcatctacagcctggccatgaaccagctgggcaccatcatcgtgtctggcagcacagagaaggtgctgcgggtgtgggaccccaggacctgtgccaagctgatgaagctgaagggccacacagacaacgtgaaggccctgctgctgaacagagatggcacccagtgcctgagcggcagcagtgatggcaccatccggctgtggagcctgggccagcagcgctgcatcgccacctacagagtgcatgatgagggcgtgtgggccctgcaggtgaatgatgccttcacccacgtgtacagcggcggccgggacaggaagatctactgcacagacctgaggaacccagacatccgggtgctgatctgtgaggagaaggcccctgtgctgaagatggagctggacagatctgctgaccccccaccagccatctgggtggccaccaccaagagcacagtgaacaagtggaccctgaagggcatccacaacttccgggccagcggggactatgacaatgactgcaccaaccccatcacccccctgtgcacccagcctgaccaggtgatcaagggcggggccagcatcatccagtgccacatcctgaatgacaagaggcacatcctgaccaaggacaccaacaacaacgtggcctactgggatgtgctgaaggcctgcaaggtggaggacctgggcaaggtggactttgaagatgagatcaagaagcgcttcaagatggtgtatgtgcccaactggttctctgtggacctgaagacaggcatgctgaccatcaccctggatgaaagtgactgctttgctgcctgggtgtctgccaaggatgctggcttcagcagcccagatggcagtgaccccaagctgaacctgggcggcctgctgctgcaggccctgctggagtactggcccaggacccacgtgaaccccatggatgaggaggagaatgaggtgaaccacgtgaatggagagcaggagaacagagtgcagaagggaaatggctacttccaggtgcccccccacacccctgtgatctttggagaggccggcggccgcaccctcttccggctgctgtgccgggacagcggcggggagacagagagcatgctgctgaatgaaacagtgccccagtgggtgattgacatcaccgtggacaagaacatgcccaagttcaacaagatccccttctacctgcagccccacgccagcagcggggccaagaccctgaagaaggaccggctgagcgccagtgacatgctgcaggtgaggaaggtgatggagcacgtgtatgagaagatcatcaacctggacaatgaaagccagaccaccagcagcagcaacaatgagaagccaggagagcaggagaaggaggaggacattgctgtgctggccgaggagaagattgagctgctgtgccaggaccaggtgctggaccccaacatggacctgaggacagtgaagcacttcatctggaagagcggcggggacctgaccctgcactaccggcagaagagcacctag

SEQ ID NO: 115188 - DNA, 366 bp, Artificial Sequence
  derived and/or modified sequence
atgcccaagttcaacaagatccccttctacctgcagccccacgccagcagcggggccaagaccctgaagaaggaccggctgagcgccagtgacatgctgcaggtgaggaaggtgatggagcacgtgtatgagaagatcatcaacctggacaatgaaagccagaccaccagcagcagcaacaatgagaagccaggagagcaggagaaggaggaggacattgctgtgctggccgaggagaagattgagctgctgtgccaggaccaggtgcgggtgctggaccccaacatggacctgaggacagtgaagcacttcatctggaagagcggcggggacctgaccctgcactaccggcagaagagcacctag

SEQ ID NO: 115189 - DNA, 1209 bp, Artificial Sequence
  derived and/or modified sequence
atggccgcccaccaccggcagaacacagctggccgcaggaaggtgcagtgcctgagcggcagcagtgatggcaccatccggctgtggagcctgggccagcagcgctgcatcgccacctacagagtgcatgatgagggcgtgtgggccctgcaggtgaatgatgccttcacccacgtgtacagcggcggccgggacaggaagatctactgcacagacctgaggaacccagacatccgggtgctgatctgtgaggagaaggcccctgtgctgaagatggagctggacagatctgctgaccccccaccagccatctgggtggccaccaccaagagcacagtgaacaagtgggcctgcaaggtggaggacctgggcaaggtggactttgaagatgagatcaagaagcgcttcaagatggtgtatgtgcccaactggttctctgtggacctgaagacaggcatgctgaccatcaccctggatgaaagtgactgctttgctgcctgggtgtctgccaaggatgctggcttcagcagcccagatggcagtgaccccaagctgaacctgggcggcctgctgctgcaggccctgctggagtactggcccaggacccacgtgaaccccatggatgaggaggagaatgaggtgaaccacgtgaatggagagcaggagaacagagtgcagaagggaaatggctacttccaggtgcccccccacacccctgtgatctttggagaggccggcggccgcaccctcttccggctgctgtgccgggacagcggcggggagacagagagcatgctgctgaatgagaccgtgccccagtgggtgattgacatcaccgtggacaagaacatgcccaagttcaacaagatccccttctacctgcagccccacgccagcagcggggccaagaccctgaagaaggaccggctgagcgccagtgacatgctgcaggtgaggaaggtgatggagcacgtgtatgagaagatcatcaacctggacaatgaaagccagaccaccagcagcagcaacaatgagaagccaggagagcaggagaaggaggaggacattgctgtgctggccgaggagaagattgagctgctgtgccaggaccaggtgctggaccccaacatggacctgaggacagtgaagcacttcatctggaagtctggaggagacctgaccctgcactaccggcagaagagcacctag

SEQ ID NO: 115190 - DNA, 1788 bp, Artificial Sequence
  derived and/or modified sequence
atggagtgccagagcgcccaggtgatcagcgccagcagcgacaccaccgtcaaagtgtggaatgcgcacaagggcttttgcatgtccaccctcaggactcataaagattacgtgaaggccttggcttatgcaaaagataaagaacttgtggcctccgccggactggataggcagatcttcctgtgggacgttaatactctgacggctctcactgcatccaacaatacagttactacgtctagcctctctggaaataaggactctatctactctttggctatgaatcagctgggcaccataatcgtttcagggtctaccgagaaggtgctcagggtgtgggatccgcgtacctgcgccaagcttatgaagctgaagggccatacagacaatgttaaagccttgctgctgaaccgcgacggaactcaatgcctatccgggtcctccgatggaactatcagactatggagcctgggccaacaacggtgtatcgcaacatatcgtgtccacgacgaaggagtgtgggctcttcaagtcaatgatgccttcactcatgtgtatagcggaggacgtgatagaaagatctactgtacagatctgcgcaatccagacatcagagtgctgatatgtgaggagaaggcacccgtgctgaaaatggagcttgaccggtcagccgatcctccgccggctatttgggtggctacaactaagtcgacagttaataaatggaccttgaagggcattcacaacttcagggccagtggcgactatgacaatgactgtaccaacccaataacaccgctctgtacacagccggaccaggtgatcaagggtggcgcttcaatcattcaatgccacattctgaatgataagagacacatcctgaccaaagataccaacaataacgtggcatactgggacgtgctgaaagcctgcaaagtggaggatttgggcaaggtggacttcgaagacgagattaaaaagcggttcaagatggtatacgtccccaattggttcagtgtggacctcaaaactgggatgctcactattaccctcgatgagagcgattgttttgcagcttgggtatcggctaaagatgctggcttctcatcaccagatggaagtgaccctaaactgaacctgggtggcctgctgttgcaggcacttctggagtactggccccgaacacacgtcaacccgatggacgaagaagaaaacgaggtcaatcatgtcaacggagagcaagaaaacagagtccaaaagggcaacggctatttccaggtgcctccacatacgcctgtcatctttggggaagcaggcggccggactctgtttcggctgctttgtagagattctggaggcgaaaccgagtcaatgctcctcaatgagaccgtgccccagtgggtcatcgatatcactgtggataaaaatatgcctaagtttaacaaaattccgttctacctgcagcctcatgcatcaagcggcgctaaaacactgaagaaagaccggctcagtgccagtgatatgctgcaagttcggaaggtcatggaacacgtctatgaaaaaatcattaacctcgataacgagagtcagaccacttcatcctcaaacaacgaaaaacctggagagcaagagaaagaggaagacatcgctgtcctggctgaagaaaagattgaattactctgccaggatcaggtcctggacccgaatatggatttgcgtactgtcaaacattttatctggaagtccgggggagatctgacccttcactaccgccagaagtccacttag

SEQ ID NO: 115191 - DNA, 366 bp, Artificial Sequence
  derived and/or modified sequence
atgcccaagttcaacaagatccccttctacctgcagccccacgccagctctggcgcgaaaaccctcaaaaaggatcgcctctcggcttcagacatgctgcaggtgcgcaaagtgatggagcatgtatacgaaaaaatcattaacctggacaatgagtcacagacgacctcctcctctaataacgagaagcccggggagcaggaaaaggaggaagacatcgccgtgctagccgaagagaagatcgaactgctatgtcaggaccaagtccgggtcctcgatcctaatatggacttgaggaccgtcaagcatttcatctggaaatcagggggcgatctcacgctgcattatcgacaaaaatccacatag

SEQ ID NO: 115192 - DNA, 1209 bp, Artificial Sequence
  derived and/or modified sequence
atggccgcccaccaccggcagaacaccgccggccggcggaaggtgcagtgcctgtccggcagtagtgacgggaccataagactttggagcctgggtcagcaacgctgtatcgctacatatcgtgtgcatgatgaaggggtgtgggccctgcaggtgaatgacgcttttacacatgtgtattcagggggtcgggatagaaagatttattgcaccgatctgcgcaatcccgatatccgagtgctcatttgcgaggaaaaggctcccgttcttaaaatggagctggaccggagcgctgacccacctcctgcgatctgggtggccacaaccaaatccactgttaacaagtgggcctgtaaggtggaggatcttggcaaggtggactttgaggacgaaatcaagaagcgcttcaagatggtatacgttcccaactggttcagcgtggatctgaaaacaggtatgctcacaatcactctcgacgagtcagactgctttgccgcgtgggtgtccgctaaggacgccggcttctcgtcacccgacggatctgatccaaagcttaacctgggcggcttgttgctgcaagccctcctggaatattggccccgaacacatgtgaaccctatggacgaggaagagaacgaagtgaaccacgtgaatggagaacaggagaaccgggttcaaaagggcaacgggtattttcaggtgcctcctcatacaccggttatctttggcgaagcaggcggacgtactctctttcgcctcctatgtcgagatagtggcggtgagaccgaaagcatgcttctgaacgaaacagtgccccagtgggtgatagatatcacggtcgataaaaatatgccaaagttcaataaaatcccattttatctgcaacctcacgcatcatctggagcaaagacgcttaagaaagatcgcctttctgcttcagacatgcttcaggtaaggaaggtcatggaacacgtgtatgagaaaatcattaacctagacaacgagtcccagacgaccagtagcagtaataacgaaaaaccaggagagcaggagaaggaggaggacatcgcggtactcgccgaagagaaaattgagctgctctgtcaggaccaggtgttagaccctaatatggacttgagaacagtgaagcactttatctggaaatccggtggagatctcacattgcactatcgtcaaaaatccacctag

SEQ ID NO: 115193 - DNA, 1788 bp, Artificial Sequence
  derived and/or modified sequence
atggaatgccagtccgcccaagtcatcagtgcttcttccgacacgacggttaaggtgtggaacgctcataagggtttctgcatgagcaccctgaggacacataaggactacgtgaaagcactggcctatgccaaagacaaggagctggtggcgtctgccggactggatagacaaatctttctgtgggacgtgaacactttaactgctctgactgcctccaacaatacagttacaacctcttccttatctggcaataaggactccatctactctctcgcaatgaatcaattaggcacaatcatcgtgagcggtagtaccgagaaagtactgagagtgtgggatcccagaacttgtgccaaactgatgaaattaaaagggcacactgacaacgtcaaggcacttctgctgaaccgcgacggaacccagtgtctttctggatcctctgatgggactatccgcttatggtccctcgggcagcagcggtgcatcgctacatatagggtgcatgatgagggtgtttgggctctacaggtgaacgatgcgtttactcatgtgtacagtgggggacgagaccggaagatctactgcaccgacctaaggaaccccgatatccgcgtgctgatatgcgaggagaaagcgcctgtccttaaaatggaactagaccggagcgctgatcctccgcctgctatttgggttgcaacgaccaagagcaccgtcaacaaatggactctcaaaggaatccataattttagggcatccggagattatgataatgactgtaccaaccctatcacccccctgtgcacccaaccagatcaagtgataaagggcggagcaagcatcattcagtgtcatatcctcaatgataagagacatattctgaccaaggataccaataacaatgtagcctactgggatgttttaaaagcttgcaaagtagaagaccttggcaaagtggattttgaagacgaaatcaaaaagagatttaaaatggtttacgttcctaactggttttccgtcgacttaaagaccggtatgctgacaatcacgcttgacgagagtgattgttttgccgcttgggtctctgccaaggacgccggattttcctcccctgacggatccgaccctaagttgaacctgggaggcttgctgctgcaagccttactcgaatactggcctcgtacacacgtgaaccccatggatgaagaggagaacgaagtaaaccatgtcaatggagagcaggaaaaccgcgttcagaaggggaacggatattttcaggtgcctccacacacccctgtgatctttggggaagctggcggacgaactctatttcgactgctatgtcgcgactcgggcggtgagacggagtccatgctcctcaacgaaaccgttcctcagtgggtcatcgacataaccgttgacaaaaacatgcctaaattcaacaagatccccttctacctgcagccccatgcaagctccggagccaaaacacttaagaaggatcgtctgtcagcaagcgacatgcttcaggtgaggaaagtgatggagcacgtctacgaaaaaatcatcaacctggataatgagtcccagaccacctcctcctcgaacaatgaaaaacccggagaacaggaaaaagaggaagatattgcagtgttggctgaggagaagatagagctcctttgtcaagaccaggtcctggatcctaacatggacctgcgtactgtgaagcactttatatggaaatctggcggagatctcacattgcactaccgccagaagagcacttag

SEQ ID NO: 115194 - DNA, 366 bp, Artificial Sequence
  derived and/or modified sequence
atgcccaaattcaataaaattcccttctatctgcagccccatgccagttccggggctaaaacactgaagaaagatagacttagtgctagcgacatgctgcaagtacggaaagtaatggagcatgtgtacgagaaaatcatcaatctagacaacgagtcacaaacaacctcatcatctaataacgaaaagcccggtgagcaggagaaggaggaagacattgccgtgctggctgaggaaaaaatcgagctgctctgccaggaccaagtgagggtgctcgatccaaatatggacctacgcaccgttaagcactttatttggaagagcgggggtgatctcacactgcattacaggcagaagtccacttag

SEQ ID NO: 115195 - DNA, 1209 bp, Artificial Sequence
  derived and/or modified sequence
atggcagcccatcataggcaaaacaccgcagggagacgaaaggtacagtgtctcagtgggagttcagacggcactatccgcctgtggtcactgggccagcagaggtgcattgctacatacagggtgcacgatgagggcgtctgggcgctgcaggtcaacgatgcctttacccatgtatactccggtggtagagatcggaagatttattgtaccgacctgcgcaatcccgacattcgagttctcatttgcgaagagaaggcccctgtgctgaaaatggaactcgacaggtcagccgacccccctccagctatatgggtcgcaaccactaagtctaccgtgaataagtgggcctgcaaagtggaggatctgggtaaggtagatttcgaggacgagattaagaaaaggtttaaaatggtgtacgtcccaaactggttctccgtggaccttaaaacggggatgctcacaattaccttggacgagagcgactgcttcgccgcttgggtgtcagccaaggacgccggattctcctcaccagatggctccgaccccaaattaaacttggggggactgttactccaggccctacttgaatattggccccgaacccatgtgaaccctatggatgaagaggagaatgaagtgaaccatgtgaatggtgaacaggaaaacagagtgcagaagggaaacgggtacttccaggtgccacctcatacaccagtgatattcggtgaagccggaggtagaaccttgtttcgcctgctttgcagggacagcggcggagaaaccgaatcaatgctgttgaatgaaaccgttccacagtgggttatcgatataactgtcgataagaacatgccaaaattcaataagatccccttctatctgcagccacacgcatccagtggggctaagacactgaaaaaggatcgcctgagcgctagcgacatgcttcaagtgagaaaggtcatggagcacgtctacgaaaaaattattaatttggacaacgaaagtcaaaccacctcgtcctcgaataatgagaaaccaggcgagcaggaaaaagaggaagacatcgccgtgttagcggaagagaaaattgagctgctctgtcaagaccaggtgctggaccctaatatggatctgcggacggtcaaacacttcatttggaaaagtggtggggacttaactctgcattaccggcagaaatcgacctag

SEQ ID NO: 115196 - DNA, 3610 bp, Artificial Sequence
  derived and/or modified sequence
aacatgcaagatggcggcccatcaccggcagaacacagcagggcggaggaaagtgcaggtttcctatgttattcgagatgaagtggagaagtacaaccgaaatggagtcaatgctctgcagctggatccagcactaaatagacttttcacagccggtcgagactctatcataagaatatggagtgtcaatcagcacaagtaatatctgcttcttctgacacgacagtaaaagtatggaatgcacacaagggattttgcatgtcaacattaaggacacataaggattacgtaaaggccttagcatatgccaaggataaagaactagtagcatcagctgggttggacagacaaatattcctttgggatgtgaatactctaacagcattgactgcctcaaataacactgtcacaacttcttctttaagtggaaacaaagattccatttatagcctggccatgaatcaactgggaacaatcattgtatcagggtccactgaaaaggtgttacgggtatgggatccaagaacatgtgcaaaactaatgaagcttaaagggcacacggataatgtgaaggcattgctattaaacagagatggcacgcaatgcctgtcaggcagttctgatgggacaattcgcctttggtcccttggccagcagagatgtatagcaacataccgagtccatgatgaaggtgtttgggcgctgcaagtcaatgatgccttcacacatgtgtattctggtggaagggacaggaagatttattgtacagacctaagaaaccctgacattcgggtgctaatttgtgaagaaaaagcaccagttctcaagatggagcttgatagatcagctgatcctcctcctgcaatttgggttgcaacaactaagtctacagtaaataaatggactttgaaaggaattcataattttagagcctctggagattatgacaatgactgtacaaatcctataacacctctttgtacacaacctgaccaggttattaaagggggtgctagtattattcagtgccacattcttaatgataagagacatatattaaccaaagataccaataataatgtggcatattgggatgtattgaaggcatgtaaagttgaagatctgggcaaagtggattttgaagatgaaattaagaaaagatttaaaatggtgtatgtgccaaattggttctcagtagacttaaaaacagggatgttaactattactttggatgaaagtgattgttttgctgcctgggtttctgcaaaagatgctggtttcagcagccctgatgggtcagatccaaaattgaatttaggaggacttttactccaagcactcctggaatattggcctagaacacatgtgaatccaatggatgaagaggaaaatgaagtaaaccatgtaaatggggagcaggagaaccgagtgcagaagggaaatggatattttcaagtgcccccacatacacccgtgatctttggtgaagctggaggtcgcacactgttcaggctgctctgccgagattccgggggtgagactgagtctatgcttcttaatgaaacagtgccacaatgggtaattgacatcactgtggataaaaatatgcccaaattcaacaaaattcctttctacctccaacctcatgcatcttcaggagcaaaaaccttaaaaaaagatagactctctgctagtgacatgctccaagtccgaaaagttatggaacatgtttatgaaaaaattatcaacttggataatgagtctcaaaccactagctcttctaataatgaaaaaccaggagaacaggaaaaagaagaagatattgctgtgttggcagaggagaaaattgaacttttgtgccaggaccaggttttggatccaaatatggaccttcgaacagtgaaacacttcatatggaagagcggtggagacctcaccctccattaccgtcagaagtccacgtgaaggctgggctaatgctcctggatattcatttacgaccttcctctatggccccaagagtagtcctaggaagcccactgatccccaacgggagcaagacttctaacggctgattggtatggaccgagattatctttcaattgaagtgactaatcgagatgtaatatagaaaccagtctccatgtgtagattaagctgtccccagggaagcagagtgcaagagcagaagagccccaagcagactatgtctttcaagatgtacagaagactgacaacaggccagtgcagactttgcttcctccttttgtttcaaaggaccttatctacccattaacacttgttagagacacctcagtcgggccacaactgtctctgtttcaactttaagcccacacactctgtagcttttctaaaacagtacattccattcatgcagtagatatgaaggctttttccaagtttgtcatataaagtaatcaaattgttttcaccgtttaagacagttatttttaatgggaatttgctgttgcacaatttgagaaccagcccatttcataataaaagattaatgttgggcttgttgttaatattgcatctcagatgtgttcttgtaggaagatctgttgaaattccaggtgctggatcatagcacttggactgttgggccggagtttgtgcagcccatgcctagcgatgctgcacctcccatgatgtcctggctttgtggcaaccccagggaggtgcagcagtttcactccttcctccactgtgtccagttttatttacacaaagcgagctgagaccacaggttcttgctctggatgagcagcatgacaccatcaaaatttaagaccatgatgaaatttcagtttcattcaaatgttacctaaaatttatggtgtcagaataaagggagatcatagtgagttaatttgatattcatatcctggaagtatacatatttgtttttccaaagttttatatgcaggtttttgttgtacctgtatccagatcttcttttcactgttctaacaatctaacactttcatagaatcatttggatcttgtatagagtgtaacttattggggataaacacttcaacttttggcagaaaatactttggattctccccaaggtcatttgtattcagagtaaatcagtggtccacccccataaaactgtaagacaagcctcctgtatgaagccagaagcacaagtgccttcagagggcagttgattccagtccagttgcctccctagcttgtgtgtggcctgcctccaccatagcagggactagggagggaggcagggaacgttttttcttttctacatcttcacaggttcggctgggggcagctgataggcctaaggccataccttactatttaagatactctgatcgcacaactgcagagacagggttccctcactgctagtcagcttcttttggaaactggacaggccattgccacctgcactttgaagaagtgagcaaagacgtggccacatttctaataagttgaaatggtctttctcccttcctcagagagcaaccagcttctttttttttaaaagtcctttctatctgttggatacaacagtgtgcttttggtgcacattttttagcaatagttgtgaattaatggc

SEQ ID NO: 115197 - DNA, 2864 bp, Artificial Sequence
  derived and/or modified sequence
aacatgcaagatggcggcccatcaccggcagaacacagcagggcggaggaaagtgcagtgcctgtcaggcagttctgatgggacaattcgcctttggtcccttggccagcagagatgtatagcaacataccgagtccatgatgaaggtgtttgggcgctgcaagtcaatgatgccttcacacatgtgtattctggtggaagggacaggaagatttattgtacagacctaagaaaccctgacattcgggtgctaatttgtgaagaaaaagcaccagttctcaagatggagcttgatagatcagctgatcctcctcctgcaatttgggttgcaacaactaagtctacagtaaataaatgggcatgtaaagttgaagatctgggcaaagtggattttgaagatgaaattaagaaaagatttaaaatggtgtatgtgccaaattggttctcagtagacttaaaaacagggatgttaactattactttggatgaaagtgattgttttgctgcctgggtttctgcaaaagatgctggtttcagcagccctgatgggtcagatccaaaattgaatttaggaggacttttactccaagcactcctggaatattggcctagaacacatgtgaatccaatggatgaagaggaaaatgaagtaaaccatgtaaatggggagcaggagaaccgagtgcagaagggaaatggatattttcaagtgcccccacatacacccgtgatctttggtgaagctggaggtcgcacactgttcaggctgctctgccgagattccgggggtgagactgagtctatgcttcttaatgaaacagtgccacaatgggtaattgacatcactgtggataaaaatatgcccaaattcaacaaaattcctttctacctccaacctcatgcatcttcaggagcaaaaaccttaaaaaaagatagactctctgctagtgacatgctccaagtccgaaaagttatggaacatgtttatgaaaaaattatcaacttggataatgagtctcaaaccactagctcttctaataatgaaaaaccaggagaacaggaaaaagaagaagatattgctgtgttggcagaggagaaaattgaacttttgtgccaggaccaggttttggatccaaatatggaccttcgaacagtgaaacacttcatatggaagagcggtggagacctcaccctccattaccgtcagaagtccacgtgaaggctgggctaatgctcctggatattcatttacgaccttcctctatggccccaagagtagtcctaggaagcccactgatccccaacgggagcaagacttctaacggctgattggtatggaccgagattatctttcaattgaagtgactaatcgagatgtaatatagaaaccagtctccatgtgtagattaagctgtccccagggaagcagagtgcaagagcagaagagccccaagcagactatgtctttcaagatgtacagaagactgacaacaggccagtgcagactttgcttcctccttttgtttcaaaggaccttatctacccattaacacttgttagagacacctcagtcgggccacaactgtctctgtttcaactttaagcccacacactctgtagcttttctaaaacagtacattccattcatgcagtagatatgaaggctttttccaagtttgtcatataaagtaatcaaattgttttcaccgtttaagacagttatttttaatgggaatttgctgttgcacaatttgagaaccagcccatttcataataaaagattaatgttgggcttgttgttaatattgcatctcagatgtgttcttgtaggaagatctgttgaaattccaggtgctggatcatagcacttggactgttgggccggagtttgtgcagcccatgcctagcgatgctgcacctcccatgatgtcctggctttgtggcaaccccagggaggtgcagcagtttcactccttcctccactgtgtccagttttatttacacaaagcgagctgagaccacaggttcttgctctggatgagcagcatgacaccatcaaaatttaagaccatgatgaaatttcagtttcattcaaatgttacctaaaatttatggtgtcagaataaagggagatcatagtgagttaatttgatattcatatcctggaagtatacatatttgtttttccaaagttttatatgcaggtttttgttgtacctgtatccagatcttcttttcactgttctaacaatctaacactttcatagaatcatttggatcttgtatagagtgtaacttattggggataaacacttcaacttttggcagaaaatactttggattctccccaaggtcatttgtattcagagtaaatcagtggtccacccccataaaactgtaagacaagcctcctgtatgaagccagaagcacaagtgccttcagagggcagttgattccagtccagttgcctccctagcttgtgtgtggcctgcctccaccatagcagggactagggagggaggcagggaacgttttttcttttctacatcttcacaggttcggctgggggcagctgataggcctaaggccataccttactatttaagatactctgatcgcacaactgcagagacagggttccctcactgctagtcagcttcttttggaaactggacaggccattgccacctgcactttgaagaagtgagcaaagacgtggccacatttctaataagttgaaatggtctttctcccttcctcagagagcaaccagcttctttttttttaaaagtcctttctatctgttggatacaacagtgtgcttttggtgcacattttttagcaatagttgtgaattaatggc

SEQ ID NO: 115198 - DNA, 2140 bp, Artificial Sequence
  derived and/or modified sequence
aacatgcaagatggcggcccatcaccggcagaacacagcagggcggaggaaagtgcaggtttcctatgttattcgagatgaagtggagaagtacaaccgaaatggagtcaatgctctgcagctggatccagcactaaatagacttttcacagccggtcgagactctatcataagaatatggagtgtcaatcagcacaagcaagatccatatatagcatctatggaacaccatactgattgggtaaacgacattgtactctgttgtaatgggaaaacattaaaagtatggaatgcacacaagggattttgcatgtcaacattaaggacacataaggattacgtaaaggccttagcatatgccaaggataaagaactagtagcatcagctgggttggacagacaaatattcctttgggatgtgaatactctaacagcattgactgcctcaaataacactgtcacaacttcttctttaagtggaaacaaagattccatttatagcctggccatgaatcaactgggaacaatcattgtatcagggtccactgaaaaggtgttacgggtatgggatccaagaacatgtgcaaaactaatgaagcttaaagggcacacggataatgtgaaggcattgctattaaacagagatggcacgcaatgcctgtcaggcagttctgatgggacaattcgcctttggtcccttggccagcagagatgtatagcaacataccgagtccatgatgaaggtgtttgggcgctgcaagtcaatgatgccttcacacatgtgtattctggtggaagggacaggaagatttattgtacagacctaagaaaccctgacattcgggtgctaatttgtgaagaaaaagcaccagttctcaagatggagcttgatagatcagctgatcctcctcctgcaatttgggttgcaacaactaagtctacagtaaataaatggactttgaaaggaattcataattttagagcctctggagattatgacaatgactgtacaaatcctataacacctctttgtacacaacctgaccaggttattaaagggggtgctagtattattcagtgccacattcttaatgataagagacatatattaaccaaagataccaataataatgtggcatattgggatgtattgaaggcatgtaaagttgaagatctgggcaaagtggattttgaagatgaaattaagaaaagatttaaaatggtgtatgtgccaaattggttctcagtagacttaaaaacagggatgttaactattactttggatgaaagtgattgttttgctgcctgggtttctgcaaaagatgctggtttcagcagccctgatgggtcagatccaaaattgaatttaggaggacttttactccaagcactcctggaatattggcctagaacacatgtgaatccaatggatgaagaggaaaatgaagtaaaccatgtaaatggggagcaggagaaccgagtgcagaagggaaatggatattttcaagtgcccccacatacacccgtgatctttggtgaagctggaggtcgcacactgttcaggctgctctgccgagattccgggggtgagactgagtctatgcttcttaatgaaacagtgccacaatgggtaattgacatcactgtggataaaaatatgcccaaattcaacaaaattcctttctacctccaacctcatgcatcttcaggagcaaaaaccttaaaaaaagatagactctctgctagtgacatgctccaagtccgaaaagttatggaacatgtttatgaaaaaattatcaacttggataatgagtctcaaaccactagctcttctaataatgaaaaaccaggagaacaggaaaaagaagaagatattgctgtgttggcagaggagaaaattgaacttttgtgccaggaccaggtaagagttttggatccaaatatggaccttcgaacagtgaaacacttcatatggaagagcggtggagacctcaccctccattaccgtcagaagtccacgtgaaggctgggctaatgctcctggatattcatttacgaccttcctctatggccccaagagtagtcctaggaagcccactgatccccaacgggagcaagacttctaacggctgattggtat

SEQ ID NO: 115199 - protein, 253 aa, Artificial Sequence
  derived and/or modified sequence
MKLMDAAELVKQPPDVTENPYRKSGQEASIGKQILAPVEESACQFFFDLNEKQGRKRSSTGRDSKSSPHPKQPRKPPQPPGPCWFCLASPEVEKHLVVNIGTHCYLALAKGGLSDDHVLILPIGHYQSVVELSAEVVEEVEKYKATLRRFFKSRGKWCVVFERNYKSHHLQLQIAQPGAAYFYVELDTGEKLFHRIKKNFPLQFGREVLASEAILNVPDKSDWRQCQISKEDEETLARRFRKDFEPYDFTLDD

SEQ ID NO: 115200 - DNA, 762 bp, Artificial Sequence
  derived and/or modified sequence
atgaagctgatggacgccgccgagctggtgaagcagccccccgacgtgaccgagaacccctacagaaagagcggccaggaggccagcatcggcaagcagatcctggcccccgtggaggagagcgcctgccagttcttcttcgacctgaacgagaagcagggcagaaagagaagcagcaccggcagagacagcaagagcagcccccaccccaagcagcccagaaagcccccccagccccccggcccctgctggttctgcctggccagccccgaggtggagaagcacctggtggtgaacatcggcacccactgctacctggccctggccaagggcggcctgagcgacgaccacgtgctgatcctgcccatcggccactaccagagcgtggtggagctgagcgccgaggtggtggaggaggtggagaagtacaaggccaccctgagaagattcttcaagagcagaggcaagtggtgcgtggtgttcgagagaaactacaagagccaccacctgcagctgcagatcgcccagcccggcgccgcctacttctacgtggagctggacaccggcgagaagctgttccacagaatcaagaagaacttccccctgcagttcggcagagaggtgctggccagcgaggccatcctgaacgtgcccgacaagagcgactggagacagtgccagatcagcaaggaggacgaggagaccctggccagaagattcagaaaggacttcgagccctacgacttcaccctggacgactag

SEQ ID NO: 115201 - DNA, 815 bp, Artificial Sequence
  derived and/or modified sequence
cccatgaagctaatggatgcagcagaactggtaaaacagcctccggatgtcactgaaaacccttacagaaaatctgggcaggaagcatccataggaaagcaaattcttgcccctgtggaagaatcagcctgtcagtttttctttgatttaaatgaaaagcagggaaggaagcgttcatccacaggtagagatagcaaatcttctcctcatccaaagcagcctcgcaaacctcctcagcctccaggaccctgctggttttgccttgctagccctgaagtggaaaaacatttggtggtcaacatcggcacacattgctaccttgccctggccaaaggaggcttatctgatgaccatgtcctcatcctgcctattggacactaccagtcagtggtggagctttcagcagaggtggtagaagaggtggagaagtataaggccactctgagacggttctttaagagtcgagggaaatggtgtgttgtatttgagagaaattataagagccatcacctccagctacagattgcacagccaggagcagcatatttttatgttgaacttgacacaggagaaaagcttttccacagaattaaaaagaattttcctttgcagtttggaagggaggtcctggccagtgaagccatccttaatgttcctgataagtctgactggaggcagtgtcagatcagcaaggaagacgaggagaccctggctcgccgcttccggaaagactttgagccctatgactttactctggatgactaaaacaaagggaagaactttttatgaactccacaggaagtagtaaagctttt

SEQ ID NO: 115202 - DNA, 762 bp, Artificial Sequence
  derived and/or modified sequence
atgaaactcatggacgctgccgagctcgtcaagcaacccccagacgtgacagaaaatccatacagaaagagcgggcaggaggcaagtatcggcaagcagattctggcacctgtcgaggagtccgcatgccaatttttctttgacctgaatgaaaagcagggcaggaagcgctcatcaaccggtcgggactcaaaaagctccccccatcctaaacagcctaggaagccaccgcagcctccagggccttgttggttttgccttgcttctcccgaggtcgagaaacacctagttgtgaacattggtacccactgttatttggctctggccaagggtggcttaagtgacgaccacgtcctgatcttgccaattggacactatcagagcgttgtggaactctccgctgaagtcgtggaagaggtcgagaagtataaagctactctgagaaggttttttaagtctagggggaagtggtgtgtcgtattcgaacgcaactataagagccaccacctgcaattgcagatcgctcaacccggagccgcctatttttacgtggagctggatacaggtgaaaagctgtttcacaggattaagaaaaactttccactgcagtttggcagggaggtactcgcaagtgaagcgatcctcaatgtgcctgacaaatccgactggaggcaatgccaaattagcaaggaagacgaggagactcttgctagacggtttaggaaagactttgagccatacgattttacgcttgacgattag

SEQ ID NO: 115203 - DNA, 762 bp, Artificial Sequence
  derived and/or modified sequence
atgaagctgatggatgctgctgagctggtgaagcagcccccagatgtgacagagaacccctacaggaagagcggccaggaggccagcatcggcaagcagatcctggcccctgtggaggagagcgcctgccagttcttctttgacctgaatgagaagcagggcaggaagaggagcagcacaggccgggacagcaagagcagcccccaccccaagcagcccaggaagccaccccagcccccaggcccctgctggttctgcctggccagccctgaggtggagaagcacctggtggtgaacatcggcacccactgctacctggccctggccaagggcggcctgagtgatgaccacgtgctgatcctgcccatcggccactaccagagcgtggtggagctgtctgctgaggtggtggaggaggtggagaagtacaaggccaccctgcggcgcttcttcaagagccggggcaagtggtgtgtggtgtttgaaagaaactacaagagccaccacctgcagctgcagatcgcccagcctggagctgcctacttctacgtggagctggacaccggggagaagctgttccaccgcatcaagaagaacttccccctgcagtttggccgggaggtgctggccagcgaggccatcctgaatgtgcctgacaagagtgactggaggcagtgccagatcagcaaagaagatgaggagaccctggcccggcgcttcaggaaggactttgagccctatgacttcaccctggatgactag

SEQ ID NO: 115204 - DNA, 762 bp, Artificial Sequence
  derived and/or modified sequence
atgaagctgatggacgccgccgagctggtgaagcagccccccgacgtgacagaaaacccgtatcggaagagtgggcaggaagcctcgatcgggaagcaaatcttggctcccgtggaagagtctgcttgtcagtttttctttgacctcaacgagaaacaggggcgcaagcgctcaagtactggacgggacagtaaaagctcgccccaccccaagcagccgagaaagccaccccagcctccagggccttgctggttctgcctggccagccctgaagtggagaagcacctcgtagttaacataggcacccactgttatctggccctggccaaagggggcctgtccgacgatcatgtcttaattcttcctatcggacattaccagagtgtggtggaactgtccgccgaggttgtggaggaagttgagaagtacaaagcaaccctgcgaaggttttttaagagtcgcggcaagtggtgcgtagtttttgaaaggaattataaatcccatcacctgcagctccagattgcccagcccggagccgcttacttttatgtggaactcgacactggggaaaaactttttcaccggataaaaaagaactttcctcttcagttcggcagagaggtgctggcttctgaagctatcttgaacgtgcctgacaagtccgactggaggcagtgccaaattagcaaggaagacgaagagaccctggctagaagattccggaaggacttcgagccatacgatttcacgctggacgactag

SEQ ID NO: 115205 - DNA, 762 bp, Artificial Sequence
  derived and/or modified sequence
atgaagttgatggatgcagcagaactcgtgaaacagccgcctgacgtgaccgaaaatccatacaggaagtccggtcaggaggctagcatcggcaagcagatcctcgctcccgtggaggaatccgcatgccaattcttttttgatttgaatgaaaagcagggaaggaagcgaagtagtaccgggagagattctaaatcttctccccaccccaagcaacccaggaagccccctcagcctccagggccttgctggttctgtctggcttcccctgaagtggaaaagcacttggtggtgaacatcgggacccactgttatttggcactggctaaggggggactgagcgatgatcatgtcctgatattgccgatagggcactaccagtcggtggtagagctctccgccgaagtggtggaggaagtcgaaaaatacaaggccaccctaagaaggttttttaagtcacgcggaaagtggtgtgtggtttttgagcggaactataagagccaccatcttcagctccaaatcgctcaaccaggagcagcatacttttacgttgagctggacacaggtgagaagctcttccataggattaaaaagaatttccctctgcagttcgggagggaggtgctggcaagtgaggccattttgaacgtacctgataaatccgattggcgacagtgccagatttccaaggaggatgaagaaactttggccaggaggtttcgtaaggattttgagccctacgactttaccctggacgactag

SEQ ID NO: 115206 - protein, 276 aa, Artificial Sequence
  derived and/or modified sequence
MRNSNWRFCQTGIYSKPNRKLTFLYLANDVIQNSKRKGPEFTKDFAPVIVEAFKHVSSETDESCKKHLGRVLSIWEERSVYENDVLEQLKQALYGDKKPRKRTYEQIKVDENENCSSLGSPSEPPQTLDLVRALQDLENAASGDAAVHQRIASLPVEVQEVSLLDKITDKESGERLSKMVEDACMLLADYNGRLAAEIDDRKQLTRMLADFLRCQKEALAEKEHKLEEYKRKLARVSLVRKELRSRIQSLPDLSRLPNVTGSHMHLPFAGDIYSED

SEQ ID NO: 115207 - DNA, 831 bp, Artificial Sequence
  derived and/or modified sequence
atgagaaacagcaactggagattctgccagaccggcatctacagcaagcccaacagaaagctgaccttcctgtacctggccaacgacgtgatccagaacagcaagagaaagggccccgagttcaccaaggacttcgcccccgtgatcgtggaggccttcaagcacgtgagcagcgagaccgacgagagctgcaagaagcacctgggcagagtgctgagcatctgggaggagagaagcgtgtacgagaacgacgtgctggagcagctgaagcaggccctgtacggcgacaagaagcccagaaagagaacctacgagcagatcaaggtggacgagaacgagaactgcagcagcctgggcagccccagcgagcccccccagaccctggacctggtgagagccctgcaggacctggagaacgccgccagcggcgacgccgccgtgcaccagagaatcgccagcctgcccgtggaggtgcaggaggtgagcctgctggacaagatcaccgacaaggagagcggcgagagactgagcaagatggtggaggacgcctgcatgctgctggccgactacaacggcagactggccgccgagatcgacgacagaaagcagctgaccagaatgctggccgacttcctgagatgccagaaggaggccctggccgagaaggagcacaagctggaggagtacaagagaaagctggccagagtgagcctggtgagaaaggagctgagaagcagaatccagagcctgcccgacctgagcagactgcccaacgtgaccggcagccacatgcacctgcccttcgccggcgacatctacagcgaggactag

SEQ ID NO: 115208 - DNA, 831 bp, Artificial Sequence
  derived and/or modified sequence
atgcggaactctaattggcggttttgtcagaccggtatctatagcaagcctaatcgcaagttgaccttcctgtacctggctaacgatgtgatccagaacagcaagagaaagggacccgagttcacaaaagacttcgcgcccgtcatcgttgaggcctttaaacacgtaagctctgagaccgatgaatcttgcaagaagcaccttgggcgtgtcctgtccatttgggaggagagatcagtctacgagaatgatgtcttagaacagttgaagcaagcactctacggcgacaagaaaccgcgtaaacggacctacgagcagatcaaggtagatgagaatgaaaactgtagcagtctcggatccccctccgagcccccccagacactggacttagtccgtgctctccaggacctggaaaacgccgcttccggggatgcagccgtgcatcagcgaattgcgagtctaccagtggaagtgcaggaggtatccctgctagataaaatcacagacaaggagagtggagagaggctgagcaagatggtggaagatgcttgtatgcttctagccgactataacggccgcttagccgctgaaatagacgaccgtaagcaactgactcgaatgctggccgacttcttgagatgtcagaaggaggccctcgcagaaaaagagcataaactggaggaatacaagaggaaacttgcacgcgtgtctttagttcggaaagagctgcgttcgcgaatccagtcccttcctgacttgtctagattgcccaacgttactggctctcacatgcacttgcctttcgccggggacatctattcagaggattag

SEQ ID NO: 115209 - DNA, 831 bp, Artificial Sequence
  derived and/or modified sequence
atgaggaacagcaactggaggttctgccagacaggcatctacagcaagcccaacaggaagctgaccttcctgtacctggccaatgatgtgatccagaacagcaagaggaaaggacctgagttcaccaaggactttgcccctgtgattgtggaggccttcaagcacgtgagcagcgagacagatgagagctgcaagaagcacctgggccgggtgctgagcatctgggaggagaggtctgtgtatgaaaatgatgtgctggagcagctgaagcaggccctgtatggagacaagaagcccaggaagaggacctatgagcagatcaaggtggatgaaaatgaaaactgcagcagcctgggcagccccagcgagcccccccagaccctggacctggtgcgggccctgcaggacctggagaatgctgccagcggagatgctgctgtgcaccagagaattgccagcctgcctgtggaggtgcaggaggtgtccctgctggacaagatcacagacaaggagagcggggagcggctgagcaagatggtggaggatgcctgcatgctgctggccgactacaacggccgcctggccgctgagattgatgacaggaagcagctgaccaggatgctggccgacttcctgcgctgccagaaggaggccctggccgagaaggagcacaagctggaggagtacaagaggaagctggcccgggtgtccctggtgaggaaggagctgcggagccgcatccagagcctgcctgacctgagccggctgcccaacgtgacaggcagccacatgcacctgccctttgctggggacatctacagtgaagattag

SEQ ID NO: 115210 - DNA, 831 bp, Artificial Sequence
  derived and/or modified sequence
atgcggaacagcaactggcggttctgccagaccggcatctacagcaagccaaatcgcaaattaacgttcttgtacttagctaatgacgttattcagaactccaagcggaaaggcccagagtttacaaaggatttcgcaccagtaatcgttgaagcatttaagcatgtctctagcgagacagatgagtcctgcaaaaaacacctcggccgtgtccttagtatctgggaggagcgatccgtctacgagaacgatgtgctggagcagcttaagcaggcactgtacggcgataagaagcctaggaagcgcacttatgagcagatcaaggtcgatgaaaatgagaactgcagctctcttgggtctcccagcgagccaccgcagactcttgatttggtccgggctctacaggatctcgagaacgcagcttccggcgacgcagcagtgcaccagcggattgcctccctccccgttgaagtgcaggaggtatcactactcgacaaaattaccgacaaggagtctggggaaagactgtccaagatggtcgaagacgcgtgtatgcttctagccgattataacggtcgtctagctgctgaaattgatgacaggaagcagctcaccaggatgctcgccgattttttacgatgccaaaaggaagccctggccgagaaagagcacaaattggaagagtacaagcggaagctcgcgagggtgtccctggtccgtaaggagttacgatctagaatccaaagtctgcccgatctcagtcgcttgcccaacgtaacaggctcgcacatgcacctcccattcgcgggggacatctactctgaagactag

SEQ ID NO: 115211 - DNA, 831 bp, Artificial Sequence
  derived and/or modified sequence
atgcggaactccaattggaggttctgccaaacaggaatttacagtaagccaaataggaagctgactttcttgtacctcgcaaacgacgtgatccagaatagcaagcgcaaaggtccggagtttacaaaagactttgcccctgtgatcgttgaggcattcaaacacgtctcaagtgaaaccgatgagagctgcaagaaacacctaggcagagtcttatcaatctgggaggaacgcagcgtctacgagaatgatgttcttgagcagctcaagcaggcgctctacggtgacaagaagcctaggaaacgtacttatgaacaaatcaaagttgacgagaacgaaaattgtagctccctggggtccccctcagaaccccctcagaccctggacctagtcagggcattgcaggatctagagaatgcggcaagtggcgatgccgctgtccatcagcgaatcgcctccctccctgtagaggtacaggaagtgtcactacttgataaaattactgataaagaatctggggagaggctcagcaaaatggtggaggacgcctgtatgttgttggctgactataatgggaggcttgctgcagaaattgacgaccggaagcagctgacacgtatgctggcagacttcctccgctgtcagaaggaagcactggctgagaaggaacacaagttggaagagtacaaaaggaaactggcccgtgtatcactagttaggaaggagctcagaagccgcatacagtcactgccggacttatctaggctgccgaatgtgacagggtcccacatgcatctgccattcgctggcgatatctactccgaggactag

SEQ ID NO: 115212 - DNA, 1590 bp, Artificial Sequence
  derived and/or modified sequence
atgagaaattccaattggagattttgtcaaacaggaatttactccaaaccaaacaggaagcttacttttctctacctagccaatgatgtcatacagaacagcaagaggaaggggccagagtttacaaaagattttgcaccagttatagtggaggcttttaagcatgtttcaagtgaaactgatgaaagttgtaagaagcaccttggaagagtgttatctatttgggaagaaaggtctgtttatgaaaatgatgtattagaacaacttaaacaagctctgtatggtgataagaagcctaggaagcgaacttatgaacagataaaggtggatgaaaatgaaaactgttcctctctgggatctccaagtgaaccaccacagactctagatctcgttagagcattacaagatctggaaaatgcagcctcaggtgatgcagcagttcatcagaggatagcttctttacctgttgaagtccaagaagtatctctattagataaaataacagataaagaatctggagaaaggctttccaaaatggtagaggatgcgtgtatgttgctggcagattacaatggcagattggcggcagaaatagatgatagaaagcaactcactcgaatgttagcagattttcttcgttgtcaaaaggaagcccttgcagagaaagagcataaattggaagagtacaagcgcaagctagccagagtttccctggtgcgcaaagaactcaggtcccggatccagagcctgccagacttatctcgattgcccaatgtcactggcagccacatgcacctgccctttgcgggagacatctacagtgaagattgatggaccagcctctttccaggtcccaggactttgcaagagatggagacagtgcagagagctgtctggagtcacaatctgaacagattctcgggcgctccttctctccttccatcactacagtaagtaaaaggaccatagaggggaaccaggaatctgagaatcagctgtgctcaatagccaacctccctgtccagatgcagctattttggtatctcctatcacatgcactctgaatcagggtttttctataagaaatctttcagaatcagcaaaagtggggatgacccaggcatcttgatttgcaaaatcacaaaactaagttgtcagttatcactgtagatgagcaactcatctttttaaagtatagttactgaactgattctgagaaatctttagagagaaaaaactcaacagtacaaattaactaattgggaaagttagaatgtcctttctgaatttttcattaaaaaaattacattatctgaaataacataaagctactaaactgctttgtattctattaagaaatagctcctaaggatgtagtcttgtttcatagttgttgcactatatcaaaacttaaaatgtaagcccagttcttctctgtatagaaaggaaacattgtgttacttaatgaattatttatacagagcatttgttgccaactgttgttccagccatccacacaggagtctgttctgaggtggcaatagcacatgggaagatgaactttccctgtttgtttacccgttcttcttt

SEQ ID NO: 115213 - protein, 289 aa, Artificial Sequence
  derived and/or modified sequence
MSAFSEAALEKKLSELSNSQQSVQTLSLWLIHHRKHSRPIVTVWERELRKAKPNRKLTFLYLANDVIQNSKRKGPEFTKDFAPVIVEAFKHVSSETDESCKKHLGRVLSIWEERSVYENDVLEQLKQALYGDKKPRKRTYEQIKVDENENCSSLGSPSEPPQTLDLVRALQDLENAASGDAAVHQRIASLPVEVQEVSLLDKITDKESGERLSKMVEDACMLLADYNGRLAAEIDDRKQLTRMLADFLRCQKEALAEKEHKLEILDMGVSSNDVVTISIFFLLKINIKP

SEQ ID NO: 115214 - DNA, 870 bp, Artificial Sequence
  derived and/or modified sequence
atgagcgccttcagcgaggccgccctggagaagaagctgagcgagctgagcaacagccagcagagcgtgcagaccctgagcctgtggctgatccaccacagaaagcacagcagacccatcgtgaccgtgtgggagagagagctgagaaaggccaagcccaacagaaagctgaccttcctgtacctggccaacgacgtgatccagaacagcaagagaaagggccccgagttcaccaaggacttcgcccccgtgatcgtggaggccttcaagcacgtgagcagcgagaccgacgagagctgcaagaagcacctgggcagagtgctgagcatctgggaggagagaagcgtgtacgagaacgacgtgctggagcagctgaagcaggccctgtacggcgacaagaagcccagaaagagaacctacgagcagatcaaggtggacgagaacgagaactgcagcagcctgggcagccccagcgagcccccccagaccctggacctggtgagagccctgcaggacctggagaacgccgccagcggcgacgccgccgtgcaccagagaatcgccagcctgcccgtggaggtgcaggaggtgagcctgctggacaagatcaccgacaaggagagcggcgagagactgagcaagatggtggaggacgcctgcatgctgctggccgactacaacggcagactggccgccgagatcgacgacagaaagcagctgaccagaatgctggccgacttcctgagatgccagaaggaggccctggccgagaaggagcacaagctggagatcctggacatgggcgtgagcagcaacgacgtggtgaccatcagcatcttcttcctgctgaagatcaacatcaagccctag

SEQ ID NO: 115215 - DNA, 870 bp, Artificial Sequence
  derived and/or modified sequence
atgagtgccttcagcgaggccgctttagagaaaaaactgagcgaactaagcaatagtcagcaaagcgtacaaacgttgtcactttggctaatccaccaccgaaaacactcgcggcctatcgtgacagtatgggagcgagaactacgtaaagccaaacccaatagaaagctcacttttctttatcttgctaacgacgtcattcagaattcaaaaagaaagggacccgagttcaccaaggactttgcaccagtgattgtggaagcgttcaaacacgtttcttccgagacagatgagagttgcaaaaagcacctcggaagagttctgagcatctgggaagagagaagtgtttacgagaatgatgttcttgagcagcttaagcaagcactctacggcgataagaaacctcgcaagcgcacttacgagcagattaaggtcgacgaaaatgaaaattgcagctcactcggctccccgtctgagcccccacagaccctcgatttggtgagagccctccaagacctggaaaatgcggcaagtggcgatgcagcggtgcaccagcgcattgcatccttgcctgtagaggtccaggaagtctccctactcgacaaaatcacagacaaggagtcaggtgaaaggctcagtaaaatggtggaggacgcgtgtatgctgctcgcagattacaatggacggcttgctgccgagatcgacgataggaagcaactaacaaggatgctagccgatttcttacgctgccaaaaggaggccctcgctgaaaaggagcacaagctggagatcctggacatgggcgtgtcttctaatgatgttgtcactatctccatatttttcctgctgaaaattaatataaagccgtag

SEQ ID NO: 115216 - DNA, 870 bp, Artificial Sequence
  derived and/or modified sequence
atgtctgccttcagcgaggccgccctggagaagaagctgtctgagctgagcaacagccagcagagcgtgcagaccctgagcctgtggctgatccaccacaggaagcacagccggcccatcgtgacagtgtgggagcgggagctgaggaaggccaagcccaacaggaagctgaccttcctgtacctggccaatgatgtgatccagaacagcaagaggaaaggacctgagttcaccaaggactttgcccctgtgattgtggaggccttcaagcacgtgagcagcgagacagatgagagctgcaagaagcacctgggccgggtgctgagcatctgggaggagaggtctgtgtatgaaaatgatgtgctggagcagctgaagcaggccctgtatggagacaagaagcccaggaagaggacctatgagcagatcaaggtggatgaaaatgaaaactgcagcagcctgggcagccccagcgagcccccccagaccctggacctggtgcgggccctgcaggacctggagaatgctgccagcggagatgctgctgtgcaccagagaattgccagcctgcctgtggaggtgcaggaggtgtccctgctggacaagatcacagacaaggagagcggggagcggctgagcaagatggtggaggatgcctgcatgctgctggccgactacaacggccgcctggccgctgagattgatgacaggaagcagctgaccaggatgctggccgacttcctgcgctgccagaaggaggccctggccgagaaggagcacaagctggagatcctggacatgggcgtgagcagcaatgatgtggtgaccatcagcatcttcttcctgctgaagatcaacatcaagccctag

SEQ ID NO: 115217 - DNA, 870 bp, Artificial Sequence
  derived and/or modified sequence
atgagcgccttcagcgaggccgccctggagaagaagctgagcgagctgagcaactctcagcagtcggtccagaccctatccctgtggctcattcaccaccgaaaacactcccgacctatcgttaccgtttgggaacgcgagctgcgcaaagccaaacccaaccgaaagctcacatttttgtaccttgccaacgatgtgattcagaattctaaaagaaagggcccagaatttacaaaggattttgcacctgttattgtggaggccttcaaacacgtcagttccgaaacagatgagtcatgtaagaaacatctggggagggttctctccatatgggaggagcggagtgtttacgagaacgacgtacttgagcaacttaagcaggcactctacggagacaaaaaacccaggaagcgtacgtatgaacagattaaagtggatgagaacgaaaattgctctagcttgggaagcccatccgagccgcctcagactctcgatttggtgcgggccctccaagacctggagaacgctgcatccggcgacgctgctgtccaccaaagaatcgcttcactgcccgtcgaggtgcaagaggtgagcctgctcgataaaattacagataaggaaagcggcgagcgccttagcaagatggttgaagatgcatgcatgcttcttgctgattataacggtagactcgccgctgaaattgacgacagaaagcaactaacacgcatgctggcagatttcctccggtgccaaaaggaagccctggccgaaaaagaacacaaactggagattctagacatgggggtcagttctaacgacgtcgttaccatttccattttcttcctgcttaagatcaatatcaagccttag

SEQ ID NO: 115218 - DNA, 870 bp, Artificial Sequence
  derived and/or modified sequence
atgtcagcgttctccgaagcagccctggagaagaaactgagcgagttgtccaacagccagcaaagcgttcagaccctaagcctctggcttattcaccatcgcaagcactctagacccattgtgaccgtctgggaacgggagctccgcaaagccaaacctaacaggaagttgacattcttatatctagccaatgatgtcatccagaattccaagaggaagggacccgagttcactaaagatttcgcacccgtcatagtcgaggcttttaagcacgtgtcctctgaaacagacgagagctgcaaaaaacacctcgggcgagtgctctccatatgggaagaacgcagcgtgtacgagaacgacgtgctggagcaactcaaacaggcgctgtatggggacaaaaagcccaggaaaaggacctacgagcagattaaagttgacgaaaacgaaaactgtagtagccttggttcgcccagcgagcctccgcagactctggatctcgtgcgggcattacaggatctcgaaaatgcagcctctggcgatgccgcagtccatcagagaattgcatctctgcccgttgaggtgcaggaggtgtccctgctggacaaaattaccgacaaagagagtggcgaaagactatccaaaatggtggaagacgcctgcatgctgctggcagattataacggtaggctggcagccgaaattgacgaccggaagcagcttactagaatgttggccgattttctgcgatgccagaaggaggccctcgctgaaaaggagcataaactagagatacttgatatgggcgtaagcagtaatgacgtggtaactatctcgatcttttttctgcttaaaattaatattaagccctag

SEQ ID NO: 115219 - DNA, 1022 bp, Artificial Sequence
  derived and/or modified sequence
ttgctggtttgcggccggtcttggatgaagcggcggccgtggtgagagcgtggggaagggtggggtgagggggcgaggccgcagctagggcggcgaaactctcctcccctcggccccaccgcgtgggacggcgtgaacgtggtgtcggagggatgtcagccttctctgaggcggcgctggagaagaagctgtcggagttgagcaactcgcagcagagcgtgcagaccttgtccctgtggctcattcaccaccgtaaacactcgcgtcccatcgtcaccgtgtgggagcgggagctgcggaaagccaaaccaaacaggaagcttacttttctctacctagccaatgatgtcatacagaacagcaagaggaaggggccagagtttacaaaagattttgcaccagttatagtggaggcttttaagcatgtttcaagtgaaactgatgaaagttgtaagaagcaccttggaagagtgttatctatttgggaagaaaggtctgtttatgaaaatgatgtattagaacaacttaaacaagctctgtatggtgataagaagcctaggaagcgaacttatgaacagataaaggtggatgaaaatgaaaactgttcctctctgggatctccaagtgaaccaccacagactctagatctcgttagagcattacaagatctggaaaatgcagcctcaggtgatgcagcagttcatcagaggatagcttctttacctgttgaagtccaagaagtatctctattagataaaataacagataaagaatctggagaaaggctttccaaaatggtagaggatgcgtgtatgttgctggcagattacaatggcagattggcggcagaaatagatgatagaaagcaactcactcgaatgttagcagattttcttcgttgtcaaaaggaagcccttgcagagaaagagcataaattggaaatattggacatgggcgtatcttctaacgatgtcgtcaccattagtatattcttcctgctaaaaataaatatcaaaccctga

SEQ ID NO: 115220 - protein, 718 aa, Artificial Sequence
  derived and/or modified sequence
MPLKDDHTSRPLWVAPDGHIFLEAFSPVYKYAQDFLVAIAEPVCRPTHVHEYKLTAYSLYAAVSVGLQTSDITEYLRKLSKTGVPDGIMQFIKLCTVSYGKVKLVLKHNRYFVESCHPDVIQHLLQDPVIRECRLRNSEGEATELITETFTSKSAISKTAESSGGPSTSRVTDPQGKSDIPMDLFDFYEQMDKDEEEEEETQTVSFEVKQEMIEELQKRCIHLEYPLLAEYDFRNDSVNPDINIDLKPTAVLRPYQEKSLRKMFGNGRARSGVIVLPCGAGKSLVGVTAACTVRKRCLVLGNSAVSVEQWKAQFKMWSTIDDSQICRFTSDAKDKPIGCSVAISTYSMLGHTTKRSWEAERVMEWLKTQEWGLMILDEVHTIPAKMFRRVLTIVQAHCKLGLTATLVREDDKIVDLNFLIGPKLYEANWMELQNNGYIAKVQCAEVWCPMSPEFYREYVAIKTKKRILLYTMNPNKFRACQFLIKFHERRNDKIIVFADNVFALKEYAIRLNKPYIYGPTSQGERMQILQNFKHNPKINTIFISKVGDTSFDLPEANVLIQISSHGGSRRQEAQRLGRVLRAKKGMVAEEYNAFFYSLVSQDTQEMAYSTKRQRFLVDQGYSFKVITKLAGMEEEDLAFSTKEEQQQLLQKVLAATDLDAEEEVVAGEFGSRSSQASRRFGTMSSMSGADDTVYMEYHSSRSKAPSKHVHPLFKRFRK

SEQ ID NO: 115221 - protein, 554 aa, Artificial Sequence
  derived and/or modified sequence
MAARPAATLAWSLLLLSSALLREGCRARFVAERDSEDDGEEPVVFPESPLQSPTVLVAVLARNAAHTLPHFLGCLERLDYPKSRMAIWAATDHNVDNTTEIFREWLKNVQRLYHYVEWRPMDEPESYPDEIGPKHWPTSRFAHVMKLRQAALRTAREKWSDYILFIDVDNFLTNPQTLNLLIAENKTIVAPMLESRGLYSNFWCGITPKGFYKRTPDYVQIREWKRTGCFPVPMVHSTFLIDLRKEASDKLTFYPPHQDYTWTFDDIIVFAFSSRQAGIQMYLCNREHYGYLPIPLKPHQTLQEDIENLIHVQIEAMIDRPPMEPSQYVSVVPKYPDKMGFDEIFMINLKRRKDRRDRMLRTLYEQEIEVKIVEAVDGKALNTSQLKALNIEMLPGYRDPYSSRPLTRGEIGCFLSHYSVWKEVIDRELEKTLVIEDDVRFEHQFKKKLMKLMDNIDQAQLDWELIYIGRKRMQVKEPEKAVPNVANLVEADYSYWTLGYVISLEGAQKLVGANPFGKMLPVDEFLPVMYNKHPVLLSSPHCHLFQTLSDDCQR

SEQ ID NO: 115222 - DNA, 1665 bp, Artificial Sequence
  derived and/or modified sequence
atggccgccagacccgccgccaccctggcctggagcctgctgctgctgagcagcgccctgctgagagagggctgcagagccagattcgtggccgagagagacagcgaggacgacggcgaggagcccgtggtgttccccgagagccccctgcagagccccaccgtgctggtggccgtgctggccagaaacgccgcccacaccctgccccacttcctgggctgcctggagagactggactaccccaagagcagaatggccatctgggccgccaccgaccacaacgtggacaacaccaccgagatcttcagagagtggctgaagaacgtgcagagactgtaccactacgtggagtggagacccatggacgagcccgagagctaccccgacgagatcggccccaagcactggcccaccagcagattcgcccacgtgatgaagctgagacaggccgccctgagaaccgccagagagaagtggagcgactacatcctgttcatcgacgtggacaacttcctgaccaacccccagaccctgaacctgctgatcgccgagaacaagaccatcgtggcccccatgctggagagcagaggcctgtacagcaacttctggtgcggcatcacccccaagggcttctacaagagaacccccgactacgtgcagatcagagagtggaagagaaccggctgcttccccgtgcccatggtgcacagcaccttcctgatcgacctgagaaaggaggccagcgacaagctgaccttctaccccccccaccaggactacacctggaccttcgacgacatcatcgtgttcgccttcagcagcagacaggccggcatccagatgtacctgtgcaacagagagcactacggctacctgcccatccccctgaagccccaccagaccctgcaggaggacatcgagaacctgatccacgtgcagatcgaggccatgatcgacagaccccccatggagcccagccagtacgtgagcgtggtgcccaagtaccccgacaagatgggcttcgacgagatcttcatgatcaacctgaagagaagaaaggacagaagagacagaatgctgagaaccctgtacgagcaggagatcgaggtgaagatcgtggaggccgtggacggcaaggccctgaacaccagccagctgaaggccctgaacatcgagatgctgcccggctacagagacccctacagcagcagacccctgaccagaggcgagatcggctgcttcctgagccactacagcgtgtggaaggaggtgatcgacagagagctggagaagaccctggtgatcgaggacgacgtgagattcgagcaccagttcaagaagaagctgatgaagctgatggacaacatcgaccaggcccagctggactgggagctgatctacatcggcagaaagagaatgcaggtgaaggagcccgagaaggccgtgcccaacgtggccaacctggtggaggccgactacagctactggaccctgggctacgtgatcagcctggagggcgcccagaagctggtgggcgccaaccccttcggcaagatgctgcccgtggacgagttcctgcccgtgatgtacaacaagcaccccgtgctgctgagcagcccccactgccacctgttccagaccctgagcgacgactgccagagatag

SEQ ID NO: 115223 - DNA, 1665 bp, Artificial Sequence
  derived and/or modified sequence
atggccgccaggcctgcggccaccctggcatggtccctcctgctgctgagctcagctctgctccgggaggggtgccgggcacggttcgtggcagagcgcgactctgaggatgacggcgaggaaccagtggtgtttcctgaatcacccctacagtcacccacagttctggttgcagttctggctcgcaacgccgcccatactctccctcactttctcgggtgcttggagcgattggattatcccaaatccaggatggccatatgggcggctaccgatcataacgtggacaatacaaccgaaatcttccgagaatggctgaaaaatgtacaaaggctttaccactacgtggagtggaggccgatggacgaacctgaaagctacccagacgaaatagggcccaagcactggccgacatctcgttttgcccacgtgatgaagctgagacaggctgcactccggaccgctcgagagaagtggtccgactatattctattcattgatgtagataatttcttgacaaacccacagacactgaacctcctcatcgcggagaataaaactatagtagcccccatgcttgagagcagaggcctgtattcaaacttctggtgcggaattacgccaaagggcttctataaacgcacacccgactacgtgcaaattcgcgagtggaaaaggacaggttgcttccccgtgcccatggtgcatagtacattcctcattgatctgaggaaggaggcctctgacaaattgaccttctatccgcctcatcaggactatacttggactttcgacgatatcatcgtttttgccttctcttctagacaggcgggcatccaaatgtatctgtgtaatcgggagcactacggatatttaccaatcccgcttaaacctcatcaaacactacaagaagatatagaaaacctgatccatgtccagatcgaagcaatgatcgatagacctccaatggagccatcccagtacgttagcgtggtcccaaagtatcctgacaagatgggattcgatgagatcttcatgataaatctcaagaggcgaaaagacagacgggacaggatgctgaggacactttatgaacaggagatagaggtcaaaatagtcgaggctgtggatggcaaagctctcaataccagtcagttaaaagccctcaacatcgaaatgctcccggggtaccgggacccctatagcagtcgtcctctcaccagaggggagattgggtgcttcctatcccattatagcgtatggaaagaagtgatcgatcgcgagctcgaaaagactttagttatcgaggatgacgttcggtttgaacaccagtttaaaaagaaactgatgaagctgatggacaacatcgaccaggctcagctcgactgggaattgatctacattgggcgcaagcggatgcaagtcaaagaacctgagaaggccgttccaaatgtggcgaacctggtggaggccgactacagttactggacacttggatacgtcatcagtctagagggcgcccagaagttagtgggagccaacccattcgggaagatgttgcccgtggacgagtttttgcccgtgatgtataacaagcatcccgtcctgctcagcagcccccattgccacctgtttcagactctgtctgatgactgccagaggtag

SEQ ID NO: 115224 - DNA, 2352 bp, Artificial Sequence
  derived and/or modified sequence
aagccgcatcccccggccgcccctcgcagccccttgctccccggcagccgccgccgccctcaggcagcccagccgggcgctcgcgccaggacttccccgccgcccgcctcggcccggaacatggctgcgcgccctgctgccaccctcgcctggtcgctactgctcctctcctcagccctgctccgcgaaggctgccgagcgcgcttcgtcgccgagcgggactcggaggacgacggagaggagccggtggttttcccggagtcgcccctgcagagccccacggtgctcgtggcggtcctcgcccgcaacgcggcgcacacgctgccgcacttcctcggctgcctggagcggctggactaccccaagagcaggatggccatctgggcagccactgatcacaatgtggataatacaacagaaatattcagggagtggttgaaaaatgtacagagactctatcactatgtggagtggaggcctatggatgaaccagagtcttaccctgatgaaattggaccaaagcactggccaacctcccggtttgcccatgtgatgaaactacgacaggcagcccttcgaactgcgagggaaaaatggtcagactacattctgttcatagatgttgacaatttcctgactaatccacagaccctcaatctactgattgcagaaaacaaaactattgtggcccccatgctggagtctcggggcctgtattctaatttctggtgcggaatcacccctaagggcttctataagaggaccccagactacgttcagattcgagaatggaagaggacaggctgcttccccgtccccatggtccactccaccttcctaattgacctcaggaaggaggcctcggacaagctgactttctaccccccacaccaggactacacctggacctttgatgacatcattgtctttgccttctccagcaggcaagcaggcatccagatgtacctctgcaacagagagcactatggctacctgcccatccccctgaagccccatcagacactgcaggaagacatcgagaacctcatccatgtgcagattgaagcaatgattgaccgtcctccaatggaaccctcccagtatgtctcagttgtccctaaatatccagacaagatgggatttgatgagattttcatgataaacctcaaacgcagaaaggacaggcgggaccggatgctgcgcacactgtatgaacaggagattgaggtcaagattgtcgaggctgtggatggaaaggcactcaacacaagccagctgaaggcactgaatattgaaatgctgcctggctatcgagatccctattcctccaggcctctaacaaggggtgaaatcggctgctttctcagccactactcagtctggaaagaggtaattgatcgagagctagagaagactcttgtaattgaagacgatgtgcgttttgagcatcagtttaagaagaagctgatgaagctgatggataacattgaccaggctcagctggactgggaactgatttatattggtaggaagaggatgcaagtaaaggagccagagaaagcagtgcccaatgtggcaaacctggtcgaagccgactattcctactggaccctgggctacgtcatctctctggaaggagcacagaagctggttggagccaatccttttgggaagatgctgccagtggatgagtttctgccagtcatgtacaacaagcatcccgtcctcctctcaagtcctcactgccatctcttccaaacactttctgatgactgccaacggtgaacaaacccgtgcaccctaggagaaggcattacccctctgtggcagaggtggtcgtgttcatcaactcctccaggtttctcctgcatttcccacctcccctgtactcacatcgggcccggggactggttgatgggctgtgaacagaagtgacaggtgtcgctttggtctaaggcagttgggaacagtttgtgagttctctttactctctttatcatcactgtgactggaagggaaacaccgagatggcgaagttgcaagatggaagctgcctggatctgtgagctgctgttagagaaaagctactaaggagtttcctggcttgcattacactgtcccgtgaaagaaaaaataaacctcggtcttaagctgttgaaatttcttggtttgttacttcggtccagcctagcctagcctaacacatcccttccaaaggtatttaattttaagagagatgtctagggggaaaagcaatgcaaaatgcaatggaaataactttgcctagtggaaatgtaggcatctgaagaaaaagaggtttgagtcaggaacctcctcagtccccctgaaatc

SEQ ID NO: 115225 - DNA, 1665 bp, Artificial Sequence
  derived and/or modified sequence
atggccgcccggcctgctgccaccctggcctggagcctgctgctgctgagcagcgccctgctgcgggagggctgccgggccaggtttgtggccgagcgggacagtgaagatgatggagaggagcctgtggtgtttcctgagagccccctgcagagccccaccgtgctggtggccgtgctggccagaaatgctgcccacaccctgccccacttcctgggctgcctggagcggctggactaccccaagagcaggatggccatctgggccgccacagaccacaacgtggacaacaccacagagatcttccgggagtggctgaagaatgtgcagaggctgtaccactacgtggagtggaggcccatggatgagcctgagagctacccagatgaaattggccccaagcactggcccaccagcagatttgcccacgtgatgaagctgcggcaggccgccctgaggacagcccgggagaagtggagcgactacatcctcttcattgatgtggacaacttcctgaccaacccccagaccctgaacctgctgattgctgagaacaagaccatcgtggcccccatgctggagagccggggcctgtacagcaacttctggtgtggcatcacccccaagggcttctacaagaggaccccagactatgtgcagatccgggagtggaagaggacaggctgcttccctgtgcccatggtgcacagcaccttcctgattgacctgaggaaggaggccagtgacaagctgaccttctacccaccccaccaggactacacctggacctttgatgacatcatcgtgtttgccttcagcagccggcaggccggcatccagatgtacctgtgcaaccgggagcactacggctacctgcccatccccctgaagccccaccagaccctgcaggaggacattgaaaatctcatccacgtgcagatcgaggccatgattgacaggcctcccatggagcccagccagtatgtgtctgtggtgcccaagtacccagacaagatgggctttgatgagatcttcatgatcaacctgaagaggaggaaggacagaagagacaggatgctgcggaccctgtatgagcaggagattgaggtgaagatcgtggaggccgtggatggcaaggccctgaacaccagccagctgaaggccctgaacatcgagatgctgcccggctacagagacccctacagcagccggcccctgaccagaggagaaattggctgcttcctgagccactacagcgtgtggaaggaggtgattgaccgggagctggagaagaccctggtgattgaagatgatgtgcgctttgagcaccagttcaagaagaagctgatgaagctgatggacaacatcgaccaggcccagctggactgggagctgatctacatcggcaggaagaggatgcaggtgaaggagcctgagaaggctgtgcccaacgtggccaacctggtggaggccgactacagctactggaccctgggctacgtgatcagcctggagggcgcccagaagctggtgggcgccaacccctttgggaagatgctgcctgtggatgagttcctgcctgtgatgtacaacaagcaccctgtgctgctgagcagcccccactgccacctgttccagaccctgagtgatgactgccagaggtag

SEQ ID NO: 115226 - DNA, 1665 bp, Artificial Sequence
  derived and/or modified sequence
atggccgcccggcccgccgccaccctggcctggagcctgctgctgctgagtagcgcgcttctccgcgaaggatgcagggcccggtttgtcgccgaaagagattctgaggacgacggggaggaacctgttgtcttccccgagtcacccttacagagtcccactgtcttggtggcagtactcgcccggaacgcggcccatactctcccccacttcctgggctgtctcgagaggctagattatcccaagtcgagaatggctatctgggccgctacagatcacaacgtcgacaacaccaccgagatctttcgtgaatggcttaaaaacgtgcagcggctctatcattacgtggagtggcgtcctatggatgaacctgagtcctaccccgatgagatcggtcctaaacattggcccacctcacgcttcgcacacgtcatgaaactgcgccaagcagccctgcgtaccgctcgagagaaatggagcgattatattctttttatcgacgtggacaatttcctaactaacccccagacactaaacttgctcatcgccgagaataagactattgtggctcctatgctcgaatcgcgcggattgtacagcaacttttggtgcggtattactcccaaagggttttacaagcgcacccctgactatgtgcagattagggaatggaaaaggactgggtgctttcctgtcccgatggtccattctacgtttcttattgatttgagaaaggaagcaagcgacaagctgactttctaccctccacaccaggactatacatggaccttcgatgatattatcgtgttcgccttcagctcccgacaggcaggaatccagatgtatctgtgcaatcgggagcactacggatatcttccaatccccttaaagcctcaccagacacttcaggaagacatcgagaatcttatacacgtccaaattgaggccatgattgatagacctcccatggaaccttcccagtatgtaagcgtggtacctaaatacccggataaaatgggttttgacgaaatcttcatgatcaatctgaagaggagaaaagacagacgagacagaatgttacgcactctgtacgagcaggagatagaagtgaagattgtggaggccgtggacggcaaggccctgaatacctcacagttgaaagctctgaatatcgagatgctgccagggtaccgggatccctactcatcacggccccttactagaggtgagataggatgtttcctgtcccactacagcgtttggaaggaagtgatagatcgcgaactggaaaagactctggtaatagaggacgatgtgcggtttgaacaccagttcaaaaagaaacttatgaaacttatggataacatcgaccaggcacaactggactgggagttgatttatatcggtaggaaacgtatgcaagtcaaagaaccggaaaaggctgtgccaaatgtggccaacctggtggaggccgactattcttactggaccctcgggtacgtcatctcactggagggcgcacagaaactcgtcggagccaatccgttcggaaaaatgctccccgtcgacgaattccttcctgtcatgtataacaagcatccagtgttgttgtcctctcctcactgtcatctgttccagactctgtcagatgattgccaaaggtag

SEQ ID NO: 115227 - DNA, 1665 bp, Artificial Sequence
  derived and/or modified sequence
atggcggcaaggccagcagcaaccctggcatggtccctcttgctgctttcttccgcacttttgcgagaaggatgtcgtgcccgatttgtcgctgagcgcgattctgaagacgatggcgaggaacccgtggtgttcccagagtcccctcttcagtcccccacagttctggttgccgtactcgctcgcaatgcagcccacactctgccacatttccttggctgtctggaaaggctggactacccaaaatcaaggatggctatttgggccgctacagaccacaacgtcgacaacaccaccgaaatttttcgcgagtggcttaaaaacgtgcagcggttgtatcactatgtcgaatggagaccaatggacgaaccagagagctaccccgacgaaattggtcccaaacactggcctacaagtcgattcgctcatgtgatgaaactgagacaggccgcactcaggaccgcacgggaaaagtggagcgactacatactatttatcgatgtggacaacttcttgacaaatccccagacgcttaaccttctgatagccgagaacaaaactatcgtagcgccaatgctggaatccagaggcctgtacagcaatttttggtgtggaatcacccctaaagggttctataagcggaccccagactacgttcaaatccgtgagtggaagaggaccgggtgctttccggtgcctatggtgcattctacattcctcatcgacttaagaaaagaggccagtgataagcttacattctatccacctcaccaggactatacctggacattcgatgacatcatagtgtttgctttctcatcaagacaggccggaatccaaatgtacctttgtaatcgcgagcattacggttacctccccattcccctgaagccacaccaaaccttgcaagaggacatcgaaaacctgatacatgtccagatcgaggctatgattgaccgcccacctatggagccatcccagtacgtgagcgtcgtccccaagtatcctgataagatggggttcgatgagatcttcatgatcaacctcaagcgcaggaaggataggcgggaccgcatgctgagaaccctgtacgaacaggagatcgaagttaaaattgtcgaggccgtcgatggcaaagctctgaatacaagtcagttaaaggccctgaacatcgaaatgctcccagggtatcgagatccctactcgtctcgtccgctcacacgcggagagatcgggtgcttcctgagccattatagtgtgtggaaagaagtaatagatagggagctggagaagacgctcgtgatcgaggatgatgttagatttgaacaccaattcaagaagaagctcatgaagctgatggacaacatcgaccaggcacagctggactgggaacttatatatattggcaggaagaggatgcaggtcaaagaacctgagaaggctgttccaaacgttgccaacctcgtggaggctgactacagctattggaccttgggctatgtgatctctctcgagggcgctcagaagctggtgggggctaatccgtttggtaagatgctacctgttgatgaatttctgccagtcatgtataataagcacccagttctgttgtccagtcctcactgtcacctgttccagacactgtctgatgattgccagaggtag

SEQ ID NO: 115228 - DNA, 1092 bp, Artificial Sequence
  derived and/or modified sequence
atgttcagcgactgctggctgtgccccagcctgggcagcagcggcatccagatgtacctgtgcaacagagagcactacggctacctgcccatccccctgaagccccaccagaccctgcaggaggacatcgagaacctgatccacgtgcagatcgaggccatgatcgacagaccccccatggagcccagccagtacgtgagcgtggtgcccaagtaccccgacaagatgggcttcgacgagatcttcatgatcaacctgaagagaagaaaggacagaagagacagaatgctgagaaccctgtacgagcaggagatcgaggtgaagatcgtggaggccgtggacggcaaggccctgaacaccagccagctgaaggccctgaacatcgagatgctgcccggctacagagacccctacagcagcagacccctgaccagaggcgagatcggctgcttcctgagccactacagcgtgtggaaggaggtgatcgacagagagctggagaagaccctggtgatcgaggacgacgtgagattcgagcaccagttcaagaagaagctgatgaagctgatggacaacatcgaccaggcccagctggactgggagctgatctacatcggcagaaagagaatgcaggtgaaggagcccgagaaggccgtgcccaacgtggccaacctggtggaggccgactacagctactggaccctgggctacgtgatcagcctggagggcgcccagaagctggtgggcgccaaccccttcggcaagatgctgcccgtggacgagttcctgcccgtgatgtacaacaagcaccccgtggccgagtacaaggagtactacgagagcagagacctgaaggccttcagcgccgagcccctgctgatctaccccacccactacaccggccagcccggctacctgagcgacaccgagaccagcaccatctgggacaacgagaccgtggccaccgactgggacagaacccacgcctggaagagcagaaagcagagcagaatctacagcaacgccaagaacaccgaggccctgcccccccccaccagcctggacaccgtgcccagcagagacgagctgtag

SEQ ID NO: 115229 - DNA, 1092 bp, Artificial Sequence
  derived and/or modified sequence
atgttctccgattgctggctgtgccccagtctgggatctagcggaattcagatgtacctgtgtaatagggagcattacggatacctgcccatcccacttaaaccacaccagacattgcaggaggacatagagaacctgatacacgtccagattgaggcaatgatagatagaccccctatggaacctagccagtacgtctcagtggtgccgaaataccctgataagatgggattcgacgagatcttcatgattaacctcaaacgtagaaaggatcggcgagaccggatgctccggacactgtacgaacaagaaatcgaagtgaagatcgtggaagctgtggatgggaaggccctgaatacaagccagctgaaagcactgaatatcgaaatgcttcctggctatcgggacccatacagctcaaggcctctcacaagaggggagatcggttgctttctgagccactacagtgtctggaaggaagtgattgaccgcgagctcgagaagaccctggtgattgaagacgacgtgagattcgagcaccagtttaaaaagaaacttatgaagctgatggacaacatcgatcaggcgcagctagactgggaactgatttatatcggtagaaagcgcatgcaggtgaaggaaccagaaaaagctgtgcccaacgtagctaacctggtggaggctgactacagttactggaccctgggctacgttatcagtctggaaggcgctcagaaacttgtgggggctaatccgtttggcaaaatgctgccagtggacgagtttctccccgtgatgtacaacaagcatccggtggctgagtacaaagaatattacgaatcacgtgatcttaaggctttttccgcagaacctctgctaatttaccctacacactacactggacagcccggctacctgtccgacaccgaaacctcaacaatctgggataacgagaccgtggccacagactgggaccgaacacatgcgtggaaatcaagaaagcagtcccgcatttatagcaatgcaaagaataccgaagcactccctccccccacctctcttgatactgttccgtctcgcgacgagctctag

SEQ ID NO: 115230 - DNA, 2325 bp, Artificial Sequence
  derived and/or modified sequence
ttttcgtttttttgttctatgtatgcctagatttagctttaataatctgtcagcgttacagaattttcctgtttgctttcatatcaaatgtggatttcattcctcattttcttgttatttcctgtaggtggattacagtgttccattctgctctccagaatgggaattccttgcctcccttttgatcctttcatgccttttttgttcattccaggccatgagtttgctttttcttcagagggaaaaaatcaatttcctctgggctgaagaatagccgagtgtttttattagtccccaatgctgtgttttacttttttaataaaggagcattttttaggtctatagacatacctgaaacaaccacttatttaattgcagtgtcaaactcagcatcagacacagttcaggttccttctcctcgcttgtcactcagcagtatgttttctgattgttggctttgtccctctcttggatcctcaggcatccagatgtacctctgcaacagagagcactatggctacctgcccatccccctgaagccccatcagacactgcaggaagacatcgagaacctcatccatgtgcagattgaagcaatgattgaccgtcctccaatggaaccctcccagtatgtctcagttgtccctaaatatccagacaagatgggatttgatgagattttcatgataaacctcaaacgcagaaaggacaggcgggaccggatgctgcgcacactgtatgaacaggagattgaggtcaagattgtcgaggctgtggatggaaaggcactcaacacaagccagctgaaggcactgaatattgaaatgctgcctggctatcgagatccctattcctccaggcctctaacaaggggtgaaatcggctgctttctcagccactactcagtctggaaagaggtaattgatcgagagctagagaagactcttgtaattgaagacgatgtgcgttttgagcatcagtttaagaagaagctgatgaagctgatggataacattgaccaggctcagctggactgggaactgatttatattggtaggaagaggatgcaagtaaaggagccagagaaagcagtgcccaatgtggcaaacctggtcgaagccgactattcctactggaccctgggctacgtcatctctctggaaggagcacagaagctggttggagccaatccttttgggaagatgctgccagtggatgagtttctgccagtcatgtacaacaagcatcccgtagccgagtacaaggagtattatgaatccagggacctgaaagccttctctgcagaacccttgctcatctaccctacgcactacacaggccagccggggtacctgagtgacacggagacctccaccatctgggacaatgagacagtggccaccgactgggataggacacatgcctggaagtcccggaagcaaagccgcatctacagcaatgccaagaacacagaggccctgccaccgccaacctccctggacactgtgccttcaagggatgagctatgaaggctccctgggagtgtggcccacatcagttcaacatcctctggtttttctaaagggctattcatctgtttgctccagttttctgttttgttttgttcttagtggtcacagtcatctaaccaaagtgatctagtgtgatagatcgaaattaacatatttttgaccatggaaggaaataaggaaattcaacccaaatttcccaagacggctgaaagacaggttttttggaaactgttaagataaactgtaatccagacacctaattcttcagttcactactcatgtgatactgattcccacattaaggttgaacaacatggctcagagtcttgttcaagagaaagtgatcaccgagctgtcacatcagcaaatatgtagtcaaggcagccaggccaactagaccacacttattggtctagtttgtccgttttatatgacattgaaaacttgtgtgtgcaacttttgggggacaggaatcacttaaaatcatatttatttggctttttatttaaaggattctgtcacaagtcttattgaaaagtagattttttaaaaaaaaaaaatcttagtccctgttatccagtaggggtgggtatttgggtccgactgagacttggcctgtgaccatcatggcagttggagttctcatatagaggtgaccagtttgccatgtggatataatttagtagatatttgacagtttgtgtaggtatttgagggaaaaaactcaatgtttggcttttttattatggccactcgagtcaggatgctctatttataaagataaatgtaatat

SEQ ID NO: 115231 - DNA, 1092 bp, Artificial Sequence
  derived and/or modified sequence
atgttcagtgactgctggctgtgccccagcctgggcagcagcggcatccagatgtacctgtgcaaccgggagcactacggctacctgcccatccccctgaagccccaccagaccctgcaggaggacatcgagaacctgatccacgtgcagatcgaggccatgattgaccggccccccatggagcccagccagtatgtgtctgtggtgcccaagtacccagacaagatgggctttgatgagatcttcatgatcaacctgaagaggaggaaggaccggcgggacaggatgctgcggaccctgtatgagcaggagattgaggtgaagatcgtggaggccgtggatggcaaggccctgaacaccagccagctgaaggccctgaacatcgagatgctgcccggctacagagacccctacagcagccggcccctgaccagaggagagatcggctgcttcctgagccactacagcgtgtggaaggaggtgattgaccgggagctggagaagaccctggtgattgaagatgatgtgcgctttgagcaccagttcaagaagaagctgatgaagctgatggacaacatcgaccaggcccagctggactgggagctgatctacatcggcaggaagaggatgcaggtgaaggagcctgagaaggctgtgcccaacgtggccaacctggtggaggccgactacagctactggaccctgggctacgtgatcagcctggagggcgcccagaagctggtgggcgccaacccctttgggaagatgctgcctgtggatgagttcctgcctgtgatgtacaacaagcaccctgtggccgagtacaaggagtactatgagagccgggacctgaaggccttctctgctgagcccctgctgatctaccccacccactacacaggccagcccggctacctgagtgacacagagaccagcaccatctgggacaatgaaacagtggccacagactgggacaggacccacgcctggaagagcaggaagcagagccgcatctacagcaatgccaagaacacagaggccctgcccccacccaccagcctggacacagtgcccagcagagatgagctgtag

SEQ ID NO: 115232 - DNA, 1092 bp, Artificial Sequence
  derived and/or modified sequence
atgttcagcgactgctggctgtgccccagcctgggcagcagcggcattcagatgtacctatgcaatcgcgaacattatggatacttacccatcccgctcaagccccaccagacacttcaggaggatatcgaaaacctcattcacgtccagatagaggccatgatagatcgtccccccatggaaccttcacagtatgtgagtgtggtcccgaagtatcccgacaaaatgggcttcgacgaaatttttatgatcaatttgaagcgcaggaaggatagaagagatcgaatgctgcgcactctgtatgagcaggagatcgaagttaagatagtagaagccgtggatgggaaggctctgaacacctctcagctgaaggccttgaacattgaaatgctgcctgggtaccgcgacccttacagcagtcggccactgacccgaggagaaattggctgctttctctcccactattccgtctggaaagaggtaatagaccgagagctcgaaaagacccttgttattgaggacgatgtcaggtttgaacatcagttcaagaagaagctcatgaagctgatggacaacatagatcaggcacagctggactgggagctgatctatatcggcagaaagagaatgcaggttaaagaacctgagaaagcagtgcccaacgttgctaacctggtggaggccgattacagctactggacgctgggctacgtgatctctctcgagggggcgcagaagctggtgggcgcgaatccttttggcaaaatgcttcctgtagatgagtttctccctgtgatgtataacaagcatcccgtggccgagtacaaagagtattatgaatcccgggacctcaaagcattttctgcggaacctcttcttatctaccctacccactacacgggtcagccaggatacctgtctgatactgagacatcaacaatttgggataacgaaacagtcgctacagattgggacaggactcatgcgtggaaaagtcgcaaacaaagcagaatctattccaatgccaagaacacagaagcccttcccccacccacgagcctcgataccgttccatctagggatgaactttag

SEQ ID NO: 115233 - DNA, 1092 bp, Artificial Sequence
  derived and/or modified sequence
atgttctctgattgctggttgtgcccgtctctcgggtcgtccggcatccagatgtacctgtgcaacagagaacactatggctatctgccaattcccctcaaaccccaccagaccctgcaggaagatattgaaaacctcattcacgtgcaaattgaggcaatgattgaccggccaccgatggaaccgtcacaatatgtgtcagtggtgccaaaatatccagataaaatgggctttgacgaaatattcatgatcaatctcaagaggagaaaagataggagggacaggatgctacgcacactctatgagcaggagattgaagtgaagatcgttgaagccgtggatgggaaagcactcaacactagccagctcaaggcccttaacatcgagatgctgcccggatacagggatccatactctagtaggccactgacacgcggagagattggctgcttcttaagtcactacagcgtctggaaagaggttatagatcgtgaattggagaaaaccctcgtgattgaagatgatgttagattcgaacaccagtttaagaagaaactcatgaagctgatggacaacattgaccaagcccaactggattgggaattaatatacattggtcgtaagcggatgcaggttaaagaaccggaaaaggccgtgcccaacgtcgcaaatctagtggaggccgactactcatactggactctgggttacgtgatctccttagagggagctcagaagctggtgggtgctaatccttttggcaagatgctgcctgtggatgaatttctgccagtgatgtacaataagcacccggtggcagagtataaggaatactacgaaagcagagatctaaaagcgttttcagcagaacctcttttgatttatccaacgcactacacaggtcagccaggctacctctctgatacagaaactagtaccatatgggataatgagaccgtggcaacagactgggatcggactcatgcctggaagtctcgcaaacaatcccggatatattcaaacgctaagaatactgaagccctcccacctccaacctcactggacacagttccgagcagggacgagttatag

SEQ ID NO: 115234 - protein, 453 aa, Artificial Sequence
  derived and/or modified sequence
MSLSARRVTLPAITPIILQKRVIKVYSEDETSRALDVPSDITARDVCQLLILKNHYIDDHSWTLFEHLPHIGVERTIEDHELVIEVLSNWGIEEENKLYFRKNYAKYEFFKNPMYFFPEHMVSFATETNGEISPTQILQMFLSSSTYPEIHGFLHAKEQGKKSWKKIYFFLRRSGLYFSTKGTSKEPRHLQFFSEFGNSDIYVSLAGKKKHGAPTNYGFCFKPNKAGGPRDLKMLCAEEEQSRTCWVTAIRLLKYGMQLYQNYMHPYQGRSGCSSQSISPMRSISENSLVAMDFSGQKSRVIENPTEALSVAVEEGLAWRKKGCLRLGTHGSPTASSQSSATNMAIHRSQPWFHHKISRDEAQRLIIQQGLVDGVFLVRDSQSNPKTFVLSMSHGQKIKHFQIIPVEDDGEMFHTLDDGHTRFTDLIQLVEFYQLNKGVLPCKLKHYCARIAL

SEQ ID NO: 115235 - DNA, 1362 bp, Artificial Sequence
  derived and/or modified sequence
atgtctttgtcagcaagaagggtaacactgcctgcaattaccccaattatcttacagaagcgggttattaaggtgtactcagaggacgagacaagccgagctctcgacgtgcccagcgacattacagcaagagatgtgtgtcagctccttattttgaagaaccactatattgatgatcattcatggacgctcttcgaacatcttccccatatcggcgtggagaggaccatcgaagaccatgaacttgttatcgaagtcctctcaaattggggcatcgaggaggagaacaaactctactttaggaagaattacgctaagtatgaatttttcaaaaatccaatgtacttttttccagagcacatggtttcctttgcaaccgagactaacggagagatctccccaactcagatcttgcagatgtttttgtcctcatcgacctaccctgagatacacgggttcctgcacgccaaagaacagggcaagaaatcctggaagaagatatactttttcctacggcgctccgggctgtacttttcgaccaagggtaccagtaaggaaccacgccatctgcagttcttttcagaatttggtaattcggacatatacgtgtctttggccggaaaaaagaaacatggagcacctactaattacgggttctgcttcaagccaaacaaagctgggggcccacgggatctcaaaatgttgtgcgcggaagaagagcagtcaaggacctgctgggttacggccatccggctcttgaaatacggcatgcagttgtaccagaattacatgcacccttaccagggacggtccggatgctcctcccagtccatcagccccatgcggagtatctccgagaactccctggtggcaatggacttctcaggtcagaagagccgcgtcatagagaatcctaccgaggccctatcggtcgctgttgaagagggtctcgcttggcggaaaaagggatgcttgcggcttggaacccacggctcccccacggcctccagtcagagctcagctactaatatggctatccacagaagtcaaccttggttccaccacaaaattagcagggatgaggctcagaggcttatcatacaacagggcctggtggacggtgtgtttttagtgcgcgattcccagtcgaaccccaaaacattcgtgctgagcatgagccatgggcagaagattaagcacttccagataatccctgtggaggacgatggcgaaatgttccacactctcgacgacggacatactcgttttacagatttgattcagttggtggagttctatcagcttaacaagggtgtgctgccttgtaagctgaagcattactgcgcccgaatcgcactgtag

SEQ ID NO: 115236 - DNA, 1693 bp, Artificial Sequence
  derived and/or modified sequence
attactttcctagttgtttcattgcactgagccctgagattcccaaggagtaaccataaaagatttcttttattttgtccatgacctacgagacaggatcattctaagaagagcaggcatgagtttgagtgcaagaagagtcactctgcctgcaataacgccaataattctacagaaaagggtgattaaagtatacagtgaagatgaaaccagcagggctttagatgtacccagtgacataacggctcgagatgtttgtcagctgttgatcctgaagaatcattacattgatgaccacagctggaccctttttgagcacctgcctcacataggtgtagaaagaacaatagaagaccacgaactggtgattgaagtgctatccaactgggggatagaagaagaaaacaaactatactttagaaaaaattatgccaaatatgagttctttaaaaacccaatgtatttttttccagagcatatggtatcttttgcaactgaaaccaatggtgaaatatcccccacacagattttgcagatgtttctgagttcaagcacatatcctgaaattcatggtttcttacatgcgaaagaacagggaaagaagtcttggaaaaaaatttacttttttctaagaagatctggtttatatttttctactaaaggaacatcaaaggaaccgcggcatttgcagtttttcagcgaatttggcaatagtgatatttatgtgtcactggcaggcaaaaaaaaacatggagcaccgactaactatggattctgctttaagcctaacaaagcgggagggccccgagacctgaaaatgctctgtgcagaagaagagcagagtaggacgtgctgggtgaccgcgattagattgcttaagtatggcatgcagctgtaccagaattatatgcatccatatcaaggtagaagtggctgcagttcacagagcatatcacctatgagaagtatatcagagaattccctggtagcaatggacttctcaggccagaaaagcagagttatagaaaatcccactgaagccctttcagttgcggttgaagaaggactcgcttggaggaaaaaaggatgtttacgcctgggcactcacggtagccccactgcctcttcacagagctctgccacaaacatggctatccaccggtcccagccatggtttcaccacaaaatttctagagatgaggctcagcgattgattattcagcaaggacttgtggatggagttttcttggtacgggatagtcagagtaaccccaaaactttcgtactgtcaatgagtcatggacaaaaaataaagcactttcaaattataccagtagaagatgacggtgaaatgttccacacactggatgatggccacacaagatttacagatctaatacagctggtggagttctatcaactcaataagggcgttcttccttgcaagttgaaacattattgtgctaggattgctctctagacaagccagaagtgacttattaaactattgaaggaaaaggactcaagaaaaataataaaagaccataaataagggcgaaaacattaccatgtgaaaagaatgtatttcacctgcaagttacaaaaaaatagtttgtgcattgcaaataagcaaagacttggattgactttacattcatcatttaaaattcattagttaaaattaaaccttagg

SEQ ID NO: 115237 - DNA, 1362 bp, Artificial Sequence
  derived and/or modified sequence
atgagcctgagcgcccggcgggtgaccctgcctgccatcacccccatcatcctgcagaagagggtcatcaaggtgtacagtgaagatgagaccagccgggccctggatgtgcccagcgacatcacagccagagatgtgtgccagctgctgatcctgaagaaccactacattgatgaccacagctggaccctgtttgagcacctgccccacatcggcgtggagaggaccatcgaggaccacgagctggtgattgaggtgctgagcaactggggcatcgaggaggagaacaagctgtacttcaggaagaactatgccaagtatgagttcttcaagaaccccatgtacttcttccctgagcacatggtgtcctttgccacagagaccaatggagagatcagccccacccagatcctgcagatgttcctgagcagcagcacctacccagagatccacggcttcctgcacgccaaggagcagggcaagaagtcctggaagaagatctacttcttcctgcggcgcagcggcctgtacttcagcaccaagggcaccagcaaggagcccaggcacctgcagttcttcagcgagtttggaaacagcgacatctacgtgtccctggccggcaagaagaagcatggagcccccaccaactacggcttctgcttcaagcccaacaaggccggcggcccccgggacctgaagatgctgtgtgccgaggaggagcagagcaggacctgctgggtgacagccatccggctgctgaagtatggcatgcagctgtaccagaactacatgcacccctaccagggccgcagcggctgcagcagccagagcatcagccccatgaggagcatcagcgagaacagcctggtggccatggacttcagcggccagaagagccgggtgattgagaaccccacagaggccctgtctgtggccgtggaggagggcctggcctggaggaagaagggctgcctgcggctgggcacccacggcagccccacagccagcagccagagcagcgccaccaacatggccatccacaggagccagccctggttccaccacaagatcagcagagatgaggcccagaggctcatcatccagcagggcctggtggatggagtcttcctggtgcgggacagccagagcaaccccaagacctttgtgctgtccatgagccacggccagaagatcaagcacttccagatcatccctgtggaggatgatggagagatgttccacaccctggatgatggccacacccgcttcacagacctgatccagctggtggagttctaccagctgaacaagggcgtgctgccctgcaagctgaagcactactgtgccagaattgccctgtag

SEQ ID NO: 115238 - DNA, 1362 bp, Artificial Sequence
  derived and/or modified sequence
atgagcctgagcgcccggcgggtgaccctgcccgccatcacccccataattctccagaagcgggtgattaaggtgtactctgaggatgaaacaagtagagctcttgacgtgccttcagacattacagcaagagatgtgtgtcagctactgatactgaaaaatcactatatcgacgaccacagctggacgctgttcgagcacttgccccatatcggcgttgagaggacaattgaggaccacgagcttgtgattgaggtgctgagtaactgggggatcgaggaagaaaataaactgtactttcgcaaaaattatgccaaatacgagttttttaagaatcctatgtatttctttcccgagcacatggtgtcatttgccaccgagactaatggagaaatatctcctacccagatacttcagatgttcctctcgtcaagtacatatccggagattcacggcttccttcacgccaaggaacaaggaaaaaagagttggaagaagatctacttctttttgcgtagaagcggtctctacttctcaaccaagggtacttctaaagaacctagacacctgcaattcttctccgaattcggcaatagtgacatctatgtcagtctagcggggaagaagaaacatggggccccaaccaactatggcttctgttttaagcccaacaaggccggcggccccagggacttaaagatgctgtgtgctgaggaagagcaaagtcgaacatgttgggtcaccgccatccgactgctgaagtacggcatgcagctgtatcagaattatatgcacccttatcaagggcggagtgggtgctcctctcagagcatttctccgatgagatccatcagcgaaaacagccttgtagccatggactttagcggtcagaaatccagagtgattgagaaccctacagaggctttgtccgtcgctgttgaggaaggcctcgcatggcgaaaaaagggctgcctgcgtctagggacgcacggcagccccacagcctcttcacaatctagcgccaccaatatggcaattcaccgcagccagccatggtttcatcacaaaatatccagggacgaagcacagagactcataattcagcaagggctcgtcgatggggttttcctggtgcgggattctcagtcaaaccctaaaacattcgtgctgtcaatgagccacggccagaagatcaagcactttcaaattattccagtagaagacgatggggaaatgttccatactctcgacgatggccacacacggttcactgacctgattcagctggtggagttttatcagctaaataagggcgtgctcccgtgcaagctaaagcactactgtgcccgaatcgcactgtag

SEQ ID NO: 115239 - DNA, 1362 bp, Artificial Sequence
  derived and/or modified sequence
atgtccctcagtgccaggcgtgtgacacttccggctattacgccaatcatcttacagaagcgggtgattaaggtttacagtgaagatgagacatcaagggccctggatgttccgtcagatatcacggcccgagacgtgtgtcagttacttattctgaaaaaccactacatcgatgaccactcttggaccctgttcgagcatctccctcatatcggggtcgaacgtacaatagaggaccacgaactggtgatcgaggttctttccaattggggtattgaagaagaaaataagctctacttccgcaaaaactatgccaagtatgagttttttaagaatcctatgtacttcttccctgaacacatggtcagctttgctacagaaacaaatggcgagataagtcccacacaaatcttgcaaatgttcctgtcatcctccacataccctgaaatccatgggtttctgcatgccaaggagcagggtaagaaatcttggaaaaaaatctacttttttctcaggcgaagcgggctgtacttcagtaccaagggaacctccaaggaaccccgtcacctgcagttcttcagcgaatttggaaattccgatatttacgtatctctcgcaggtaagaagaaacatggagctcctacgaattacggcttttgcttcaagcctaacaaggcaggaggtcccagggatcttaaaatgctatgcgctgaagaagagcagtcaaggacatgttgggtcacggccatccgactcttgaaatacgggatgcagttatatcagaactacatgcacccttatcaaggcaggtctggctgtagctctcaatccatcagtccgatgaggtctataagcgagaacagcctggtggcaatggacttcagcggccaaaagtcgagagtgattgaaaatccaactgaggccctgagtgtcgcagtcgaagagggtctcgcgtggaggaaaaaaggctgtctccggctgggaacccatggaagtccgaccgctagctcccaaagctctgccaccaacatggccattcatcggtctcagccttggttccatcacaagatctctcgcgatgaggcccagaggctgatcatacagcagggactcgtagacggcgtgtttctggttagggatagccaatcaaacccgaagacttttgtccttagcatgtctcacgggcaaaagattaagcatttccagatcatacctgttgaggatgatggcgaaatgtttcacactttggacgatggccacactaggttcactgacttgattcagttggttgaattctatcagctgaacaagggtgtgctcccttgcaagttgaaacattattgtgctcgcattgcactgtag

SEQ ID NO: 115240 - DNA, 1362 bp, Artificial Sequence
  derived and/or modified sequence
atgagcctgagcgccagaagagtgaccctgcccgccatcacccccatcatcctgcagaagagagtgatcaaggtgtacagcgaggacgagaccagcagagccctggacgtgcccagcgacatcaccgccagagacgtgtgccagctgctgatcctgaagaaccactacatcgacgaccacagctggaccctgttcgagcacctgccccacatcggcgtggagagaaccatcgaggaccacgagctggtgatcgaggtgctgagcaactggggcatcgaggaggagaacaagctgtacttcagaaagaactacgccaagtacgagttcttcaagaaccccatgtacttcttccccgagcacatggtgagcttcgccaccgagaccaacggcgagatcagccccacccagatcctgcagatgttcctgagcagcagcacctaccccgagatccacggcttcctgcacgccaaggagcagggcaagaagagctggaagaagatctacttcttcctgagaagaagcggcctgtacttcagcaccaagggcaccagcaaggagcccagacacctgcagttcttcagcgagttcggcaacagcgacatctacgtgagcctggccggcaagaagaagcacggcgcccccaccaactacggcttctgcttcaagcccaacaaggccggcggccccagagacctgaagatgctgtgcgccgaggaggagcagagcagaacctgctgggtgaccgccatcagactgctgaagtacggcatgcagctgtaccagaactacatgcacccctaccagggcagaagcggctgcagcagccagagcatcagccccatgagaagcatcagcgagaacagcctggtggccatggacttcagcggccagaagagcagagtgatcgagaaccccaccgaggccctgagcgtggccgtggaggagggcctggcctggagaaagaagggctgcctgagactgggcacccacggcagccccaccgccagcagccagagcagcgccaccaacatggccatccacagaagccagccctggttccaccacaagatcagcagagacgaggcccagagactgatcatccagcagggcctggtggacggcgtgttcctggtgagagacagccagagcaaccccaagaccttcgtgctgagcatgagccacggccagaagatcaagcacttccagatcatccccgtggaggacgacggcgagatgttccacaccctggacgacggccacaccagattcaccgacctgatccagctggtggagttctaccagctgaacaagggcgtgctgccctgcaagctgaagcactactgcgccagaatcgccctgtag

SEQ ID NO: 115241 - protein, 485 aa, Artificial Sequence
  derived and/or modified sequence
MNEYPKKRKRKTLHPSRYSDSSGISRIADGFNGIFSDHCYSVCSMRQPDLKYFDNKDDDSDTETSNDLPKFADGIKARNRNQNYLVPSPVLRILDHTAFSTEKSADIVICDEECDSPESVNQQTQEESPIEVHTAEDVPIAVEVHAISEDYDIETENNSSESLQDQTDEEPPAKLCKILDKSQALNVTAQQKWPLLRANSSGLYKCELCEFNSKYFSDLKQHMILKHKRTDSNVCRVCKESFSTNMLLIEHAKLHEEDPYICKYCDYKTVIFENLSQHIADTHFSDHLYWCEQCDVQFSSSSELYLHFQEHSCDEQYLCQFCEHETNDPEDLHSHVVNEHACKLIELSDKYNNGEHGQYSLLSKITFDKCKNFFVCQVCGFRSRLHTNVNRHVAIEHTKIFPHVCDDCGKGFSSMLEYCKHLNSHLSEGIYLCQYCEYSTGQIEDLKIHLDFKHSADLPHKCSDCLMRFGNERELISHLPVHETT

SEQ ID NO: 115242 - protein, 288 aa, Artificial Sequence
  derived and/or modified sequence
MNEYPKKRKRKTLHPSRYSDSSGISRIADGFNGIFSDHCYSVCSMRQPDLKYFDNKDDDSDTETSNDLPKFADGIKARNRNQNYLVPSPVLRILDHTAFSTEKSADIVICDEECDSPESVNQQTQEESPIEVHTAEDVPIAVEVHAISEDYDIETENNSSESLQDQTDEEPPAKLCKILDKSQALNVTAQQKWPLLRANSSGLYKCELCEFNSKYFSDLKQHMILKHKRTDSNVCRVCKESFSTNMLLIEHAKLHEEDPYICKYCDYKTVIFENLSQHIADTHFSDHL

SEQ ID NO: 115243 - protein, 137 aa, Artificial Sequence
  derived and/or modified sequence
MNEYPKKRKRKTLHPSRYSDSSGISRIADGFNGIFSDHCYSVCSMRQPDLKYFDNKDDDSDTETSNDLPKFADGIKARNRNQNYLVPSPVLRILDHTAFSTEKSADIVICDEECDSPESVNQQTQEESPIEVHTAED

SEQ ID NO: 115244 - protein, 216 aa, Artificial Sequence
  derived and/or modified sequence
MNEYPKKRKRKTLHPSRYSDSSGISRIADGFNGIFSDHCYSVCSMRQPDLKYFDNKDDDSDTETSNDLPKFADGIKARNRNQNYLVPSPVLRILDHTAFSTEKSADIVICDEECDSPESVNQQTQEESPIEVHTAEDVPIAVEVHAISEDYDIETENNSSESLQDQTDEEPPAKLCKILDKSQALNVTAQQKWPLLRANSSGLYKCELCEFNSKYF

SEQ ID NO: 115245 - protein, 130 aa, Artificial Sequence
  derived and/or modified sequence
MNEYPKKRKRKTLHPSRYSDSSGISRIADGFNGIFSDHCYSVCSMRQPDLKYFDNKDDDSDTETSNDLPKFADGIKARNRNQNYLVPSPVLRILDHTAFSTEKSADIVICDEECDSPESVNQQTQEESPI

SEQ ID NO: 115246 - DNA, 3013 bp, Artificial Sequence
  derived and/or modified sequence
caacgagttgtagccgcggagagcaggcgtcgatgctggcgcccaaagcctccagcctgagagtcgcctcactcgtgtgacgacagagtttcactcctgttacccaggctggaggacagtgatgtgatctcgggtcaccacaacctccgcctcccggattcaggcgattctcatgcctcagcctcccgagtagctcagattacaggcatgtgccaccacgcccggctaattttgtattttcagtcgagacggggtttccccatgttggtcaggctggtcttgaattcccgacctcaggtgatctgttcgcctcggcctcccaaagtgctgggattacaggcgtgaaccactgcacccggcgaggcattttttactgtctacagaaacttattgtaattcatttttcctcactccagtagtaagaattataccaaattgaaaagatatgaatgagtatcctaaaaaaagaaaaaggaagactctacacccttctcgttattcagattcctctggaataagcagaattgcagatggattcaatggaattttctctgatcattgttacagtgtctgttctatgagacagccagatttaaaatattttgacaacaaagatgatgattctgataccgagacgtcaaatgacttgccaaaatttgcagatggaatcaaggccagaaacagaaatcagaactacctggttcccagtcctgtacttagaattctagaccacactgccttttctacagaaaaatctgctgatattgtaatttgtgatgaagagtgtgactcacctgaatcagtcaaccagcaaacccaagaggagagtcctatagaagttcacactgctgaagatgttccaattgctgtagaagtgcatgcgatttctgaggattatgatatagagacagaaaacaattcctctgagagtctccaagaccaaactgatgaagaaccgccagctaaactttgtaaaattcttgacaagagccaagctttgaatgtgactgcccagcagaaatggcctttactgagagctaatagcagtggcctctataaatgtgaactttgtgagtttaacagcaaatatttttctgacttaaagcagcatatgatcctgaagcataaacgtactgattcaaatgtgtgtcgagtatgcaaggaaagtttctctaccaatatgcttctgatagaacatgccaaactgcatgaagaggatccctacatttgtaaatactgtgattataagacagtaatttttgagaacctcagccagcacattgcagacacccattttagtgatcacctctattggtgtgaacagtgtgatgtacagttctcctcaagcagtgaactctacctacatttccaggagcacagctgtgatgaacagtacttgtgtcagttctgtgaacatgaaactaatgatccagaagacttgcatagccatgtggtaaatgagcatgcatgtaaattaatagagttaagtgataagtataacaatggtgaacatggacaatatagcctcttaagcaaaattacctttgacaaatgtaaaaacttctttgtatgtcaagtatgtggttttcggagtagacttcacacaaatgttaacaggcatgttgctattgaacatacaaaaatttttcctcatgtttgtgatgactgtgggaaaggcttttcaagtatgctagaatattgcaagcatttaaattcacatttatctgaagggatttatttatgtcaatattgtgaatattcaacaggacaaattgaagatcttaaaattcatctagatttcaagcattcagctgacttgcctcataaatgtagtgactgcttgatgaggtttggaaatgaaagggaattaataagtcaccttccagtccatgagacaacttgattattctctttaacttacagaatgttagtttaaaataataaattcatcctttttttggagatgattaaatggatgattgtaaacacaacttatgaaatctgcctttaacaagtaacttttttaaattataaaattttattggcattgctccattttctgtatataaatatatctttaatgtggtattttcaattgcgtgatagtttgtagtttcaaccactcttggtgactgtcatcctgtttcttccatattctctgatttcatgaattgaaaagaaacaaatgtattgaagaagtgagctacagttttccttccttaaccatgggtgctagtaactttttaaaactcaagacaagattagttttttatgtgtgaagtcattaaattattacacgaccagaactaaaatgcaatatacagttaagtccacggatactcccattaatgagaaataacactaggaagccactattacaggaagaaaagatttggttttcatggcagtctgtttttttaaaaaaaaatttttgagccactatctattgttgaatattttaagatgggatgagggaggaactaataagggcttacacaataaaaaataactatatcataactcattcataacttgatgtttcattttctgttgaggaaccataaattcattcacagacttaatatttttttcttagagatggtctcgttctgttgtccaggatggagtgcagtggttgatcatagctcccgggccgtagtctcccaggctcgagcaatcctcccacttcaccctcctgcatagctaggactacaggcatgtggcaccatgcccgctaagtttttaaatttcttgtagagatgagatctcgctatgttgcccaggccagtctcaaactcctggactcaagcaatcctcccaccttggccttccaaatcactgggattataggcatgagccattatgcctgactcttgcccaaatttctgatgtcaaattgttcattgacagaaaacccactgaagtatttaaagttaggaagatctgggagataggggttgctggcatgaaaatgtataacttacaacatttattaataaaatgataaattagc

SEQ ID NO: 115247 - DNA, 1458 bp, Artificial Sequence
  derived and/or modified sequence
atgaacgagtaccccaagaagagaaagagaaagaccctgcaccccagcagatacagcgacagcagcggcatcagcagaatcgccgacggcttcaacggcatcttcagcgaccactgctacagcgtgtgcagcatgagacagcccgacctgaagtacttcgacaacaaggacgacgacagcgacaccgagaccagcaacgacctgcccaagttcgccgacggcatcaaggccagaaacagaaaccagaactacctggtgcccagccccgtgctgagaatcctggaccacaccgccttcagcaccgagaagagcgccgacatcgtgatctgcgacgaggagtgcgacagccccgagagcgtgaaccagcagacccaggaggagagccccatcgaggtgcacaccgccgaggacgtgcccatcgccgtggaggtgcacgccatcagcgaggactacgacatcgagaccgagaacaacagcagcgagagcctgcaggaccagaccgacgaggagccccccgccaagctgtgcaagatcctggacaagagccaggccctgaacgtgaccgcccagcagaagtggcccctgctgagagccaacagcagcggcctgtacaagtgcgagctgtgcgagttcaacagcaagtacttcagcgacctgaagcagcacatgatcctgaagcacaagagaaccgacagcaacgtgtgcagagtgtgcaaggagagcttcagcaccaacatgctgctgatcgagcacgccaagctgcacgaggaggacccctacatctgcaagtactgcgactacaagaccgtgatcttcgagaacctgagccagcacatcgccgacacccacttcagcgaccacctgtactggtgcgagcagtgcgacgtgcagttcagcagcagcagcgagctgtacctgcacttccaggagcacagctgcgacgagcagtacctgtgccagttctgcgagcacgagaccaacgaccccgaggacctgcacagccacgtggtgaacgagcacgcctgcaagctgatcgagctgagcgacaagtacaacaacggcgagcacggccagtacagcctgctgagcaagatcaccttcgacaagtgcaagaacttcttcgtgtgccaggtgtgcggcttcagaagcagactgcacaccaacgtgaacagacacgtggccatcgagcacaccaagatcttcccccacgtgtgcgacgactgcggcaagggcttcagcagcatgctggagtactgcaagcacctgaacagccacctgagcgagggcatctacctgtgccagtactgcgagtacagcaccggccagatcgaggacctgaagatccacctggacttcaagcacagcgccgacctgccccacaagtgcagcgactgcctgatgagattcggcaacgagagagagctgatcagccacctgcccgtgcacgagaccacctag

SEQ ID NO: 115248 - DNA, 867 bp, Artificial Sequence
  derived and/or modified sequence
atgaacgagtaccccaagaagagaaagagaaagaccctgcaccccagcagatacagcgacagcagcggcatcagcagaatcgccgacggcttcaacggcatcttcagcgaccactgctacagcgtgtgcagcatgagacagcccgacctgaagtacttcgacaacaaggacgacgacagcgacaccgagaccagcaacgacctgcccaagttcgccgacggcatcaaggccagaaacagaaaccagaactacctggtgcccagccccgtgctgagaatcctggaccacaccgccttcagcaccgagaagagcgccgacatcgtgatctgcgacgaggagtgcgacagccccgagagcgtgaaccagcagacccaggaggagagccccatcgaggtgcacaccgccgaggacgtgcccatcgccgtggaggtgcacgccatcagcgaggactacgacatcgagaccgagaacaacagcagcgagagcctgcaggaccagaccgacgaggagccccccgccaagctgtgcaagatcctggacaagagccaggccctgaacgtgaccgcccagcagaagtggcccctgctgagagccaacagcagcggcctgtacaagtgcgagctgtgcgagttcaacagcaagtacttcagcgacctgaagcagcacatgatcctgaagcacaagagaaccgacagcaacgtgtgcagagtgtgcaaggagagcttcagcaccaacatgctgctgatcgagcacgccaagctgcacgaggaggacccctacatctgcaagtactgcgactacaagaccgtgatcttcgagaacctgagccagcacatcgccgacacccacttcagcgaccacctgtag

SEQ ID NO: 115249 - DNA, 414 bp, Artificial Sequence
  derived and/or modified sequence
atgaacgagtaccccaagaagagaaagagaaagaccctgcaccccagcagatacagcgacagcagcggcatcagcagaatcgccgacggcttcaacggcatcttcagcgaccactgctacagcgtgtgcagcatgagacagcccgacctgaagtacttcgacaacaaggacgacgacagcgacaccgagaccagcaacgacctgcccaagttcgccgacggcatcaaggccagaaacagaaaccagaactacctggtgcccagccccgtgctgagaatcctggaccacaccgccttcagcaccgagaagagcgccgacatcgtgatctgcgacgaggagtgcgacagccccgagagcgtgaaccagcagacccaggaggagagccccatcgaggtgcacaccgccgaggactag

SEQ ID NO: 115250 - DNA, 651 bp, Artificial Sequence
  derived and/or modified sequence
atgaacgagtaccccaagaagagaaagagaaagaccctgcaccccagcagatacagcgacagcagcggcatcagcagaatcgccgacggcttcaacggcatcttcagcgaccactgctacagcgtgtgcagcatgagacagcccgacctgaagtacttcgacaacaaggacgacgacagcgacaccgagaccagcaacgacctgcccaagttcgccgacggcatcaaggccagaaacagaaaccagaactacctggtgcccagccccgtgctgagaatcctggaccacaccgccttcagcaccgagaagagcgccgacatcgtgatctgcgacgaggagtgcgacagccccgagagcgtgaaccagcagacccaggaggagagccccatcgaggtgcacaccgccgaggacgtgcccatcgccgtggaggtgcacgccatcagcgaggactacgacatcgagaccgagaacaacagcagcgagagcctgcaggaccagaccgacgaggagccccccgccaagctgtgcaagatcctggacaagagccaggccctgaacgtgaccgcccagcagaagtggcccctgctgagagccaacagcagcggcctgtacaagtgcgagctgtgcgagttcaacagcaagtacttctag

SEQ ID NO: 115251 - DNA, 393 bp, Artificial Sequence
  derived and/or modified sequence
atgaacgagtaccccaagaagagaaagagaaagaccctgcaccccagcagatacagcgacagcagcggcatcagcagaatcgccgacggcttcaacggcatcttcagcgaccactgctacagcgtgtgcagcatgagacagcccgacctgaagtacttcgacaacaaggacgacgacagcgacaccgagaccagcaacgacctgcccaagttcgccgacggcatcaaggccagaaacagaaaccagaactacctggtgcccagccccgtgctgagaatcctggaccacaccgccttcagcaccgagaagagcgccgacatcgtgatctgcgacgaggagtgcgacagccccgagagcgtgaaccagcagacccaggaggagagccccatctag

SEQ ID NO: 115252 - DNA, 1458 bp, Artificial Sequence
  derived and/or modified sequence
atgaacgaatatcctaagaaacgtaaaaggaagacactccatccatcacgatatagtgactccagtggtatttcccggattgctgacgggtttaacggtatcttctcagatcactgttacagtgtctgttcaatgcgccaacctgacctgaaatatttcgacaacaaagatgacgacagtgacactgaaactagcaacgacctgcccaaatttgctgacggcatcaaggctaggaataggaatcagaattatttggtcccatcccctgtcctgcgaatcttagaccacaccgctttcagtactgagaaaagcgccgacatagttatatgcgacgaagagtgtgactctcccgaatctgtgaaccagcagacacaagaggaatctcctatcgaagtccacacagctgaagacgtgcccatagccgtggaggttcacgcaatctcagaggattatgatatagagaccgagaataattcctcagaatccctgcaggatcagacggacgaagaacctcccgctaaactatgcaagattctcgataaatcgcaggccctgaacgtgactgcgcagcagaagtggcccctgttacgggccaactctagcgggctctacaagtgtgagctctgcgaattcaattcaaaatattttagtgatctaaagcagcacatgatactgaaacacaaacggaccgatagcaatgtgtgcagggtatgcaaggagtcgttctccaccaatatgctactgattgagcatgcaaagctccatgaagaggatccatacatctgcaaatattgtgactataagacagttattttcgaaaacctgagtcagcacatcgcagatacgcacttcagtgatcacctctattggtgcgagcagtgtgacgtccaattctcgtcgtcctctgaactgtacctgcattttcaggaacatagctgcgacgagcagtacctttgccagttttgcgaacacgaaacaaatgaccctgaggacctgcatagccacgtagtgaacgaacatgcctgtaagctgatcgagctcagcgacaaatacaataatggggagcacggacaatacagcctgctttcaaaaattaccttcgacaaatgtaaaaacttttttgtctgccaagtgtgcggattccgcagcagactccacaccaacgtgaacaggcacgtggctatcgaacataccaagattttcccgcacgtgtgtgatgactgcggaaaggggttctcttcaatgctcgagtactgtaaacacctgaactcacatctctctgagggcatttacctgtgccagtattgtgaatacagcaccggacagatcgaggacctcaaaattcacctcgattttaagcactcggcagacctgccccataagtgtagtgactgtcttatgcgttttgggaacgagcgggagttgattagtcacctacccgtgcatgagaccacatag

SEQ ID NO: 115253 - DNA, 867 bp, Artificial Sequence
  derived and/or modified sequence
atgaacgagtaccccaaaaaaagaaaacgcaagacgctccaccccagtagatattccgattcttctgggatcagccggattgctgacggctttaacggcatattttccgaccattgctactccgtgtgctccatgagacagccagacttgaagtactttgataataaggatgacgactcagatacagagacttctaacgacctcccaaagttcgccgatggcattaaggctcgtaaccggaaccagaactacctcgtaccctcgccagtgttgcggatccttgatcatacagccttttctacggagaagagcgctgacatcgttatttgcgacgaagagtgtgactcaccggaatcagtgaaccagcagacccaagaagagtcccccattgaggtacacaccgctgaagatgtccctatcgctgttgaagtgcatgcgatttccgaagactatgacattgaaactgaaaacaattcctccgaaagcctgcaggaccagaccgacgaggagcccccagcaaagctgtgcaagattctggataaatcccaagctctcaatgtgactgcccagcaaaagtggcctttgctcagagctaattcttcaggactctacaagtgtgaattgtgcgaattcaatagcaagtatttctctgacctgaagcagcacatgattctgaagcataagaggacggacagtaacgtgtgtagggtgtgcaaggaatctttctctacaaacatgttgctgattgaacacgctaagctgcatgaagaggacccatacatatgcaagtactgcgattataagacggtcatcttcgagaatctgagccagcacatcgcagatacacatttcagtgatcacctctag

SEQ ID NO: 115254 - DNA, 414 bp, Artificial Sequence
  derived and/or modified sequence
atgaacgagtaccccaagaaacggaagcgcaaaaccctccatccgagtaggtatagtgactccagtggcatctcgcgtattgcagatggcttcaatggcattttctcagaccattgttactccgtgtgtagcatgcgccaaccagacctgaaatatttcgataataaagacgacgactctgatactgaaacaagtaacgatcttcctaaattcgccgacggaattaaggcccgcaaccggaatcaaaattatctagttccttcacccgtcttacgcattctcgaccacacagcattctctacagaaaagagcgccgatatcgtgatatgcgacgaggaatgcgacagtcccgagtccgtcaaccaacaaacgcaggaggagtctcctattgaagtgcacaccgctgaggactag

SEQ ID NO: 115255 - DNA, 1458 bp, Artificial Sequence
  derived and/or modified sequence
atgaatgagtatcccaagaaacgaaagcgaaagactttacatccatcaagatacagcgatagttccggtatcagtcgaatcgcagacggttttaacgggatattctctgatcattgctattctgtgtgctctatgaggcagcctgacctgaagtacttcgacaataaagatgacgatagcgatacagagacctcgaatgatttacccaaattcgccgacggcattaaagcccggaatagaaaccaaaactatctggtcccaagtccagttctccggatattggatcatacggctttcagtacggaaaaatccgcagatatcgtgatttgcgatgaagaatgtgatagtcctgagtccgtaaaccaacagacgcaagaagaatctcctattgaggttcacacagccgaagatgtaccgatcgctgttgaagtgcacgctatctcagaggattatgacatcgagacagaaaataacagcagtgaatcgctccaagatcagactgatgaggaaccccctgccaaactgtgtaagatcctagacaagtcacaggcgctgaatgtgactgctcaacagaagtggccgcttctcagggccaacagctcaggcctctataaatgcgaactgtgtgagttcaactctaagtacttctcagacctcaaacaacacatgatcctgaaacacaagaggactgactctaatgtgtgtagggtgtgcaaagaatccttctccactaacatgctgctcattgagcacgccaaactgcatgaggaggacccttatatctgtaagtactgcgattataaaactgttatcttcgaaaacctgagccagcacattgccgatacacactttagcgatcatttatattggtgcgagcaatgtgacgtgcagttttcctcttcaagtgagctttacctccattttcaagagcactcatgtgatgaacagtatttgtgccagttttgcgagcatgagacaaatgaccctgaagaccttcactcacacgtggtcaatgagcatgcttgcaagctgattgagctctccgataaatacaataatggagagcatggccagtattccctgttatccaagattacttttgacaaatgcaagaatttcttcgtgtgccaggtgtgtggattccgctctcgactgcataccaatgtcaacagacacgtcgccatagaacataccaagattttcccacacgtgtgtgacgactgcggaaaggggttctcttcaatgctggaatattgcaagcatctaaatagtcacctgagcgaaggtatctatctatgccagtactgcgagtacagtacaggccagatcgaagatctcaagatacacctagactttaaacacagtgccgacttaccccacaaatgttctgattgtctcatgagattcgggaacgagcgcgagctgatctcacacctgccagtccatgagacaacctag

SEQ ID NO: 115256 - DNA, 651 bp, Artificial Sequence
  derived and/or modified sequence
atgaatgagtaccccaaaaaacgtaagcgtaagacactgcatcccagcagatattcggattcatccggaatttcacgtattgcagacggattcaatggtatcttctccgaccactgttacagtgtatgttccatgcggcagcccgatctaaagtacttcgacaacaaagatgacgattcagataccgagactagtaacgaccttcctaaatttgccgacggaatcaaagcgagaaataggaaccagaattacctggtaccttcaccggtgctgaggattctggatcacaccgctttctctacggagaagtctgcagacattgtgatatgtgacgaggaatgcgactctcccgaaagcgtgaaccagcagactcaggaagagagtcccatcgaagtgcacaccgcagaggatgtgcccatagctgtcgaagtgcacgctatcagtgaggactacgatatagagacagaaaataattctagtgagtctctgcaggaccaaacagacgaggaaccaccggcaaaactgtgtaaaattctggataagtcacaagctcttaacgtaacagcccaacagaagtggccgttgctgcgtgccaattcctcaggcttgtataagtgtgagctgtgcgagtttaacagtaagtacttctag

SEQ ID NO: 115257 - DNA, 393 bp, Artificial Sequence
  derived and/or modified sequence
atgaacgaataccctaagaaaaggaagagaaaaactctgcacccttccaggtactcggactcatctgggatctcacgcatagctgacgggttcaacggcattttcagcgaccattgttatagtgtctgtagtatgcgtcagcccgatctgaagtactttgacaacaaggatgatgattctgatactgaaactagcaacgatctgccaaaatttgccgacggaatcaaggcacggaaccggaaccagaactacctggtgcctagtccagtcttacgtatcctggaccataccgccttcagcaccgagaagtctgccgacatcgtcatctgtgacgaggagtgtgattccccggaaagtgtgaaccaacagacacaggaggagtctcccatctag

SEQ ID NO: 115258 - DNA, 1458 bp, Artificial Sequence
  derived and/or modified sequence
atgaacgaatatccaaagaagaggaagcggaagacactccacccttctcgttactctgattcctcaggcatttctcgcatagccgatggcttcaatggcatattcagcgatcattgttacagcgtgtgctccatgcgccaaccagacctcaagtatttcgataataaggacgacgattccgacacagaaacgtcgaacgatttgccaaaatttgcagacggaatcaaagctcgaaatcggaaccagaattacctggtgccaagcccagtcttgaggatcctcgatcacaccgccttctcaactgagaagagtgcagatatcgttatctgcgatgaagagtgcgactcaccagaatcagtcaaccagcagacccaggaggagtcccctatcgaagtgcataccgctgaggatgtacccatagctgtcgaggtccatgcaatctctgaggactacgatatcgagactgaaaataactctagtgaatcacttcaggatcagactgatgaagaaccacccgcaaaactttgtaaaatcctcgataagtctcaagctcttaatgtaaccgctcagcagaaatggccgcttctaagagctaattctagtggactgtacaaatgcgagctgtgtgaattcaacagcaaatacttttccgatctgaagcaacacatgatccttaaacataagcgcacggatagtaacgtgtgccgggtgtgtaaagagtctttttccacaaatatgttgctgattgagcacgcgaaactacatgaagaggacccctatatttgtaaatattgcgattataagaccgtgatttttgagaatctttcacaacacatcgccgacacgcacttctcagaccacctgtactggtgtgaacagtgcgacgtgcaattttcttccagctcagagctgtacctgcattttcaggagcacagctgcgatgaacagtatctgtgccagttctgcgaacatgagaccaatgatcccgaggatcttcactcccacgtggtgaatgagcacgcttgtaaactgatcgagctcagcgacaagtataacaacggagaacatgggcaatactcactcctgtctaaaatcacgttcgacaaatgtaaaaatttctttgtttgccaggtgtgtggctttcggagccggctccacacaaacgtcaacagacatgtggccattgaacacaccaagatcttcccacacgtctgcgacgactgcggcaagggattttcttccatgctggagtattgcaagcatttaaattcacatctatccgagggtatttacctgtgtcaatattgtgagtactcgaccggacagattgaagatttaaagattcatttggacttcaagcactcagcggacctcccacacaaatgttcagattgcctgatgaggtttggcaacgaacgcgaactgatttcgcatctgccggttcacgagaccacctag

SEQ ID NO: 115259 - DNA, 1458 bp, Artificial Sequence
  derived and/or modified sequence
atgaatgagtaccccaagaagaggaagaggaagaccctgcaccccagccgctacagcgacagcagcggcatcagcagaattgctgatggcttcaacggcatcttcagtgaccactgctacagcgtgtgcagcatgaggcagcctgacctgaagtactttgacaacaaggatgatgacagcgacacagagaccagcaatgacctgcccaagtttgctgatggcatcaaggccaggaacagaaaccagaactacctggtgcccagccctgtgctgcgcatcctggaccacacagccttcagcacagagaagtctgctgacatcgtcatctgtgatgaagaatgtgacagccctgagagcgtgaaccagcagacccaggaggagagccccatcgaggtgcacacagcagaagatgtgcccatcgctgtggaggtgcacgccatcagtgaagattatgacattgaaacagagaacaacagcagcgagagcctgcaggaccagacagatgaggagcccccagccaagctgtgcaagatcctggacaagagccaggccctgaatgtgacagcccagcagaagtggcccctgctgcgggccaacagcagcggcctgtacaagtgtgagctgtgtgagttcaacagcaagtacttcagtgacctgaagcagcacatgatcctgaagcacaagaggacagacagcaatgtgtgccgggtgtgcaaggagagcttcagcaccaacatgctgctgattgaacatgccaagctgcacgaggaggacccctacatctgcaagtactgtgactacaagacagtcatctttgagaacctgagccagcacatcgctgacacccacttcagtgaccacctgtactggtgtgagcagtgtgatgtgcagttcagcagcagcagcgagctgtacctgcacttccaggagcacagctgtgatgagcagtacctgtgccagttctgtgagcacgagaccaatgaccctgaggacctgcacagccacgtggtgaatgagcacgcctgcaagctgattgagctgagtgacaagtacaacaatggagagcacggccagtacagcctgctgagcaagatcacctttgacaagtgcaagaacttctttgtgtgccaggtgtgtggcttccgcagccggctgcacaccaacgtgaacagacatgtggccatcgagcacaccaagatcttcccccacgtgtgtgatgactgtgggaagggcttcagctccatgctggagtactgcaagcacctgaacagccacctgtctgagggcatctacctgtgccagtactgtgagtacagcacaggccagatcgaggacctgaagatccacctggacttcaagcacagcgctgacctgccccacaagtgcagcgactgcctgatgagatttggaaatgaaagagagctgatcagccacctgcctgtgcatgagaccacctag

SEQ ID NO: 115260 - DNA, 867 bp, Artificial Sequence
  derived and/or modified sequence
atgaatgagtaccccaagaagaggaagaggaagaccctgcaccccagccgctacagcgacagcagcggcatcagcagaattgctgatggcttcaacggcatcttcagtgaccactgctacagcgtgtgcagcatgaggcagcctgacctgaagtactttgacaacaaggatgatgacagcgacacagagaccagcaatgacctgcccaagtttgctgatggcatcaaggccaggaacagaaaccagaactacctggtgcccagccctgtgctgcgcatcctggaccacacagccttcagcacagagaagtctgctgacatcgtcatctgtgatgaagaatgtgacagccctgagagcgtgaaccagcagacccaggaggagagccccatcgaggtgcacacagcagaagatgtgcccatcgctgtggaggtgcacgccatcagtgaagattatgacattgaaacagagaacaacagcagcgagagcctgcaggaccagacagatgaggagcccccagccaagctgtgcaagatcctggacaagagccaggccctgaatgtgacagcccagcagaagtggcccctgctgcgggccaacagcagcggcctgtacaagtgtgagctgtgtgagttcaacagcaagtacttcagtgacctgaagcagcacatgatcctgaagcacaagaggacagacagcaatgtgtgccgggtgtgcaaggagagcttcagcaccaacatgctgctgattgaacatgccaagctgcacgaggaggacccctacatctgcaagtactgtgactacaagacagtcatctttgagaacctgagccagcacatcgctgacacccacttcagtgaccacctgtag

SEQ ID NO: 115261 - DNA, 414 bp, Artificial Sequence
  derived and/or modified sequence
atgaatgagtaccccaagaagaggaagaggaagaccctgcaccccagccgctacagcgacagcagcggcatcagcagaattgctgatggcttcaacggcatcttcagtgaccactgctacagcgtgtgcagcatgaggcagcctgacctgaagtactttgacaacaaggatgatgacagcgacacagagaccagcaatgacctgcccaagtttgctgatggcatcaaggccaggaacagaaaccagaactacctggtgcccagccctgtgctgcgcatcctggaccacacagccttcagcacagagaagtctgctgacatcgtcatctgtgatgaagaatgtgacagccctgagagcgtgaaccagcagacccaggaggagagccccatcgaggtgcacacagctgaggactag

SEQ ID NO: 115262 - DNA, 651 bp, Artificial Sequence
  derived and/or modified sequence
atgaatgagtaccccaagaagaggaagaggaagaccctgcaccccagccgctacagcgacagcagcggcatcagcagaattgctgatggcttcaacggcatcttcagtgaccactgctacagcgtgtgcagcatgaggcagcctgacctgaagtactttgacaacaaggatgatgacagcgacacagagaccagcaatgacctgcccaagtttgctgatggcatcaaggccaggaacagaaaccagaactacctggtgcccagccctgtgctgcgcatcctggaccacacagccttcagcacagagaagtctgctgacatcgtcatctgtgatgaagaatgtgacagccctgagagcgtgaaccagcagacccaggaggagagccccatcgaggtgcacacagcagaagatgtgcccatcgctgtggaggtgcacgccatcagtgaagattatgacattgaaacagagaacaacagcagcgagagcctgcaggaccagacagatgaggagcccccagccaagctgtgcaagatcctggacaagagccaggccctgaatgtgacagcccagcagaagtggcccctgctgcgggccaacagcagcggcctgtacaagtgtgagctgtgtgagttcaacagcaagtacttctag

SEQ ID NO: 115263 - DNA, 393 bp, Artificial Sequence
  derived and/or modified sequence
atgaatgagtaccccaagaagaggaagaggaagaccctgcaccccagccgctacagcgacagcagcggcatcagcagaattgctgatggcttcaacggcatcttcagtgaccactgctacagcgtgtgcagcatgaggcagcctgacctgaagtactttgacaacaaggatgatgacagcgacacagagaccagcaatgacctgcccaagtttgctgatggcatcaaggccaggaacagaaaccagaactacctggtgcccagccctgtgctgcgcatcctggaccacacagccttcagcacagagaagtctgctgacatcgtcatctgtgatgaagaatgtgacagccctgagagcgtgaaccagcagacccaggaggagagccccatctag

SEQ ID NO: 115264 - DNA, 1458 bp, Artificial Sequence
  derived and/or modified sequence
atgaacgagtaccccaagaagcggaagcggaagaccctgcacccctcccggtactccgatagttccggaattagccgcattgccgatggttttaacggtattttttcggaccactgttattccgtgtgctccatgcgccagcccgatctgaagtacttcgacaataaggatgacgacagcgacacagagacttccaacgatttaccaaagtttgccgacggtatcaaggcccgaaaccgcaatcaaaattacctcgtgccgagccctgttctgagaatattggaccacacggctttctctacagaaaagagcgccgacatcgtgatttgcgacgaggagtgcgattcacccgaatcagtaaaccaacagacacaggaagaaagcccaattgaagtgcacacagccgaggacgtccccattgccgtggaggtacatgctatttctgaagactatgatatagagacggagaacaatagctctgagtccctgcaggatcagacagacgaggagcctcccgccaaactgtgcaagatactcgataaatcccaggccttgaatgtaaccgctcagcagaagtggcccctcctgagagccaattccagcggcctgtacaaatgtgagctctgtgagttcaattctaagtacttttccgatctgaagcaacacatgatcctgaaacataaacgtaccgactcgaacgtctgcagagtctgcaaagaatccttttccacgaatatgctcctgattgaacatgcaaaactgcatgaggaagacccttacatttgcaaatattgtgactacaagacggttattttcgagaatctatcacaacatattgccgacacccacttttccgaccacttgtactggtgtgaacaatgtgatgtccagttttcttccagtagcgagctgtacctgcactttcaggagcattcatgcgatgaacagtacctttgccagttttgcgagcacgagacaaatgatcccgaagacctgcacagccacgtggttaacgagcatgcctgtaaactgattgaactttctgataaatataataacggcgaacatggtcagtactccctcctcagcaaaattaccttcgacaagtgcaagaacttcttcgtgtgccaggtgtgtggcttcagatctcgattacacacaaatgtcaacaggcatgtggccatcgaacataccaagattttcccccatgtttgcgacgattgtggcaagggatttagttccatgctggagtattgtaaacatttgaatagccacctgtcagagggaatttacttatgccagtactgtgaatactccacaggacagatagaggatctaaagattcatctggactttaaacactcagcggatctgcctcacaagtgttcagactgtctgatgagattcggcaacgaaagagagctgatctctcacctgcctgtccacgagaccacatag

SEQ ID NO: 115265 - DNA, 867 bp, Artificial Sequence
  derived and/or modified sequence
atgaacgagtaccccaagaagcggaagcggaagaccctgcacccctcccggtactctgactctagcgggatctcaagaatcgccgatgggttcaatggtattttctctgaccattgttacagcgtctgctctatgcgccagcccgacctaaagtacttcgacaacaaggatgacgactctgacactgagacatccaacgacctgcccaagttcgccgatggcatcaaggcgagaaatcggaatcaaaattacctcgttcctagcccagtactgagaatcctggatcacacggcctttagtactgagaaatcagctgacattgtgatttgcgatgaagaatgcgattcaccggaaagcgtcaaccagcagacgcaagaagagtctcccatcgaggtgcatacagcagaagacgtgcccattgcagtggaggtccacgcaatatcagaagattatgatatcgagaccgaaaataactcgagtgagtctcttcaagaccaaaccgacgaagaacctcccgctaagctctgcaaaatcctggacaaatcccaggccttgaacgtgactgctcagcaaaaatggccgttactgcgtgccaattcatcaggactgtacaaatgtgagctgtgcgaattcaactccaaatactttagcgaccttaaacagcacatgatcctaaagcacaaacggacagactccaacgtgtgccgagtttgcaaagaatccttctcgacaaatatgttactaatcgaacatgccaaactgcacgaggaagatccctacatctgcaagtactgtgattataagaccgtcattttcgagaacttaagtcagcacatcgccgatacacacttcagcgaccacttgtag

SEQ ID NO: 115266 - DNA, 414 bp, Artificial Sequence
  derived and/or modified sequence
atgaacgagtaccccaagaagcggaagcggaagaccctgcaccccagtagatatagcgactctagcgggatctcacgcatcgccgacggatttaatggcatctttagtgaccattgttacagcgtttgcagcatgcggcagcccgatcttaagtattttgacaacaaggatgatgattcagacaccgaaaccagtaacgacctgccaaaatttgccgacggtattaaggctcgcaatcggaatcagaattatctggtaccttctcccgtccttcgcatacttgaccacacggccttcagcaccgagaaaagtgccgatatagttatatgcgacgaggaatgtgattctcccgagtccgtgaaccagcagacccaggaagaatctcccatcgaggtgcacaccgccgaggattag

SEQ ID NO: 115267 - DNA, 1458 bp, Artificial Sequence
  derived and/or modified sequence
atgaacgagtaccccaagaagcggaagcggaagaccctgcaccccagtagatactccgactcatccgggatttcgcggatagcagatgggtttaacggaatattctcagatcattgttactccgtgtgctccatgaggcagcctgatttaaaatacttcgataacaaagatgacgatagtgatacagaaacctctaatgacctgccaaaatttgcagacgggattaaagctcggaacagaaaccaaaattacttggttcctagccctgtgttaaggatcttggaccacaccgccttctcgaccgaaaagagcgcagatattgtgatttgcgatgaggagtgtgattctcctgaaagcgtaaatcagcagacccaggaagagagtcccatcgaggtccacaccgccgaagatgtaccaatcgcagtggaagttcacgctattagtgaagattacgacatcgaaactgagaacaactcctcagaatctctacaggatcagaccgacgaggaaccaccagctaaactatgcaagatcttagacaaatcacaggctctaaacgtgaccgcgcagcagaaatggcccctacttagagccaactcatcaggtctgtacaagtgcgagctgtgcgagttcaatagtaaatacttctctgacttaaaacaacatatgattcttaaacataagcgtactgactccaacgtgtgccgcgtgtgcaaagagagcttcagcactaacatgcttcttatcgagcacgctaagttgcatgaggaagacccatacatttgcaaatactgtgactacaagaccgtcatctttgaaaatctctcccagcacatagcagacacacactttagcgaccacctctattggtgcgaacagtgtgacgtgcagtttagctctagctcagagttgtacctacacttccaggagcattcttgcgacgagcaatacctgtgtcagttctgtgagcatgaaacaaatgatccagaggaccttcactcgcacgtggtaaacgagcacgcctgtaagctcatcgagctgtctgacaaatacaacaacggcgaacatggccagtactctctgctgtctaagatcacttttgacaaatgtaagaatttctttgtctgccaggtctgtggatttcggtccagactccacactaacgtaaacaggcatgttgcgatagagcacaccaaaattttccctcacgtgtgcgacgactgtggtaagggatttagtagcatgttggaatactgcaagcacctgaattcacacctgagtgaggggatttacctttgccaatattgcgaatactccaccgggcagatcgaagacctcaagattcacctggatttcaagcattctgccgaccttccacataaatgttctgattgcttaatgagatttggtaatgaacgcgagctgataagccatctgcctgtccacgagaccacttag

SEQ ID NO: 115268 - DNA, 651 bp, Artificial Sequence
  derived and/or modified sequence
atgaacgagtaccccaagaagcggaagcggaagaccctgcacccctcccggtattcagacagttctgggatatcccggatcgctgatggattcaacgggattttctctgaccactgctactctgtttgcagcatgagacagcccgatctaaagtactttgataataaggatgacgacagtgacacagaaacgtcaaacgaccttcccaaattcgctgacggcattaaagcccgtaatcgcaaccaaaattacttggttccaagccccgtactccgaatactggatcatacagctttttctactgagaaatccgccgacatagtgatatgcgatgaagaatgcgatagccccgagtcagtgaaccagcagacacaggaagagtcccccatagaggttcacacagccgaggatgtcccaattgccgtagaagttcatgctatctctgaggactatgatattgagacagagaataattccagcgagtcgctccaggaccagaccgacgaggagcctcccgccaagctttgcaaaatcctggataagtcccaagcgctaaacgtgacagcccaacaaaagtggccattactgagagccaactcctctgggttatataagtgcgagctttgcgaatttaactctaagtacttctag

SEQ ID NO: 115269 - DNA, 393 bp, Artificial Sequence
  derived and/or modified sequence
atgaacgagtaccccaagaagcggaagcggaagaccctgcaccccagccggtattcagatagctcagggatctccagaatagcggatggcttcaacggaatcttcagtgaccattgctattcggtgtgctcgatgcgccaacccgatttaaaatactttgataataaggatgatgattcagatactgaaacatccaacgatctgccgaaattcgcagacggcattaaggctagaaatcgaaaccagaactacctggttcccagtcccgtgttgaggatcctcgatcatacagctttcagtaccgaaaagagcgccgatatcgtgatatgcgacgaggaatgcgatagtcctgagtcagtgaatcagcagacacaggaggaaagtcccatctag

SEQ ID NO: 115270 - DNA, 1458 bp, Artificial Sequence
  derived and/or modified sequence
atgaacgagtaccccaagaagcggaagcggaagaccctgcaccccagcaggtacagcgattcctctggcatttctcggattgccgacgggtttaacgggattttttcagatcattgttatagcgtgtgttccatgcggcaacctgacctgaagtatttcgataacaaagatgatgactctgacacggaaacctctaacgacttgcccaaatttgcagacgggataaaggcacgaaaccggaatcagaactatttggtgccttcccccgttctaagaatcctggatcataccgctttctctaccgagaaaagcgccgatatagtaatttgtgacgaagagtgtgattctccagagagtgtgaatcagcagacgcaagaggaatctccaatcgaggttcacacggccgaggatgttccaatcgccgtcgaggtccatgcgatctctgaagattacgacatcgagaccgaaaacaactccagtgagagcctgcaggaccagactgatgaggagccccccgcaaaactgtgcaagattctggataagagtcaggcactgaatgtcaccgcacaacagaagtggcctctcctgcgggctaatagtagcggtttgtacaagtgtgagctatgcgaattcaattctaaatattttagcgacctaaaacagcatatgattctgaagcataagcgcacagatagcaatgtgtgtagggtttgcaaagaatccttctcgactaatatgctcttaatcgagcacgctaaattgcacgaagaagacccctatatttgcaagtattgcgattataagactgtcatcttcgagaacctatcacagcatatcgctgatacacactttagcgatcacctttattggtgcgaacagtgcgacgtacagtttagtagctcgagcgaactgtacctccacttccaagaacatagctgcgacgaacaatatctctgccagttctgtgagcacgaaacgaatgaccctgaggacttgcacagccacgtggtgaatgagcacgcctgtaagctgatcgagttgagtgacaagtacaacaacggagaacacggccaatattctctgctgtccaagattaccttcgataagtgcaagaattttttcgtgtgtcaggtctgcggtttcagaagtcgcctacatactaacgtcaaccgtcacgttgctatcgagcacacaaagattttcccacatgtgtgcgacgactgcggtaagggcttcagctctatgttggaatactgcaaacacctgaacagccacctgtcggagggcatttatctgtgtcagtactgtgaatacagcacaggccagatagaggatcttaagatccacctcgattttaagcattccgcggatctaccccataaatgctcggactgcctcatgcgcttcgggaacgagcgggagctgatttcccacttgcctgtgcatgagactacttag

SEQ ID NO: 115271 - DNA, 1458 bp, Artificial Sequence
  derived and/or modified sequence
atgaacgagtatcctaagaaacgcaaacggaaaacccttcacccctcccggtacagtgatagctctggcatttcccggatcgccgacggcttcaatgggatattctctgaccactgttattccgtgtgctccatgaggcagcccgacctaaagtattttgataataaggacgacgattccgatactgaaactagtaatgacctgcccaaattcgctgacggtattaaagcccgaaatcggaaccaaaactacctcgtgccttcacccgtcctgcgcatccttgaccacacagcttttagcacagagaaatctgccgatattgttatatgcgacgaagagtgcgactcacctgaatcagtaaaccagcagacacaggaggaaagtcccattgaagtgcatacagcggaagacgtgcccattgctgtggaggtgcatgcaatctccgaagactacgatatcgaaacagaaaataactcgagtgaatccctgcaagaccagaccgatgaagagcctcctgcaaaactgtgcaaaatcctggataagtcgcaggccctgaacgtaacggctcagcagaaatggccactgctgagggccaactcatccgggctttataaatgcgagttgtgtgaatttaattccaagtacttcagcgatctgaaacagcatatgatcctaaagcacaagagaactgattcaaacgtgtgccgggtgtgtaaagagtctttctctacaaatatgctgctcattgaacacgcgaagctacacgaggaggatccctacatctgcaagtattgtgactacaaaactgttatcttcgagaacctcagtcagcacatcgccgacacacattttagtgatcatttgtactggtgcgaacagtgtgatgtgcagttttcatcatcatcagagctttacctccacttccaagagcattcgtgtgacgaacaatacctctgtcagttctgcgagcacgaaactaatgatcccgaggatctgcatagccacgtggtgaacgagcacgcgtgtaaattgatcgagctcagtgataaatataataatggagagcacggtcagtatagcctgttgtccaaaattaccttcgataaatgtaagaacttttttgtctgtcaagtttgtggtttccgttcacgactgcataccaacgtcaaccggcatgtggctattgaacataccaaaatttttccacatgtgtgcgatgactgtggtaagggcttttccagcatgctcgagtactgtaagcacctgaattcccatcttagcgagggaatttatctctgccagtactgtgagtactcaaccggacagatcgaagacctgaaaatccacctcgatttcaagcacagcgccgacctgcctcataagtgtagcgactgcttaatgcgcttcgggaatgaacgggagttaatttctcatcttccagtgcatgaaacaacctag

SEQ ID NO: 115272 - DNA, 867 bp, Artificial Sequence
  derived and/or modified sequence
atgaatgaatacccaaaaaagagaaagcgcaagacgcttcatccatcaaggtatagcgatagcagcgggatctccaggatcgcagatgggttcaacggcatcttcagtgatcattgctacagcgtgtgtagcatgaggcagcctgatctcaagtattttgataataaggatgacgattcagataccgagacgtccaatgatctcccaaagtttgcagatggcattaaagctcgcaaccgaaatcagaattatttggtgccgtcaccagtgctcaggatcctggaccacaccgccttcagcacagagaagtctgctgatatcgtcatctgtgatgaggaatgtgattccccagagagcgtgaaccagcagacccaggaggagagcccaatagaagttcacaccgctgaagatgttcctatcgctgttgaggtccatgcaatctcagaggattatgacatcgaaacggaaaataattcaagcgagtcattgcaggaccagactgacgaggaaccccctgccaaattgtgtaaaatcctcgacaaaagccaggccttgaacgtgaccgcacagcagaagtggcccctactaagagccaatagttcaggcttgtataaatgtgagctgtgtgaatttaatagcaaatatttttcagacttgaaacaacatatgatccttaagcacaaacgcactgattcaaatgtgtgccgggtctgtaaagagtccttctctaccaatatgctcttaatagaacacgctaagcttcacgaggaggacccttacatttgcaaatactgcgactacaagaccgtgatttttgaaaatctgagccaacacatagctgacactcatttcagcgatcacctctag

SEQ ID NO: 115273 - DNA, 414 bp, Artificial Sequence
  derived and/or modified sequence
atgaacgagtatcctaaaaaacggaagcgtaaaacattgcacccctcaaggtatagtgacagtagcggcatttcaagaatcgcagatggttttaatggaatctttagtgatcactgctacagcgtctgttccatgcggcagcccgacctgaaatactttgataataaggacgatgatagcgataccgaaacgagtaacgacctgccaaaatttgcagacggaatcaaagccagaaatcggaatcagaactatctagtgccgtcaccagtcctgagaattctggatcacacagctttcagcacagaaaagtccgcagatattgtgatctgcgacgaggagtgcgattctcccgagtcagttaatcagcaaacccaagaagagagtcccatagaggtgcatacggccgaggattag

SEQ ID NO: 115274 - DNA, 1458 bp, Artificial Sequence
  derived and/or modified sequence
atgaatgagtatcctaagaagaggaagagaaaaaccttacacccgagccgatacagcgactccagcggaatctcgcgcattgccgatgggtttaatgggattttttctgaccattgttatagcgtgtgctccatgcggcaaccagaccttaaatactttgataataaagacgacgactccgacaccgaaacgtcaaatgacctgccaaagttcgctgacggcattaaggcaaggaatcgcaatcagaattacctggtaccgtcccctgtgctccgaatcctggaccatactgccttcagcaccgagaagagcgctgacatagtgatctgtgacgaggaatgtgactctccagagtcagtgaaccagcagactcaggaagaaagcccaatcgaggtgcatactgcagaggacgtgccgatcgctgtggaagtacacgctatcagtgaggactatgacatcgagacagaaaataattccagtgaaagtctgcaggatcagactgacgaggagcctcccgcaaagttgtgcaagattctcgataagtcacaggctctgaatgtgaccgctcagcagaagtggccgttgctcagggcaaactcaagtgggttgtataagtgcgaactctgcgagttcaattccaaatactttagcgatctaaaacagcacatgatcctgaagcataaacggacagactctaacgtttgcagggtgtgcaaggaatcattctctactaacatgcttttgatcgagcacgccaagttgcacgaggaggacccatacatatgtaagtattgcgattataagaccgttatttttgaaaacttgtcccaacacatcgccgacacccatttctccgatcacctctactggtgtgagcaatgtgacgtccagttcagtagctccagtgaactctatcttcacttccaggaacactcctgcgatgagcagtacctgtgtcagttttgcgaacacgagactaatgacccagaggatctgcacagccacgttgtgaatgagcatgcctgcaaattgatagaactttcagacaagtataataatggagagcatggccaatactcacttctttctaaaattacctttgacaagtgcaagaacttcttcgtatgtcaggtatgcggctttcggagtaggcttcatactaatgtcaataggcacgtggccatagaacacacaaagatctttccccatgtgtgcgatgattgcggcaagggattcagctcaatgctagagtactgtaagcacctcaatagtcatctatctgaaggtatctatctgtgccagtattgtgagtacagcactggacagatcgaggaccttaagattcatctggatttcaaacattcggcggatctgccccacaagtgttctgactgtctgatgcggttcgggaatgaacgggagctgatttcccacctgccagtgcatgagaccacctag

SEQ ID NO: 115275 - DNA, 651 bp, Artificial Sequence
  derived and/or modified sequence
atgaatgaatatcccaaaaaacgcaagaggaagaccttacacccgtccagatattctgacagcagtggtataagccgcattgcggacggctttaatggtatattttcagaccattgttactccgtttgcagcatgagacagccggatctaaagtatttcgacaataaagatgacgattctgacacagagacatcaaatgacttacctaaatttgcggacggcatcaaagcccgtaatcggaatcagaattatctggtgcctagtccagtgcttcggatcctggaccacaccgctttttcgacagaaaaaagtgccgacatagtgatttgcgacgaggagtgtgattcaccggaatctgtcaaccagcagactcaggaggagtctcctatagaggtgcatacagccgaagacgtgccaattgcagtggaggtgcatgccatcagtgaagactacgatatcgagactgagaacaacagcagtgagtccctgcaggatcagacagatgaggagcccccagctaaactgtgcaaaattctcgataagagtcaagccctgaatgttaccgcccagcagaagtggcccctgcttagggccaactcaagcggcctttataagtgcgagctgtgcgaattcaactccaagtacttttag

SEQ ID NO: 115276 - DNA, 393 bp, Artificial Sequence
  derived and/or modified sequence
atgaatgagtaccccaagaaaagaaagcgcaaaactcttcacccatctaggtatagtgattcttccggcatatcacggatcgctgatgggttcaacgggatctttagtgatcactgctatagcgtgtgctcgatgaggcagccagatttaaaatacttcgataataaggacgatgacagcgatacagagacctcaaatgacctacctaagttcgcggatggcatcaaggcaaggaatcgcaatcagaactacctggtacccagcccagtgttgcggatcctcgatcataccgcattcagtacagaaaagagtgccgacatcgtaatttgtgatgaggagtgcgacagccccgaaagcgtgaatcaacagacgcaggaggaatctcccatttag

SEQ ID NO: 115277 - DNA, 1458 bp, Artificial Sequence
  derived and/or modified sequence
atgaacgaataccctaagaagcgtaagagaaagacactgcacccgtcccggtactctgactcctccggaataagtcggattgctgacggctttaacggtatcttttctgatcattgctacagcgtgtgttccatgaggcagccagatctgaagtactttgacaataaagacgatgacagcgacacagagacctctaacgatttacctaaatttgccgatggaatcaaggccagaaatcggaaccagaattacctggtgccgagcccagtcttacgcattttggatcatactgccttctcaacggaaaagagtgctgacattgtgatctgtgacgaagagtgcgatagtcccgaatctgtgaaccagcagacccaagaggaaagccccatagaagtgcatacagccgaagacgtcccaatcgccgttgaagttcacgcgattagcgaggattacgacatcgaaactgaaaacaatagcagcgagtctctccaggatcaaacagacgaagagccaccggctaagctttgtaagattctggataagtctcaagccctcaacgtcacagcacaacaaaagtggcctctccttcgcgctaacagttccggattgtacaagtgcgagctgtgcgaattcaattccaaatatttcagcgatctcaaacaacatatgattctgaaacacaaacgtacggacagtaacgtgtgcagggtatgcaaggagtcattttccacaaatatgctccttattgagcacgccaagctgcacgaagaggacccatatatatgtaaatactgtgactataaaacggtcatatttgaaaacttgagccagcacatcgctgacacccatttttcggatcatctttattggtgtgagcagtgcgatgtacaattcagttcatcttcagaattgtatcttcacttccaagagcatagctgcgacgagcagtatctctgccagttttgtgaacacgagacgaacgatcccgaagacctacattctcatgtggtgaatgagcacgcatgtaaattgatcgaactgagcgataaatacaacaacggcgagcacggccagtactcactgctctcaaaaataaccttcgacaaatgtaagaattttttcgtatgccaggtctgtggatttcgttctcggttgcacaccaatgtaaaccggcatgttgccatagagcatactaagatcttcccccatgtctgcgacgactgcggaaaggggttcagctctatgcttgaatactgcaagcatctgaattcccacttgagtgagggaatctacctgtgtcagtattgcgaatactcaaccgggcagatcgaggaccttaagattcacctggactttaaacactccgctgatctccctcacaagtgcagcgactgcctgatgagattcggcaatgaacgggagctcataagccacctgccggtgcatgagactacttag

SEQ ID NO: 115278 - DNA, 3016 bp, Artificial Sequence
  derived and/or modified sequence
caacgagttgtagccgcggagagcaggcgtcgatgctggcgcccaaagcctccagcctgagagtcgcctcactcgtgtgacgacagagtttcactcctgttacccaggctggaggacaatgatgtgatctcgggtcaccacaacctccgcctcccggattcaagcgattctcatgcctcagcctcccgagtagctcagattacaggcatgtgccaccacgcccggctaattttgtattttcagtcgagacggggtttccccatgttggtcaggctagtcttgaattcccgacctcaggtgatctgttcgcctcggcctcccaaagtgctgggattacaggcgtgaaccactgcacccggcgaggcattttttactgtctacagaaacttattgtaattcatttttcctcactccagtagtaagaattataccaaattgaaaagatatgaatgagtatcctaaaaaaagaaaaaggaagactctacacccttctcgttattcagattcctctggaataagcagaattgcagatggattcaatggaattttctctgatcattgttacagtgtctgttctatgagacagccagatttaaaatattttgacaacaaagatgatgattctgataccgagacgtcaaatgacttgccaaaatttgcagatggaatcaaggccagaaacagaaatcagaactacctggttcccagtcctgtacttagaattctagaccacactgccttttctacagaaaaatctgctgatattgtaatttgtgatgaagagtgtgactcacctgaatcagtcaaccagcaaacccaagaggagagtcctatagaagttcacactgctgaagatgttccaattgctgtagaagtgcatgcgatttctgaggattatgatatagagacagaaaacaattcctctgagagtctccaagaccaaactgatgaagaaccgccagctaaactttgtaaaattcttgacaagagccaagctttgaatgtgactgcccagcagaaatggcctttactgagagctaatagcagtggcctctataaatgtgaactttgtgagtttaacagcaaatatttttctgacttaaagcagcatatgatcctgaagcataaacgtactgattcaaatgtgtgtcgagtatgcaaggaaagtttctctaccaatatgcttctgatagaacatgccaaactgcatgaagaggatccctacatttgtaaatactgtgattataagacagtaatttttgagaacctcagccagcacattgcagacacccattttagtgatcacctctattggtgtgaacagtgtgatgtacagttctcctcaagcagtgaactctacctacatttccaggagcacagctgtgatgaacagtacttgtgtcagttctgtgaacatgaaactaatgatccagaagacttgcatagccatgtggtaaatgagcatgcatgtaaattaatagagttaagtgataagtataacaatggtgaacatggacagtatagcctcttaagcaaaattacctttgacaaatgtaaaaacttctttgtatgtcaagtatgtggttttcggagtagacttcacacaaatgttaacaggcatgttgctattgaacatacaaaaatttttcctcatgtttgtgatgactgtgggaaaggcttttcaagtatgctagaatattgcaagcatttaaattcacatttatctgaagggatttatttatgtcaatattgtgaatattcaacaggacaaattgaagatcttaaaattcatctagatttcaagcattcagctgacttgcctcataaatgtagtgactgcttgatgaggtttggaaatgaaagggaattaataagtcaccttccagtccatgagacaacttgattattctctttaacttacagaatgttagtttaaaataataaattcatcctttttttggagatgattaaatggatgattgtaaacacaacttatgaaatctgcctttaacaagtaacttttttaaattataaaattttattggcattgctccattttctgtatataaatatatctttaatgtggtattttcaattgcgtgatagtttgtagtttcaaccactcttggtgactgtcatcctgtttcttccatattctctgatttcatgaattgaaaagaaacaaatgtattgaagaagtgagctacagttttccttccttaaccatgggtgctagtaactttttaaaactcaagacaagattagttttttatgtgtgaagtcattaaattattacacgaccagaactaaaatgcaatatacagttaagtccacggatactcccattaatgagaaataacactaggaagccactattacaggaagaaaagatttggttttcatggcagtctgtttttttaaaaaaaaatttttgagccactatctattgttgaatattttaagatgggatgagggaggaactaataagggcttacacaataaaaaataactatatcataactcattcataacttgatgtttcattttctgttgaggaaccataaattcattcacagacttaatatttttttcttagagatggtctcgttctgttgtccaggatggagtgcagtggttgatcatagctcccgggctgtagtctcccaggctcgagcaatcctcccacttcaccctcctgcatagctaggactacaggcatgtggcaccatgcccgctaagtttttaaatttcttgtagagatgagatctcgctatgttgcccaggccagtctcaaactcctggactcaagcaatcctcccaccttggccttccaaatcactgggattataggcatgagccattatgcctgactcttgcccaaatttctgatgtcaaattgttcattgacagaaaacccactgaagtatttaaagttaggaagatctgggagataggggttgctggcatgaaaatgtataacttacaacatttattaataaaatgataaattagcatc

SEQ ID NO: 115279 - DNA, 1117 bp, Artificial Sequence
  derived and/or modified sequence
ctcagattacaggcatgtgccaccacgcccggctaattttgtattttcagtcgagacggggtttccccatgttggtcaggctagtcttgaattcccgacctcaggtgatctgttcgcctcggcctcccaaagtgctgggattacaggcgtgaaccactgcacccggcgaggcattttttactgtctacagaaacttattgtaattcatttttcctcactccagtagtaagaattataccaaattgaaaagatatgaatgagtatcctaaaaaaagaaaaaggaagactctacacccttctcgttattcagattcctctggaataagcagaattgcagatggattcaatggaattttctctgatcattgttacagtgtctgttctatgagacagccagatttaaaatattttgacaacaaagatgatgattctgataccgagacgtcaaatgacttgccaaaatttgcagatggaatcaaggccagaaacagaaatcagaactacctggttcccagtcctgtacttagaattctagaccacactgccttttctacagaaaaatctgctgatattgtaatttgtgatgaagagtgtgactcacctgaatcagtcaaccagcaaacccaagaggagagtcctatagaagttcacactgctgaagatgttccaattgctgtagaagtgcatgcgatttctgaggattatgatatagagacagaaaacaattcctctgagagtctccaagaccaaactgatgaagaaccgccagctaaactttgtaaaattcttgacaagagccaagctttgaatgtgactgcccagcagaaatggcctttactgagagctaatagcagtggcctctataaatgtgaactttgtgagtttaacagcaaatatttttctgacttaaagcagcatatgatcctgaagcataaacgtactgattcaaatgtgtgtcgagtatgcaaggaaagtttctctaccaatatgcttctgatagaacatgccaaactgcatgaagaggatccctacatttgtaaatactgtgattataagacagtaatttttgagaacctcagccagcacattgcagacacccattttagtgatcacctct

SEQ ID NO: 115280 - DNA, 584 bp, Artificial Sequence
  derived and/or modified sequence
gccgcctctgcgtgggccggccgggagggcctcgggggactgactgtgaattgagatggttactcaaggaatgattgtttacattgttaggcattttttactgtctacagaaacttattgtaattcatttttcctcactccagtagtaagaattataccaaattgaaaagatatgaatgagtatcctaaaaaaagaaaaaggaagactctacacccttctcgttattcagattcctctggaataagcagaattgcagatggattcaatggaattttctctgatcattgttacagtgtctgttctatgagacagccagatttaaaatattttgacaacaaagatgatgattctgataccgagacgtcaaatgacttgccaaaatttgcagatggaatcaaggccagaaacagaaatcagaactacctggttcccagtcctgtacttagaattctagaccacactgccttttctacagaaaaatctgctgatattgtaatttgtgatgaagagtgtgactcacctgaatcagtcaaccagcaaacccaagaggagagtcctatagaagttcacactgctgaagatg

SEQ ID NO: 115281 - DNA, 1730 bp, Artificial Sequence
  derived and/or modified sequence
gcattttttactgtctacagaaacttattgtaattcatttttcctcactccagtagtaagaattataccaaattgaaaagatatgaatgagtatcctaaaaaaagaaaaaggaagactctacacccttctcgttattcagattcctctggaataagcagaattgcagatggattcaatggaattttctctgatcattgttacagtgtctgttctatgagacagccagatttaaaatattttgacaacaaagatgatgattctgataccgagacgtcaaatgacttgccaaaatttgcagatggaatcaaggccagaaacagaaatcagaactacctggttcccagtcctgtacttagaattctagaccacactgccttttctacagaaaaatctgctgatattgtaatttgtgatgaagagtgtgactcacctgaatcagtcaaccagcaaacccaagaggagagtcctatagaagttcacactgctgaagatgttccaattgctgtagaagtgcatgcgatttctgaggattatgatatagagacagaaaacaattcctctgagagtctccaagaccaaactgatgaagaaccgccagctaaactttgtaaaattcttgacaagagccaagctttgaatgtgactgcccagcagaaatggcctttactgagagctaatagcagtggcctctataaatgtgaactttgtgagtttaacagcaaatatttttctgacttaaagcagcatatgatcctgaagcataaacgtactgattcaaatgtgtgtcgagtatgcaaggaaagtttctctaccaatatgcttctgatagaacatgccaaactgcatgaagaggatccctacatttgtaaatactgtgattataagacagtaatttttgagaacctcagccagcacattgcagacacccattttagtgatcacctctattggtgtgaacagtgtgatgtacagttctcctcaagcagtgaactctacctacatttccaggagcacagctgtgatgaacagtacttgtgtcagttctgtgaacatgaaactaatgatccagaagacttgcatagccatgtggtaaatgagcatgcatgtaaattaatagagttaagtgataagtataacaatggtgaacatggacagtatagcctcttaagcaaaattacctttgacaaatgtaaaaacttctttgtatgtcaagtatgtggttttcggagtagacttcacacaaatgttaacaggcatgttgctattgaacatacaaaaatttttcctcatgtttgtgatgactgtgggaaaggcttttcaagtatgctagaatattgcaagcatttaaattcacatttatctgaagggatttatttatgtcaatattgtgaatattcaacaggacaaattgaagatcttaaaattcatctagatttcaagcattcagctgacttgcctcataaatgtagtgactgcttgatgaggtttggaaatgaaagggaattaataagtcaccttccagtccatgagacaacttgattattctctttaacttacagaatgttagtttaaaataataaattcatcctttttttggagatgattaaatggatgattgtaaacacaacttatgaaatctgcctttaacaagtaacttttttaaattataaaattttattggcattgctccattttctgtatataaatatatctttaatgtggtattttc

SEQ ID NO: 115282 - DNA, 1228 bp, Artificial Sequence
  derived and/or modified sequence
gccgcggagcctaggccaggggcctggcgctcagggcgtggggcgcgcggggagggagaggggtcggcccagcacagcgtccgggagcgctagggccggagcagcgctgcccgccgccgtgcgtccgcgggaaggaccgcgcggcccctccgcctgcgctctcggccgccgccgcctctgcgtgggccggccgggagggcctcgggggactgactgacagagtttcactcctgttacccaggctggaggacaatgatgtgatctcgggtcaccacaacctccgcctcccggattcaagcgattctcatgcctcagcctcccgagtagctcagattacaggcatgtgccaccacgcccggctaattttgtattttcagtcgagacggggtttccccatgttggtcaggctagtcttgaattcccgacctcaggtgatctgttcgcctcggcctcccaaagtgctgggattacaggcgtgaaccactgcacccggcgaggcattttttactgtctacagaaacttattgtaattcatttttcctcactccagtagtaagaattataccaaattgaaaagatatgaatgagtatcctaaaaaaagaaaaaggaagactctacacccttctcgttattcagattcctctggaataagcagaattgcagatggattcaatggaattttctctgatcattgttacagtgtctgttctatgagacagccagatttaaaatattttgacaacaaagatgatgattctgataccgagacgtcaaatgacttgccaaaatttgcagatggaatcaaggccagaaacagaaatcagaactacctggttcccagtcctgtacttagaattctagaccacactgccttttctacagaaaaatctgctgatattgtaatttgtgatgaagagtgtgactcacctgaatcagtcaaccagcaaacccaagaggagagtcctatagaagttcacactgctgaagatgttccaattgctgtagaagtgcatgcgatttctgaggattatgatatagagacagaaaacaattcctctgagagtctccaagaccaaactgatgaagaaccgccagctaaactttgtaaaattcttgacaagagccaagctttgaatgtgactgcccagcagaaatggcctttactgagagctaatagcagtggcctctataaatgtgaactttgtgagtttaacagcaaatattttt

SEQ ID NO: 115283 - DNA, 564 bp, Artificial Sequence
  derived and/or modified sequence
aaataggaaaatgatttttttcttgaaaattatttatattctgatctgtgtgatgagtacttttttctggaagccaggaggccgatacatatttgtgacaatatttttttaaaggaaatgtctccgcctttagcttgaaaactacctaaaaatacttccaatgattgaaaagatatgaatgagtatcctaaaaaaagaaaaaggaagactctacacccttctcgttattcagattcctctggaataagcagaattgcagatggattcaatggaattttctctgatcattgttacagtgtctgttctatgagacagccagatttaaaatattttgacaacaaagatgatgattctgataccgagacgtcaaatgacttgccaaaatttgcagatggaatcaaggccagaaacagaaatcagaactacctggttcccagtcctgtacttagaattctagaccacactgccttttctacagaaaaatctgctgatattgtaatttgtgatgaagagtgtgactcacctgaatcagtcaaccagcaaacccaagaggagagtcctata

SEQ ID NO: 115284 - DNA, 2033 bp, Artificial Sequence
  derived and/or modified sequence
acctcacctcgtcacctccccgccctctcggcgggcccctgaggtgcgcggcgcaggcgcggagcgtggcggccagggcagtgcggccgcggagcctaggccaggggcctggcgctcagggcgtggggcgcgcggggagggagaggggtcggcccagcacagcgtccgggagcgctagggccggagcagcgctgcccgccgccgtgcgtccgcgggaaggaccgcgcggcccctccgcctgcgctctcggccgccgccgcctctgcgtgggccggccgggagggcctcgggggactgactggcattttttactgtctacagaaacttattgtaattcatttttcctcactccagtagtaagaattataccaaattgaaaagatatgaatgagtatcctaaaaaaagaaaaaggaagactctacacccttctcgttattcagattcctctggaataagcagaattgcagatggattcaatggaattttctctgatcattgttacagtgtctgttctatgagacagccagatttaaaatattttgacaacaaagatgatgattctgataccgagacgtcaaatgacttgccaaaatttgcagatggaatcaaggccagaaacagaaatcagaactacctggttcccagtcctgtacttagaattctagaccacactgccttttctacagaaaaatctgctgatattgtaatttgtgatgaagagtgtgactcacctgaatcagtcaaccagcaaacccaagaggagagtcctatagaagttcacactgctgaagatgttccaattgctgtagaagtgcatgcgatttctgaggattatgatatagagacagaaaacaattcctctgagagtctccaagaccaaactgatgaagaaccgccagctaaactttgtaaaattcttgacaagagccaagctttgaatgtgactgcccagcagaaatggcctttactgagagctaatagcagtggcctctataaatgtgaactttgtgagtttaacagcaaatatttttctgacttaaagcagcatatgatcctgaagcataaacgtactgattcaaatgtgtgtcgagtatgcaaggaaagtttctctaccaatatgcttctgatagaacatgccaaactgcatgaagaggatccctacatttgtaaatactgtgattataagacagtaatttttgagaacctcagccagcacattgcagacacccattttagtgatcacctctattggtgtgaacagtgtgatgtacagttctcctcaagcagtgaactctacctacatttccaggagcacagctgtgatgaacagtacttgtgtcagttctgtgaacatgaaactaatgatccagaagacttgcatagccatgtggtaaatgagcatgcatgtaaattaatagagttaagtgataagtataacaatggtgaacatggacagtatagcctcttaagcaaaattacctttgacaaatgtaaaaacttctttgtatgtcaagtatgtggttttcggagtagacttcacacaaatgttaacaggcatgttgctattgaacatacaaaaatttttcctcatgtttgtgatgactgtgggaaaggcttttcaagtatgctagaatattgcaagcatttaaattcacatttatctgaagggatttatttatgtcaatattgtgaatattcaacaggacaaattgaagatcttaaaattcatctagatttcaagcattcagctgacttgcctcataaatgtagtgactgcttgatgaggtttggaaatgaaagggaattaataagtcaccttccagtccatgagacaacttgattattctctttaacttacagaatgttagtttaaaataataaattcatcctttttttggagatgattaaatggatgattgtaaacacaacttatgaaatctgcctttaacaagtaacttttttaaattataaaattttattggcattgctccattttctgtatataaatatatctttaatgtggtattttcaa

SEQ ID NO: 115285 - protein, 507 aa, Artificial Sequence
  derived and/or modified sequence
MGPSRLVRGPRPQGMRSPYRRPGMGWPRPRFPRMFKCSRRRYQQGLRGRTASSAAINPATRAMGINNTHTDTTIVWIFPPQALPPKPPKPMTSAVPNGMKDSSVSLQDAEWYWGDISREEVNDKLRDMPDGTFLVRDASTKMQGDYTLTLRKGGNNKLIKIYHRDGKYGFSDPLTFNSVVELINHYHHESLAQYNPKLDVKLMYPVSRYQQDQLVKEDNIDAVGKKLQEYHSQYQEKSKEYDRLYEEYTRTSQEIQMKRTAIEAFNETIKIFEEQCHTQEQHSKEYIERFRREGNEKEIERIMMNYDKLKSRLGEIHDSKMRLEQDLKNQALDNREIDKKMNSIKPDLIQLRKIRDQHLVWLNHKGVRQKRLNVWLGIKNEDADENYFINEEDENLPHYDEKTWFVEDINRVQAEDLLYGKPDGAFLIRESSKKGCYACSVVADGEVKHCVIYSTARGYGFAEPYNLYSSLKELVLHYQQTSLVQHNDSLNVRLAYPVHAQMPSLCR

SEQ ID NO: 115286 - DNA, 1524 bp, Artificial Sequence
  derived and/or modified sequence
atgggccccagcagactggtgagaggccccagaccccagggcatgagaagcccctacagaagacccggcatgggctggcccagacccagattccccagaatgttcaagtgcagcagaagaagataccagcagggcctgagaggcagaaccgccagcagcgccgccatcaaccccgccaccagagccatgggcatcaacaacacccacaccgacaccaccatcgtgtggatcttccccccccaggccctgccccccaagccccccaagcccatgaccagcgccgtgcccaacggcatgaaggacagcagcgtgagcctgcaggacgccgagtggtactggggcgacatcagcagagaggaggtgaacgacaagctgagagacatgcccgacggcaccttcctggtgagagacgccagcaccaagatgcagggcgactacaccctgaccctgagaaagggcggcaacaacaagctgatcaagatctaccacagagacggcaagtacggcttcagcgaccccctgaccttcaacagcgtggtggagctgatcaaccactaccaccacgagagcctggcccagtacaaccccaagctggacgtgaagctgatgtaccccgtgagcagataccagcaggaccagctggtgaaggaggacaacatcgacgccgtgggcaagaagctgcaggagtaccacagccagtaccaggagaagagcaaggagtacgacagactgtacgaggagtacaccagaaccagccaggagatccagatgaagagaaccgccatcgaggccttcaacgagaccatcaagatcttcgaggagcagtgccacacccaggagcagcacagcaaggagtacatcgagagattcagaagagagggcaacgagaaggagatcgagagaatcatgatgaactacgacaagctgaagagcagactgggcgagatccacgacagcaagatgagactggagcaggacctgaagaaccaggccctggacaacagagagatcgacaagaagatgaacagcatcaagcccgacctgatccagctgagaaagatcagagaccagcacctggtgtggctgaaccacaagggcgtgagacagaagagactgaacgtgtggctgggcatcaagaacgaggacgccgacgagaactacttcatcaacgaggaggacgagaacctgccccactacgacgagaagacctggttcgtggaggacatcaacagagtgcaggccgaggacctgctgtacggcaagcccgacggcgccttcctgatcagagagagcagcaagaagggctgctacgcctgcagcgtggtggccgacggcgaggtgaagcactgcgtgatctacagcaccgccagaggctacggcttcgccgagccctacaacctgtacagcagcctgaaggagctggtgctgcactaccagcagaccagcctggtgcagcacaacgacagcctgaacgtgagactggcctaccccgtgcacgcccagatgcccagcctgtgcagatag

SEQ ID NO: 115287 - DNA, 1524 bp, Artificial Sequence
  derived and/or modified sequence
atgggaccaagccggttagtgagaggacccaggccccagggcatgcgctcgccctaccggcggccaggcatgggctggcccagacctagatttcctcgcatgttcaagtgctctcggcggaggtaccagcagggactcagggggcgaacggcctccagtgccgctattaacccagcaacaagggccatggggattaacaacactcacaccgatacaaccattgtctggatttttcctccccaggccctgccccctaagcctcccaagcccatgacctctgcagtcccaaacgggatgaaagacagttctgtcagcctgcaggacgcggagtggtactggggcgatattagccgcgaagaggttaacgacaaactccgagacatgcctgacggaacctttctggttagagatgcctccacaaagatgcagggagattacacacttacgcttcgcaaaggcggcaataacaagctgatcaagatctaccatcgggacgggaagtacggcttttcggatccactgacatttaattctgtggtggaactcataaatcattaccaccacgaatcactggcacagtacaaccctaagcttgatgtgaagctcatgtaccccgtgtcccgttaccagcaagaccagttagtgaaggaagataatattgacgctgtggggaaaaagttacaagaataccatagccagtatcaggagaagtcgaaagaatacgatcggctgtacgaagagtatacaagaacaagccaggagatccagatgaaacggaccgctatcgaggccttcaacgaaaccattaaaatcttcgaggaacaatgtcatactcaagaacaacactcgaaggaatatatcgagcgatttcgaagggaaggcaatgagaaggagattgagcgtataatgatgaattacgataagctaaagtcgaggcttggcgagattcacgattccaagatgcgcttagagcaggatctgaagaaccaggccctggacaaccgggaaatcgacaagaagatgaactcgatcaagcccgatttgatccaactgcggaaaatccgcgatcagcaccttgtgtggctcaaccacaagggggtacgccagaagcggctcaatgtatggctgggtattaaaaatgaggatgctgatgagaattactttataaacgaagaagacgagaatctccctcattatgatgagaaaacttggtttgttgaggacataaacagagttcaagctgaggatctcctatatggcaaacctgacggtgcatttctcattagggagtcgtctaaaaaagggtgctacgcgtgtagtgtcgttgcagatggagaggtgaaacactgcgtgatttacagcaccgcacgagggtatggctttgctgaaccttataacctgtactcaagcctgaaggagttggttttgcattaccagcaaacgagtctcgtacagcataatgacagtcttaacgttcggctcgcctacccggttcatgcgcaaatgccctctctgtgccgctag

SEQ ID NO: 115288 - DNA, 1524 bp, Artificial Sequence
  derived and/or modified sequence
atgggccccagccggctggtgcggggcccccggccccagggcatgaggagcccctaccgccggcccggcatgggctggccccggccccgcttccccaggatgttcaagtgcagcagaagacgctaccagcagggcctgcggggccgcacagccagcagcgctgccatcaacccagccacccgggccatgggcatcaacaacacccacacagacaccaccatcgtgtggatcttccccccccaggccctgccccccaagccacccaagcccatgaccagcgctgtgcccaacggcatgaaggacagctctgtgtccctgcaggatgctgagtggtactggggagacatcagccgggaggaggtgaatgacaagctgcgggacatgccagatggcaccttcctggtgagagatgccagcaccaagatgcagggcgactacaccctgaccctgaggaagggcggcaacaacaagctgatcaagatctaccacagagatggcaagtatggcttcagtgaccccctgaccttcaacagcgtggtggagctgatcaaccactaccaccacgagagcctggcccagtacaaccccaagctggatgtgaagctgatgtaccctgtgagccgctaccagcaggaccagctggtgaaggaggacaacattgatgctgtgggcaagaagctgcaggagtaccacagccagtaccaggagaagagcaaggagtatgaccggctgtatgaggagtacaccaggaccagccaggagatccagatgaagaggacagccatcgaggccttcaatgagaccatcaagatctttgaggagcagtgccacacccaggagcagcacagcaaggagtacatcgagcgcttcagaagagagggcaatgagaaggagattgagcgcatcatgatgaactatgacaagctgaagagccggctgggggagatccatgacagcaagatgaggctggagcaggacctgaagaaccaggccctggacaaccgggagattgacaagaagatgaacagcatcaagccagacctgatccagctgaggaagatccgggaccagcacctggtgtggctgaaccacaagggcgtgcggcagaagaggctgaatgtgtggctgggcatcaagaatgaagatgctgatgagaactacttcatcaatgaggaggatgagaacctgccccactatgatgagaagacctggtttgtggaggacatcaacagagtgcaggccgaggacctgctgtatggcaagccagatggagccttcctgatccgggagagcagcaagaagggctgctacgcctgcagcgtggtggctgatggagaggtgaagcactgcgtcatctacagcacagcccggggctacggctttgctgagccctacaacctgtacagcagcctgaaggagctggtgctgcactaccagcagaccagcctggtgcagcacaatgacagcctgaatgtgcggctggcctaccctgtgcacgcccagatgcccagcctgtgcaggtag

SEQ ID NO: 115289 - DNA, 1524 bp, Artificial Sequence
  derived and/or modified sequence
atgggccccagccggctggtgcggggcccccggccccagggcatgcgcagcccctatcggcggcctggcatgggttggcctcgcccgcggtttccccgtatgtttaaatgctctcgcagaaggtaccagcagggcctgcgtggccgcacggcttcttctgcagctatcaaccctgctacccgcgcaatgggaattaacaatacccatacagataccaccatagtgtggatatttccgccacaagcgttgccccctaagccgcctaagccgatgacctcagccgtaccaaacgggatgaaagatagcagtgtctccttacaggatgcagagtggtattggggcgatattagtcgggaggaggtcaatgacaaactgagggatatgcccgacggaaccttccttgtaagggatgcaagtacgaagatgcagggtgactataccctcactctcagaaagggagggaacaataagctcataaagatctatcatagagatgggaagtatggctttagcgatcccctgacctttaactcagtggtggaactgataaaccactaccaccacgagagcttggcccagtataatcctaagctcgacgtgaagcttatgtaccccgtaagtaggtatcagcaagatcagttagtaaaggaagataatatcgacgctgtgggtaagaaactacaggagtatcattcccaataccaggaaaagtccaaggagtatgatcggctctacgaagaatatacaagaactagccaagaaattcagatgaagaggacagctatcgaggccttcaacgagacaatcaaaatctttgaagagcagtgtcatactcaagagcagcacagcaaagaatacatcgagcgattcagacgtgagggtaatgaaaaagaaatcgaaagaattatgatgaactacgacaaactcaagtccaggctgggagagatacacgacagtaaaatgagactggaacaggacctcaagaaccaggcactcgacaacagggaaatcgacaagaagatgaatagcatcaagccagacctaatccagctgagaaagatccgggatcaacacctggtctggctaaatcacaaaggcgtccgacagaagaggctgaatgtttggttaggaatcaaaaacgaggatgccgacgagaattactttattaacgaagaggatgaaaacctgcctcactatgatgagaaaacatggtttgtggaagacataaatagggtacaggccgaagatctgctgtacggaaagcctgacggggccttcctaataagggagtcatccaaaaaggggtgctatgcttgttcggtggtcgccgacggggaggtcaaacactgtgtgatctacagtaccgctcggggctacgggttcgcagagccatacaacctgtattcaagcctgaaggagctggtgctgcactatcagcagaccagccttgtgcagcacaacgattcattgaacgtacggctggcttacccagtccatgcacaaatgcctagcctgtgcagatag

SEQ ID NO: 115290 - DNA, 1524 bp, Artificial Sequence
  derived and/or modified sequence
atggggccaagccgcctggtccgcggacccaggcctcagggcatgcgttctccctataggcgtccaggcatgggatggcctagacccagattccccaggatgtttaagtgctctaggcgccgatatcagcaggggctgcgcggacgaacggcctcctcagctgctataaacccagccacccgggctatgggaataaacaacactcatacagacaccacaatcgtctggatctttcctccacaggccctaccccctaagccaccaaaacctatgacttctgctgtgcccaatggaatgaaggactccagcgtttcattgcaagacgccgagtggtattggggcgacatctcaagagaagaggtgaacgacaaactccgggacatgccggatggaacttttttggtccgcgatgcgtcgactaagatgcagggggattatactttaaccttgcgaaaaggaggcaacaacaagctgataaagatctaccaccgggatggcaaatatggttttagcgacccgttgacttttaactcagtggtcgaactcattaatcattaccaccacgaatcactcgcacagtataaccccaaattagatgttaagctgatgtaccccgtgagcaggtaccagcaggaccagttggttaaggaagataacatcgatgctgtgggcaagaaactgcaagaatatcactcccaatatcaggagaaaagtaaagagtacgacagactctatgaggagtacacccgcacttcccaagaaatccagatgaagcgcaccgccatcgaggctttcaacgaaacgatcaaaatatttgaagagcagtgccacacccaggaacagcacagtaaagaatacattgagcggttccggagggagggcaatgagaaggaaattgagcgaatcatgatgaattatgataaactgaaatcacgattgggtgagatccacgactctaagatgcgcctggaacaggatctgaaaaatcaggccctcgataacagagagattgataaaaagatgaacagcataaaaccagatctgatccagctgcggaaaatccgggatcaacacttagtctggctgaaccacaagggcgtcagacagaagaggctgaatgtgtggcttgggatcaaaaacgaagacgccgacgagaattattttatcaacgaggaggatgaaaatctcccacattatgatgaaaagacatggtttgtagaggatataaatcgggtgcaagccgaggatctgctttacggcaaacccgatggcgctttcctgattcgggaatcctcaaaaaaagggtgctatgcatgttccgttgttgccgatggggaggtcaaacattgcgtgatttacagcacggccaggggttatggtttcgcagagccctataacctgtattctagcctgaaggagctggttctacattaccaacagacctccctggtgcagcacaatgactctctaaatgtgaggcttgcctaccccgtgcatgcacaaatgccctcgttgtgtcgatag

SEQ ID NO: 115291 - DNA, 1553 bp, Artificial Sequence
  derived and/or modified sequence
agaagctccctgtgcccatggggccatctcggcttgtccgtggccctcggccccagggcatgcgttccccctaccgcaggccaggtatgggctggcccaggccccgatttcccaggatgttcaagtgtagccgcagaagatatcaacagggtctccgaggtcgaactgccagcagtgcagccatcaatcctgccaccagggccatgggtatcaacaacacccacactgacaccaccatagtgtggatcttcccacctcaagctcttccaccaaagccacctaagccaatgacttcagcagttccaaatggaatgaaggacagttctgtttctcttcaggatgcagaatggtactggggggatatttcaagggaggaggtaaatgacaaattgcgggatatgccagatgggaccttcttggtccgagatgcctcaacaaaaatgcagggagattatactttgactttgcggaagggaggcaataataagttaataaagatctatcaccgggatggtaaatatggcttttctgatcctctgacatttaattccgtggtggagctcattaaccactatcaccatgaatctcttgctcagtacaatcccaaacttgatgtgaagctgatgtacccagtgtccagataccaacaggatcagttggtaaaagaagataatattgatgcagtaggtaaaaaactgcaagaataccactctcagtatcaggagaagagtaaagagtatgataggctgtatgaagaatatactagaacatcccaggaaatacagatgaagaggactgcaatagaagcttttaatgaaacaattaaaatatttgaagagcagtgtcacacacaagaacaacatagcaaagaatatattgagcgatttcgcagagaggggaatgaaaaggagattgaacgaattatgatgaattatgataaattgaaatcacgtctgggtgagattcatgatagcaaaatgcgtctagagcaggatttgaagaatcaagctttggacaaccgagaaatagataaaaaaatgaatagcatcaaacctgacctgatccagctgcgaaagatccgagatcaacaccttgtatggctcaatcacaaaggagtgagacagaaacgcctgaatgtctggctgggaattaagaatgaggatgctgatgagaactattttatcaatgaggaagatgaaaacctgccccattatgatgagaaaacctggtttgttgaggatatcaatcgagtacaagcagaggacttgctttatgggaaacctgatggtgcattcttaattcgtgagagtagcaagaaaggatgctatgcttgctctgtggtggccgatggggaagtgaagcactgtgtgatctacagcactgctcggggctatggctttgcagagccctacaacctgtacagctctctgaaggagctagtgctccattaccagcagacatccttggttcagcacaacgactccctcaacgtcaggcttgcctaccctgttcatgcacagatgccctcgctttgcagataaagaggaagtggg

SEQ ID NO: 115292 - DNA, 5609 bp, Artificial Sequence
  derived and/or modified sequence
gtggctggagtccgggcagagcttgagggcagttggtgcggtcgggttggttcttacaccccggcgggagcgcccagacaagccgagctgactggacttctccggccggccccattcccgaggctgcggcagcttcggttccgagaccgaccggagaggagcccgagtcccggcctctgggggattcgctctctgcagaccagtgggaccccgaaacttgaacgcaatctccagcccccttttttgccttcctttgtcacttgcccgggtttctcccaacgtgttcttttttttcctcttcattctccctccttcgaaggacacaaaagtggcttccgcggaaagatttggaggcggtgggagcttttctccccggagagcgactgtgtagaaaggatttttgggaagccgctttttaacacctctgctctccgtcccccaagcctctgtgtaatcctctgaggagaaaagcccatagcttgaaagttcgggggcattttgttgtgttctgtaggagagagggggaggaccctgttcgggtagtttggccggactggtactggccgttggaaaacccgaagtacatttccgtgtggaacttttgcagatatatatttttagatttttaaataccagataaaaaatatatgccttctatatatctcctggcgacctgcccctgacagcgcgatgtacaatacggtgtggagtatggaccgcgatgacgcagactggagggaggtgatgatgccctattcgacagaactgatattttatattgaaatggatcctccagctcttccaccaaagccacctaagccaatgacttcagcagttccaaatggaatgaaggacagttctgtttctcttcaggatgcagaatggtactggggggatatttcaagggaggaggtaaatgacaaattgcgggatatgccagatgggaccttcttggtccgagatgcctcaacaaaaatgcagggagattatactttgactttgcggaagggaggcaataataagttaataaagatctatcaccgggatggtaaatatggcttttctgatcctctgacatttaattccgtggtggagctcattaaccactatcaccatgaatctcttgctcagtacaatcccaaacttgatgtgaagctgatgtacccagtgtccagataccaacaggatcagttggtaaaagaagataatattgatgcagtaggtaaaaaactgcaagaataccactctcagtatcaggagaagagtaaagagtatgataggctgtatgaagaatatactagaacatcccaggaaatacagatgaagaggactgcaatagaagcttttaatgaaacaattaaaatatttgaagagcagtgtcacacacaagaacaacatagcaaagaatatattgagcgatttcgcagagaggggaatgaaaaggagattgaacgaattatgatgaattatgataaattgaaatcacgtctgggtgagattcatgatagcaaaatgcgtctagagcaggatttgaagaatcaagctttggacaaccgagaaatagataaaaaaatgaatagcatcaaacctgacctgatccagctgcgaaagatccgagatcaacaccttgtatggctcaatcacaaaggagtgagacagaaacgcctgaatgtctggctgggaattaagaatgaggatgctgatgagaactattttatcaatgaggaagatgaaaacctgccccattatgatgagaaaacctggtttgttgaggatatcaatcgagtacaagcagaggacttgctttatgggaaacctgatggtgcattcttaattcgtgagagtagcaagaaaggatgctatgcttgctctgtggtggccgatggggaagtgaagcactgtgtgatctacagcactgctcggggctatggctttgcagagccctacaacctgtacagctctctgaaggagctagtgctccattaccagcagacatccttggttcagcacaacgactccctcaacgtcaggcttgcctaccctgttcatgcacagatgccctcgctttgcagataaagaggaagtgggaagagaggtggttctctggcatttttttctacagtttttattagactacgatgagggcattctttctacatagactgcttgttttgcacaagaagtgattttgtgaatgtgaagtggagaggccgagcagcagccggccgggatgggggcattagaggcctgaggttctctaggactcagccatgccgctgcactgacatactaagctggaagcagatgttttttttgaaagtctgtttcattggggtttttgttttgtttagccagacaccctcaacagaatattaggcttgatggttatagcgggtggggttgtatttggaagcctctgaagagaccatgtctttttaaaatctaactcttgagagtgcagcaggggcatggctctgctgggagttgtgttttgctttggcagtctctcttccccccacgaagaaggctgtttaggttttgtgatagaatgggatttgatgaaaaagacaaccaaaggaaaatggggaggcttgggatttcatttaaataatctaagccaagatgataaaaaaaaccttcaactgaaggtattttgtttcttaccaacataatttaggcttcagcatctcaccagcccctccctctgaagaagtattatgttcagaagccaacaaaacagtttgttgccagaccaatgtttgatgggaaaacgtggcactcatagttgaatgtatacttctgtaccaaaacttgaacataaaaagactagaatttgtgagttttagcaaacgctaaaattgatcactgtaactaaccccttctgtccttcctgcctgtttctctgagatgaggaatagcattctttttgtggggatggtgagctttgaatcataaaatgaagttggtgcttgtatggtgtttccttagcctaaagaatgatctgttgtttgaaacctttgtaacttgtttgtatgagtaaagaaaaggtgcaatgcagtgcttttagatggcttgatataccaaataacaatatagaacaacattattatatgtgcttccccaagtttaaaggccctgcagaaatagtaaacatggtttaatttcccttcatttccccctcctttgctggatggggttttgggagctataggttgctaaggaggggagtcagattgtggtcaggtgcctcagtaaatcacagacccaggggccctgtggtccagggtgagagtcacaccacattacacatgtgcttccatacagtggtttctgaagcttttgcagggagagaagatggcttagtgtttagactgttagtagaagccatctggaagcttttctctttgcctttttttgtgatcctgccattaaggctatgtgcagtctgccctcctgctccagtggccttgattttaggccaggaatcttctgctccatgtggcttaagccttccagctgagtgaagctaggcaaatggagtgggggcaggcatctattcctgcccccatcatgccccacacccatcagtcaacactcatttgacaaatagagtccagctgcctctgagccaatcctgggaccataataggctcagagtgagtcagctgtttgaacccaaagctgtgcagtcaggcaccctggctgagctagagaagccagtacctgcatcttggtttataaggcttacagctaggaaagctctagttctgggggtgaaagaaaaatattagtttacctgagcacttatttccatgacagggtctaaaatatggaccatgatgtagacacagatttttaattttggaaaaacctccagttactagtgacgaggatagaaagggaagtgcttctctttggctttttcttggttacactgcagtttcaggattgggtgagacagagacaaatgaacccccctctaaagtcatttaactaatagccagcacatcccttccccaaactgtcaattgaaatcttaactgaaagttttactgaataataccaagctaattgctgttgggcacacctggatggctttgcacctggtgttgaacctgctgaagcaggtggatgctcaagattacgtgcaaggaatccctcccatctggtactaaaatttcagtgtgttctgagtgtcttttaaaccaaaatggaaatacagatacagggctgtagtattcagtaatgtgtctgctccttgttgggcagacaccagcggtgtgcagggagagaccaagtaccatctttatctacacttgggctggcttgtggagaagggctgctttttttcagtcctacattccttcattttttttttcattcttgaattcattgttttgtgggatctaagacccaggggtcatttgagaggtttgacagtatcttttctgaccagttgccacatgacttgcttgaccctgagcctgtggaaatggcatagggaccagtctactacccactgggcctggtgtgtagagggggagagggtagcaaggtgcttctctacgcccatgacttgggagcaggtcttggcctccttcatgagagtctagtgccatgtcctgtcccatgatctggaccctgggactgtcttggcatcttaactgcagtttcaatgaggcagagggcaaagagagaccaagatcagaggggttcattatacccctggctagagaacccagctactgacatgcaagcagcttggggctggctggacacaggtactaggcccattgtttccaggtgaagctttcatcacagaacagtgttgtctccacctggccttagatggcacgccatgattcgggcctggatagactgcctgcgtccttaccactgatctggccaagaatgaggccctcccaacactttcactccctctccaagccttgatgggacctccacttatttaggcctcatgtgctttgaagaagctttgagagccaatgtgtcttccacgggtctcttttttgctacaagtaatcagccccatgtgttctcttaaactgagaattgcacctgggcaattcctgttttctaaggtggtctctgctgctatttaacaacccagagtaggcctctgtgaggcttcagtggcctcagaaaccagagggtccagatagggggcctgcttgggccctctgctgccaactgctcaaacctgctttagctccagccacttgtggcaaacaacctcgtttccttacaaattccagcatgtgactttggtgccgttacttgtgaaaaatctattctgttgtctttgatgtgtccaagaaaattcgtgtagtttacgtaaaaatatctgactcacaagaaagccaactgtatgtcttgtgatgggacagttcataatgtagttgctagaccactttacaaattgttcttgtcaccagatgtgttcagacattgctgtgcaattgttggggagggtagggggaaaggcgagaggagatacttattggtctttttgtttaataccttccccaagaggggacagtctggccaacttgctccagtaatgcaataaagacattgcaataaagtaa

SEQ ID NO: 115293 - DNA, 5019 bp, Artificial Sequence
  derived and/or modified sequence
acagaatcccggtacatcgaggcgggacggcgtggaaggggcggtggtgatgcctgctgtcccccctcccggcgcggttgggtggcgcctcagcggcgcgatgtacaatacggtgtggagtatggaccgcgatgacgcagactggagggaggtgatgatgccctattcgacagaactgatattttatattgaaatggatcctccagctcttccaccaaagccacctaagccaatgacttcagcagttccaaatggaatgaaggacagttctgtttctcttcaggatgcagaatggtactggggggatatttcaagggaggaggtaaatgacaaattgcgggatatgccagatgggaccttcttggtccgagatgcctcaacaaaaatgcagggagattatactttgactttgcggaagggaggcaataataagttaataaagatctatcaccgggatggtaaatatggcttttctgatcctctgacatttaattccgtggtggagctcattaaccactatcaccatgaatctcttgctcagtacaatcccaaacttgatgtgaagctgatgtacccagtgtccagataccaacaggatcagttggtaaaagaagataatattgatgcagtaggtaaaaaactgcaagaataccactctcagtatcaggagaagagtaaagagtatgataggctgtatgaagaatatactagaacatcccaggaaatacagatgaagaggactgcaatagaagcttttaatgaaacaattaaaatatttgaagagcagtgtcacacacaagaacaacatagcaaagaatatattgagcgatttcgcagagaggggaatgaaaaggagattgaacgaattatgatgaattatgataaattgaaatcacgtctgggtgagattcatgatagcaaaatgcgtctagagcaggatttgaagaatcaagctttggacaaccgagaaatagataaaaaaatgaatagcatcaaacctgacctgatccagctgcgaaagatccgagatcaacaccttgtatggctcaatcacaaaggagtgagacagaaacgcctgaatgtctggctgggaattaagaatgaggatgctgatgagaactattttatcaatgaggaagatgaaaacctgccccattatgatgagaaaacctggtttgttgaggatatcaatcgagtacaagcagaggacttgctttatgggaaacctgatggtgcattcttaattcgtgagagtagcaagaaaggatgctatgcttgctctgtggtggccgatggggaagtgaagcactgtgtgatctacagcactgctcggggctatggctttgcagagccctacaacctgtacagctctctgaaggagctagtgctccattaccagcagacatccttggttcagcacaacgactccctcaacgtcaggcttgcctaccctgttcatgcacagatgccctcgctttgcagataaagaggaagtgggaagagaggtggttctctggcatttttttctacagtttttattagactacgatgagggcattctttctacatagactgcttgttttgcacaagaagtgattttgtgaatgtgaagtggagaggccgagcagcagccggccgggatgggggcattagaggcctgaggttctctaggactcagccatgccgctgcactgacatactaagctggaagcagatgttttttttgaaagtctgtttcattggggtttttgttttgtttagccagacaccctcaacagaatattaggcttgatggttatagcgggtggggttgtatttggaagcctctgaagagaccatgtctttttaaaatctaactcttgagagtgcagcaggggcatggctctgctgggagttgtgttttgctttggcagtctctcttccccccacgaagaaggctgtttaggttttgtgatagaatgggatttgatgaaaaagacaaccaaaggaaaatggggaggcttgggatttcatttaaataatctaagccaagatgataaaaaaaaccttcaactgaaggtattttgtttcttaccaacataatttaggcttcagcatctcaccagcccctccctctgaagaagtattatgttcagaagccaacaaaacagtttgttgccagaccaatgtttgatgggaaaacgtggcactcatagttgaatgtatacttctgtaccaaaacttgaacataaaaagactagaatttgtgagttttagcaaacgctaaaattgatcactgtaactaaccccttctgtccttcctgcctgtttctctgagatgaggaatagcattctttttgtggggatggtgagctttgaatcataaaatgaagttggtgcttgtatggtgtttccttagcctaaagaatgatctgttgtttgaaacctttgtaacttgtttgtatgagtaaagaaaaggtgcaatgcagtgcttttagatggcttgatataccaaataacaatatagaacaacattattatatgtgcttccccaagtttaaaggccctgcagaaatagtaaacatggtttaatttcccttcatttccccctcctttgctggatggggttttgggagctataggttgctaaggaggggagtcagattgtggtcaggtgcctcagtaaatcacagacccaggggccctgtggtccagggtgagagtcacaccacattacacatgtgcttccatacagtggtttctgaagcttttgcagggagagaagatggcttagtgtttagactgttagtagaagccatctggaagcttttctctttgcctttttttgtgatcctgccattaaggctatgtgcagtctgccctcctgctccagtggccttgattttaggccaggaatcttctgctccatgtggcttaagccttccagctgagtgaagctaggcaaatggagtgggggcaggcatctattcctgcccccatcatgccccacacccatcagtcaacactcatttgacaaatagagtccagctgcctctgagccaatcctgggaccataataggctcagagtgagtcagctgtttgaacccaaagctgtgcagtcaggcaccctggctgagctagagaagccagtacctgcatcttggtttataaggcttacagctaggaaagctctagttctgggggtgaaagaaaaatattagtttacctgagcacttatttccatgacagggtctaaaatatggaccatgatgtagacacagatttttaattttggaaaaacctccagttactagtgacgaggatagaaagggaagtgcttctctttggctttttcttggttacactgcagtttcaggattgggtgagacagagacaaatgaacccccctctaaagtcatttaactaatagccagcacatcccttccccaaactgtcaattgaaatcttaactgaaagttttactgaataataccaagctaattgctgttgggcacacctggatggctttgcacctggtgttgaacctgctgaagcaggtggatgctcaagattacgtgcaaggaatccctcccatctggtactaaaatttcagtgtgttctgagtgtcttttaaaccaaaatggaaatacagatacagggctgtagtattcagtaatgtgtctgctccttgttgggcagacaccagcggtgtgcagggagagaccaagtaccatctttatctacacttgggctggcttgtggagaagggctgctttttttcagtcctacattccttcattttttttttcattcttgaattcattgttttgtgggatctaagacccaggggtcatttgagaggtttgacagtatcttttctgaccagttgccacatgacttgcttgaccctgagcctgtggaaatggcatagggaccagtctactacccactgggcctggtgtgtagagggggagagggtagcaaggtgcttctctacgcccatgacttgggagcaggtcttggcctccttcatgagagtctagtgccatgtcctgtcccatgatctggaccctgggactgtcttggcatcttaactgcagtttcaatgaggcagagggcaaagagagaccaagatcagaggggttcattatacccctggctagagaacccagctactgacatgcaagcagcttggggctggctggacacaggtactaggcccattgtttccaggtgaagctttcatcacagaacagtgttgtctccacctggccttagatggcacgccatgattcgggcctggatagactgcctgcgtccttaccactgatctggccaagaatgaggccctcccaacactttcactccctctccaagccttgatgggacctccacttatttaggcctcatgtgctttgaagaagctttgagagccaatgtgtcttccacgggtctcttttttgctacaagtaatcagccccatgtgttctcttaaactgagaattgcacctgggcaattcctgttttctaaggtggtctctgctgctatttaacaacccagagtaggcctctgtgaggcttcagtggcctcagaaaccagagggtccagatagggggcctgcttgggccctctgctgccaactgctcaaacctgctttagctccagccacttgtggcaaacaacctcgtttccttacaaattccagcatgtgactttggtgccgttacttgtgaaaaatctattctgttgtctttgatgtgtccaagaaaattcgtgtagtttacgtaaaaatatctgactcacaagaaagccaactgtatgtcttgtgatgggacagttcataatgtagttgctagaccactttacaaattgttcttgtcaccagatgtgttcagacattgctgtgcaattgttggggagggtagggggaaaggcgagaggagatacttattggtctttttgtttaataccttccccaagaggggacagtctggccaacttgctccagtaatgcaataaagacattgcaataaagtaa

SEQ ID NO: 115294 - DNA, 5174 bp, Artificial Sequence
  derived and/or modified sequence
aaccggcctcagccaatcaccacccaccttgcctctcttccctcgccccactccctcctcgcctggctcgcgtgctcccggcactgactcctggagtgcggccagcgcccggatcgtaccattctgattgaggctgggggagagcgcggatggctgattggggagccgaagcctagagagcggtggggagacgtgaaagtcgagatggagagcagctttttgaacatgttctcaggcacttgacagaatcccgcgcgatgtacaatacggtgtggagtatggaccgcgatgacgcagactggagggaggtgatgatgccctattcgacagaactgatattttatattgaaatggatcctccagctcttccaccaaagccacctaagccaatgacttcagcagttccaaatggaatgaaggacagttctgtttctcttcaggatgcagaatggtactggggggatatttcaagggaggaggtaaatgacaaattgcgggatatgccagatgggaccttcttggtccgagatgcctcaacaaaaatgcagggagattatactttgactttgcggaagggaggcaataataagttaataaagatctatcaccgggatggtaaatatggcttttctgatcctctgacatttaattccgtggtggagctcattaaccactatcaccatgaatctcttgctcagtacaatcccaaacttgatgtgaagctgatgtacccagtgtccagataccaacaggatcagttggtaaaagaagataatattgatgcagtaggtaaaaaactgcaagaataccactctcagtatcaggagaagagtaaagagtatgataggctgtatgaagaatatactagaacatcccaggaaatacagatgaagaggactgcaatagaagcttttaatgaaacaattaaaatatttgaagagcagtgtcacacacaagaacaacatagcaaagaatatattgagcgatttcgcagagaggggaatgaaaaggagattgaacgaattatgatgaattatgataaattgaaatcacgtctgggtgagattcatgatagcaaaatgcgtctagagcaggatttgaagaatcaagctttggacaaccgagaaatagataaaaaaatgaatagcatcaaacctgacctgatccagctgcgaaagatccgagatcaacaccttgtatggctcaatcacaaaggagtgagacagaaacgcctgaatgtctggctgggaattaagaatgaggatgctgatgagaactattttatcaatgaggaagatgaaaacctgccccattatgatgagaaaacctggtttgttgaggatatcaatcgagtacaagcagaggacttgctttatgggaaacctgatggtgcattcttaattcgtgagagtagcaagaaaggatgctatgcttgctctgtggtggccgatggggaagtgaagcactgtgtgatctacagcactgctcggggctatggctttgcagagccctacaacctgtacagctctctgaaggagctagtgctccattaccagcagacatccttggttcagcacaacgactccctcaacgtcaggcttgcctaccctgttcatgcacagatgccctcgctttgcagataaagaggaagtgggaagagaggtggttctctggcatttttttctacagtttttattagactacgatgagggcattctttctacatagactgcttgttttgcacaagaagtgattttgtgaatgtgaagtggagaggccgagcagcagccggccgggatgggggcattagaggcctgaggttctctaggactcagccatgccgctgcactgacatactaagctggaagcagatgttttttttgaaagtctgtttcattggggtttttgttttgtttagccagacaccctcaacagaatattaggcttgatggttatagcgggtggggttgtatttggaagcctctgaagagaccatgtctttttaaaatctaactcttgagagtgcagcaggggcatggctctgctgggagttgtgttttgctttggcagtctctcttccccccacgaagaaggctgtttaggttttgtgatagaatgggatttgatgaaaaagacaaccaaaggaaaatggggaggcttgggatttcatttaaataatctaagccaagatgataaaaaaaaccttcaactgaaggtattttgtttcttaccaacataatttaggcttcagcatctcaccagcccctccctctgaagaagtattatgttcagaagccaacaaaacagtttgttgccagaccaatgtttgatgggaaaacgtggcactcatagttgaatgtatacttctgtaccaaaacttgaacataaaaagactagaatttgtgagttttagcaaacgctaaaattgatcactgtaactaaccccttctgtccttcctgcctgtttctctgagatgaggaatagcattctttttgtggggatggtgagctttgaatcataaaatgaagttggtgcttgtatggtgtttccttagcctaaagaatgatctgttgtttgaaacctttgtaacttgtttgtatgagtaaagaaaaggtgcaatgcagtgcttttagatggcttgatataccaaataacaatatagaacaacattattatatgtgcttccccaagtttaaaggccctgcagaaatagtaaacatggtttaatttcccttcatttccccctcctttgctggatggggttttgggagctataggttgctaaggaggggagtcagattgtggtcaggtgcctcagtaaatcacagacccaggggccctgtggtccagggtgagagtcacaccacattacacatgtgcttccatacagtggtttctgaagcttttgcagggagagaagatggcttagtgtttagactgttagtagaagccatctggaagcttttctctttgcctttttttgtgatcctgccattaaggctatgtgcagtctgccctcctgctccagtggccttgattttaggccaggaatcttctgctccatgtggcttaagccttccagctgagtgaagctaggcaaatggagtgggggcaggcatctattcctgcccccatcatgccccacacccatcagtcaacactcatttgacaaatagagtccagctgcctctgagccaatcctgggaccataataggctcagagtgagtcagctgtttgaacccaaagctgtgcagtcaggcaccctggctgagctagagaagccagtacctgcatcttggtttataaggcttacagctaggaaagctctagttctgggggtgaaagaaaaatattagtttacctgagcacttatttccatgacagggtctaaaatatggaccatgatgtagacacagatttttaattttggaaaaacctccagttactagtgacgaggatagaaagggaagtgcttctctttggctttttcttggttacactgcagtttcaggattgggtgagacagagacaaatgaacccccctctaaagtcatttaactaatagccagcacatcccttccccaaactgtcaattgaaatcttaactgaaagttttactgaataataccaagctaattgctgttgggcacacctggatggctttgcacctggtgttgaacctgctgaagcaggtggatgctcaagattacgtgcaaggaatccctcccatctggtactaaaatttcagtgtgttctgagtgtcttttaaaccaaaatggaaatacagatacagggctgtagtattcagtaatgtgtctgctccttgttgggcagacaccagcggtgtgcagggagagaccaagtaccatctttatctacacttgggctggcttgtggagaagggctgctttttttcagtcctacattccttcattttttttttcattcttgaattcattgttttgtgggatctaagacccaggggtcatttgagaggtttgacagtatcttttctgaccagttgccacatgacttgcttgaccctgagcctgtggaaatggcatagggaccagtctactacccactgggcctggtgtgtagagggggagagggtagcaaggtgcttctctacgcccatgacttgggagcaggtcttggcctccttcatgagagtctagtgccatgtcctgtcccatgatctggaccctgggactgtcttggcatcttaactgcagtttcaatgaggcagagggcaaagagagaccaagatcagaggggttcattatacccctggctagagaacccagctactgacatgcaagcagcttggggctggctggacacaggtactaggcccattgtttccaggtgaagctttcatcacagaacagtgttgtctccacctggccttagatggcacgccatgattcgggcctggatagactgcctgcgtccttaccactgatctggccaagaatgaggccctcccaacactttcactccctctccaagccttgatgggacctccacttatttaggcctcatgtgctttgaagaagctttgagagccaatgtgtcttccacgggtctcttttttgctacaagtaatcagccccatgtgttctcttaaactgagaattgcacctgggcaattcctgttttctaaggtggtctctgctgctatttaacaacccagagtaggcctctgtgaggcttcagtggcctcagaaaccagagggtccagatagggggcctgcttgggccctctgctgccaactgctcaaacctgctttagctccagccacttgtggcaaacaacctcgtttccttacaaattccagcatgtgactttggtgccgttacttgtgaaaaatctattctgttgtctttgatgtgtccaagaaaattcgtgtagtttacgtaaaaatatctgactcacaagaaagccaactgtatgtcttgtgatgggacagttcataatgtagttgctagaccactttacaaattgttcttgtcaccagatgtgttcagacattgctgtgcaattgttggggagggtagggggaaaggcgagaggagatacttattggtctttttgtttaataccttccccaagaggggacagtctggccaacttgctccagtaatgcaataaagacattgcaataaagt

SEQ ID NO: 115295 - protein, 366 aa, Artificial Sequence
  derived and/or modified sequence
MYNTVWSMDRDDADWREVMMPYSTELIFYIEMDPPAAEVNDKLRDMPDGTFLVRDASTKMQGDYTLTLRKGGNNKLIKIYHRDGKYGFSDPLTFNSVVELINHYHHESLAQYNPKLDVKLMYPVSRYQQDQLVKEDNIDAVGKKLQEYHSQYQEKSKEYDRLYEEYTRTSQEIQMKRTAIEAFNETIKIFEEQCHTQEQHSKEYIERFRREGNEKEIERWLNHKGVRQKRLNVWLGIKNEDADENYFINEEDENLPHYDEKTWFVEDINRVQAEDLLYGKPDGAFLIRESSKKGCYACSVVADGEVKHCVIYSTARGYGFAEPYNLYSSLKELVLHYQQTSLVQHNDSLNVRLAYPVHAQMPSLCR

SEQ ID NO: 115296 - protein, 402 aa, Artificial Sequence
  derived and/or modified sequence
MYNTVWSMDRDDADWREVMMPYSTELIFYIEMDPPALPPKPPKPMTSAVPNGMKDSSVSLQDAEWYWGDISREEVNDKLRDMPDGTFLVRDASTKMQGDYTLTLRKGGNNKLIKIYHRDGKYGFSDPLTFNSVVELINHYHHESLAQYNPKLDVKLMYPVSRYQQDQLVKEDNIDAVGKKLQEYHSQYQEKSKEYDRLYEEYTRTSQEIQMKRTAIEAFNETIKIFEEQCHTQEQHSKEYIERFRREGNEKEIERWLNHKGVRQKRLNVWLGIKNEDADENYFINEEDENLPHYDEKTWFVEDINRVQAEDLLYGKPDGAFLIRESSKKGCYACSVVADGEVKHCVIYSTARGYGFAEPYNLYSSLKELVLHYQQTSLVQHNDSLNVRLAYPVHAQMPSLCR

SEQ ID NO: 115297 - DNA, 1101 bp, Artificial Sequence
  derived and/or modified sequence
atgtacaacaccgtgtggagcatggacagagacgacgccgactggagagaggtgatgatgccctacagcaccgagctgatcttctacatcgagatggacccccccgccgccgaggtgaacgacaagctgagagacatgcccgacggcaccttcctggtgagagacgccagcaccaagatgcagggcgactacaccctgaccctgagaaagggcggcaacaacaagctgatcaagatctaccacagagacggcaagtacggcttcagcgaccccctgaccttcaacagcgtggtggagctgatcaaccactaccaccacgagagcctggcccagtacaaccccaagctggacgtgaagctgatgtaccccgtgagcagataccagcaggaccagctggtgaaggaggacaacatcgacgccgtgggcaagaagctgcaggagtaccacagccagtaccaggagaagagcaaggagtacgacagactgtacgaggagtacaccagaaccagccaggagatccagatgaagagaaccgccatcgaggccttcaacgagaccatcaagatcttcgaggagcagtgccacacccaggagcagcacagcaaggagtacatcgagagattcagaagagagggcaacgagaaggagatcgagagatggctgaaccacaagggcgtgagacagaagagactgaacgtgtggctgggcatcaagaacgaggacgccgacgagaactacttcatcaacgaggaggacgagaacctgccccactacgacgagaagacctggttcgtggaggacatcaacagagtgcaggccgaggacctgctgtacggcaagcccgacggcgccttcctgatcagagagagcagcaagaagggctgctacgcctgcagcgtggtggccgacggcgaggtgaagcactgcgtgatctacagcaccgccagaggctacggcttcgccgagccctacaacctgtacagcagcctgaaggagctggtgctgcactaccagcagaccagcctggtgcagcacaacgacagcctgaacgtgagactggcctaccccgtgcacgcccagatgcccagcctgtgcagatag

SEQ ID NO: 115298 - DNA, 1209 bp, Artificial Sequence
  derived and/or modified sequence
atgtacaacaccgtgtggagcatggacagagacgacgccgactggagagaggtgatgatgccctacagcaccgagctgatcttctacatcgagatggacccccccgccctgccccccaagccccccaagcccatgaccagcgccgtgcccaacggcatgaaggacagcagcgtgagcctgcaggacgccgagtggtactggggcgacatcagcagagaggaggtgaacgacaagctgagagacatgcccgacggcaccttcctggtgagagacgccagcaccaagatgcagggcgactacaccctgaccctgagaaagggcggcaacaacaagctgatcaagatctaccacagagacggcaagtacggcttcagcgaccccctgaccttcaacagcgtggtggagctgatcaaccactaccaccacgagagcctggcccagtacaaccccaagctggacgtgaagctgatgtaccccgtgagcagataccagcaggaccagctggtgaaggaggacaacatcgacgccgtgggcaagaagctgcaggagtaccacagccagtaccaggagaagagcaaggagtacgacagactgtacgaggagtacaccagaaccagccaggagatccagatgaagagaaccgccatcgaggccttcaacgagaccatcaagatcttcgaggagcagtgccacacccaggagcagcacagcaaggagtacatcgagagattcagaagagagggcaacgagaaggagatcgagagatggctgaaccacaagggcgtgagacagaagagactgaacgtgtggctgggcatcaagaacgaggacgccgacgagaactacttcatcaacgaggaggacgagaacctgccccactacgacgagaagacctggttcgtggaggacatcaacagagtgcaggccgaggacctgctgtacggcaagcccgacggcgccttcctgatcagagagagcagcaagaagggctgctacgcctgcagcgtggtggccgacggcgaggtgaagcactgcgtgatctacagcaccgccagaggctacggcttcgccgagccctacaacctgtacagcagcctgaaggagctggtgctgcactaccagcagaccagcctggtgcagcacaacgacagcctgaacgtgagactggcctaccccgtgcacgcccagatgcccagcctgtgcagatag

SEQ ID NO: 115299 - DNA, 621 bp, Artificial Sequence
  derived and/or modified sequence
atgtacaacaccgtgtggagcatggacagagacgacgccgactggagagaggtgatgatgccctacagcaccgagctgatcttctacatcgagatggacccccccgccctgccccccaagccccccaagcccatgaccagcgccgtgcccaacggcatgaaggacagcagcgtgagcctgcaggacgccgagtggtactggggcgacatcagcagagaggaggtgaacgacaagctgagagacatgcccgacggcaccttcctggtgagagacgccagcaccaagatgcagggcgactacaccctgaccctgagaaagggcggcaacaacaagctgatcaagatctaccacagagacggcaagtacggcttcagcgaccccctgaccttcaacagcgtggtggagctgatcaaccactaccaccacgagagcctggcccagtacaaccccaagctggacgtgaagctgatgtaccccgtgagcagataccagcaggaccagctggtgaaggaggacaacatcgacgccgtgggcaagaagctgcaggagtaccacagccagtaccaggagaagagcaaggagtacgacagactgtacgaggagtacaccagaaccagctag

SEQ ID NO: 115300 - DNA, 1101 bp, Artificial Sequence
  derived and/or modified sequence
atgtacaacaccgtctggtctatggaccgggatgatgcagattggagagaagtgatgatgccgtactcaactgaattgattttctatatcgaaatggaccccccagcagcagaagtgaatgacaagctgcgggatatgcccgacgggacattcctggtcagagacgcatcaacaaagatgcagggggactatacactaacactgagaaaggggggtaacaacaaactcatcaaaatctatcaccgcgacgggaaatatggcttttctgatcctctgacgttcaactccgtggtcgaattaatcaaccactaccatcatgagagcctggctcagtataaccccaagctggacgtcaagttgatgtaccctgtttcacggtaccagcaggaccagctcgtcaaggaagataacattgacgctgtgggaaagaagcttcaggagtaccattcacaataccaggaaaaatccaaagaatacgaccggttatacgaggaatacacacggacatctcaggagattcagatgaagagaaccgccatcgaagcgtttaatgaaacgattaagatctttgaggagcaatgccatacacaggagcagcacagcaaagaatatatcgagcgatttagaagagaggggaatgaaaaggagatcgaacggtggttgaaccacaagggagtgcggcagaaaaggttaaatgtgtggctgggcattaaaaacgaggacgcagatgagaactacttcatcaatgaagaggatgaaaacctgccacactacgacgaaaaaacatggttcgtcgaagatataaaccgagtgcaagccgaagacctcctgtatggtaagccggatggcgcattcctgattagggagtcttctaaaaagggctgctatgcctgctcggtcgtagctgacggcgaggtgaagcactgcgttatttattccaccgctcgaggatacggttttgccgagccctataacctgtactcaagcctaaaagagcttgtcttgcattatcagcagacctctctcgtgcagcacaatgattccctcaatgtgaggttagcttatccagtacacgctcaaatgccctcactttgtagatag

SEQ ID NO: 115301 - DNA, 1209 bp, Artificial Sequence
  derived and/or modified sequence
atgtataatacagtttggagcatggatcgggacgatgccgactggagggaagtcatgatgccatactccactgagcttatattttatatcgagatggatccaccagccctgccaccaaaacctccgaaaccaatgacttccgctgtacctaacggaatgaaggatagttctgtttcactgcaagacgcagagtggtattggggggacatttcaagagaggaggtgaatgacaaacttcgtgatatgccagacggaactttcttggttagggatgccagcacgaagatgcagggagattacacgctgacccttcggaaggggggtaataacaaactcatcaagatctaccatcgtgatggcaaatacggcttctccgatcccttgacttttaactcagtggtggagctgatcaatcattatcaccatgagtcactggcacagtataatcccaagctagacgtgaagctgatgtaccctgtctcgagataccaacaggaccagctcgtaaaggaggataacatcgacgctgtcggaaaaaagctgcaggaataccattcacagtatcaggagaaaagtaaagagtacgaccggctctatgaggagtatacaaggacaagtcaagagatccagatgaaaagaacggccatcgaggcattcaacgagacaatcaagatattcgaggaacaatgccatacccaagagcagcattccaaagagtacatcgagaggttccgcagagagggaaatgaaaaggagatcgagcggtggctgaaccacaaaggtgttcgacagaaaagactaaatgtgtggctcggaatcaaaaatgaggacgctgacgagaactatttcatcaacgaggaagatgagaatctgccccattacgacgaaaaaacctggttcgtggaagatatcaaccgggtgcaggccgaggatctcttatatggtaagccggacggggcctttctgattagagagtcgtcaaaaaagggatgctatgcctgttctgtcgtggctgatggcgaggtaaagcattgcgtgatctacagcactgcacgcggttatgggtttgcagagccgtacaacctgtacagctcactaaaagaattggttttgcattatcagcaaacatccctcgtgcagcacaacgacagcctaaatgtccgtctcgcctatcctgttcacgctcagatgcctagcttatgtcgctag

SEQ ID NO: 115302 - DNA, 1209 bp, Artificial Sequence
  derived and/or modified sequence
atgtacaacactgtctggagcatggaccgagatgatgccgattggagggaagttatgatgccttacagcacagaactcatattctacatcgagatggatccgccagccctgccccccaaacctcctaaacccatgaccagcgccgttcccaacggaatgaaggactctagtgtgtcattacaggacgctgaatggtattggggagacataagtcgtgaagaagtcaacgacaaactgagggacatgcctgatggcacattcctcgtccgtgacgccagtactaagatgcagggtgactacaccctaaccctacgtaagggtgggaataataagttaatcaagatctaccatcgggatgggaaatatggattctctgacccactgacctttaattccgtggtcgagctaattaaccattaccatcacgagtctctcgctcaatataacccaaagctggacgttaaactcatgtatccggtatccaggtaccagcaggaccagctggtgaaggaagacaatatcgatgcagtcggtaaaaagcttcaggagtaccactcccagtatcaagagaagtcaaaggaatacgaccggctatatgaagagtacactcgcaccagccaagaaatccagatgaagcggactgccatcgaggcttttaacgagactatcaagatatttgaggaacagtgccatacacaggaacagcactccaaggagtacatcgaaaggttccgccgcgaaggcaacgaaaaagagatcgagaggtggctgaaccataaaggagtgaggcagaaaagacttaatgtgtggcttggaatcaaaaatgaggacgcggacgagaactatttcatcaacgaggaagatgaaaatttgcctcattatgatgaaaaaacatggtttgtggaggatatcaatagggtccaagccgaagatttgctctacggaaagcctgatggagccttcctgatacgggagtcatctaagaagggctgttacgcatgttcggtggttgccgacggagaagtaaaacactgcgtcatctactcgactgccaggggatacgggttcgctgaaccttacaacttgtattctagcctgaaagaactggtgctgcattaccaacaaacctccttggtgcagcacaatgattccttaaacgtgaggcttgcatacccggtccatgcacagatgccaagtctgtgtaggtag

SEQ ID NO: 115303 - DNA, 621 bp, Artificial Sequence
  derived and/or modified sequence
atgtacaataccgtctggtcaatggatcgagacgacgccgactggcgtgaagttatgatgccctatagtacagaactgatcttttacatcgaaatggacccgcccgctcttccacctaaacctcccaaacccatgacaagcgccgtgccaaacgggatgaaggactcttcagtgtcgctccaagatgcggagtggtattggggcgacatcagccgagaggaggttaacgacaagctgcgagatatgccggacggcacgttcttggttcgcgacgcgtctaccaagatgcagggcgactatactctgactctgcggaaaggagggaataacaagcttatcaagatatatcatagggatggcaaatacggtttctccgaccctctgacattcaacagtgtggtggagctcataaaccactaccatcacgaatcactggctcagtacaatcctaagctggatgttaaactgatgtaccctgtatcacgatatcagcaggaccagctggtaaaggaggacaatatagacgctgtgggcaaaaaacttcaggagtatcactcacaataccaggagaagtctaaggaatatgatcgcctctacgaagagtacactagaacaagctag

SEQ ID NO: 115304 - DNA, 1101 bp, Artificial Sequence
  derived and/or modified sequence
atgtacaacacagtgtggagcatggacagagatgatgctgactggagggaggtgatgatgccctacagcacagagctgatcttctacatcgagatggaccccccagctgctgaggtgaatgacaagctgcgggacatgccagatggcaccttcctggtgagagatgccagcaccaagatgcagggcgactacaccctgaccctgaggaagggcggcaacaacaagctgatcaagatctaccacagagatggcaagtatggcttcagtgaccccctgaccttcaacagcgtggtggagctgatcaaccactaccaccacgagagcctggcccagtacaaccccaagctggatgtgaagctgatgtaccctgtgagccgctaccagcaggaccagctggtgaaggaggacaacattgatgctgtgggcaagaagctgcaggagtaccacagccagtaccaggagaagagcaaggagtatgaccggctgtatgaggagtacaccaggaccagccaggagatccagatgaagaggacagccatcgaggccttcaatgagaccatcaagatctttgaggagcagtgccacacccaggagcagcacagcaaggagtacatcgagcgcttcagaagagagggcaatgagaaggagattgagcgctggctgaaccacaagggcgtgcggcagaagaggctgaatgtgtggctgggcatcaagaatgaagatgctgatgagaactacttcatcaatgaagaagatgagaacctgccccactatgatgagaagacctggtttgtggaggacatcaacagagtgcaggccgaggacctgctgtatggcaagccagatggagccttcctgatccgggagagcagcaagaagggctgctacgcctgcagcgtggtggctgatggagaggtgaagcactgtgtgatctacagcacagcccggggctacggctttgctgagccctacaacctgtacagcagcctgaaggagctggtgctgcactaccagcagaccagcctggtgcagcacaatgacagcctgaatgtgcggctggcctaccctgtgcacgcccagatgcccagcctgtgcaggtag

SEQ ID NO: 115305 - DNA, 1209 bp, Artificial Sequence
  derived and/or modified sequence
atgtacaacacagtgtggagcatggacagagatgatgctgactggagggaggtgatgatgccctacagcacagagctgatcttctacatcgagatggaccccccagccctgccccccaagccacccaagcccatgaccagcgctgtgcccaacggcatgaaggacagctctgtgtccctgcaggatgctgagtggtactggggagacatcagccgggaggaggtgaatgacaagctgcgggacatgccagatggcaccttcctggtgagagatgccagcaccaagatgcagggcgactacaccctgaccctgaggaagggcggcaacaacaagctgatcaagatctaccacagagatggcaagtatggcttcagtgaccccctgaccttcaacagcgtggtggagctgatcaaccactaccaccacgagagcctggcccagtacaaccccaagctggatgtgaagctgatgtaccctgtgagccgctaccagcaggaccagctggtgaaggaggacaacattgatgctgtgggcaagaagctgcaggagtaccacagccagtaccaggagaagagcaaggagtatgaccggctgtatgaggagtacaccaggaccagccaggagatccagatgaagaggacagccatcgaggccttcaatgagaccatcaagatctttgaggagcagtgccacacccaggagcagcacagcaaggagtacatcgagcgcttcagaagagagggcaatgagaaggagattgagcgctggctgaaccacaagggcgtgcggcagaagaggctgaatgtgtggctgggcatcaagaatgaagatgctgatgagaactacttcatcaatgaagaagatgagaacctgccccactatgatgagaagacctggtttgtggaggacatcaacagagtgcaggccgaggacctgctgtatggcaagccagatggagccttcctgatccgggagagcagcaagaagggctgctacgcctgcagcgtggtggctgatggagaggtgaagcactgtgtgatctacagcacagcccggggctacggctttgctgagccctacaacctgtacagcagcctgaaggagctggtgctgcactaccagcagaccagcctggtgcagcacaatgacagcctgaatgtgcggctggcctaccctgtgcacgcccagatgcccagcctgtgcaggtag

SEQ ID NO: 115306 - DNA, 621 bp, Artificial Sequence
  derived and/or modified sequence
atgtacaacacagtgtggagcatggacagagatgatgctgactggagggaggtgatgatgccctacagcacagagctgatcttctacatcgagatggaccccccagccctgccccccaagccacccaagcccatgaccagcgctgtgcccaacggcatgaaggacagctctgtgtccctgcaggatgctgagtggtactggggagacatcagccgggaggaggtgaatgacaagctgcgggacatgccagatggcaccttcctggtgagagatgccagcaccaagatgcagggcgactacaccctgaccctgaggaagggcggcaacaacaagctgatcaagatctaccacagagatggcaagtatggcttcagtgaccccctgaccttcaacagcgtggtggagctgatcaaccactaccaccacgagagcctggcccagtacaaccccaagctggatgtgaagctgatgtaccctgtgagccgctaccagcaggaccagctggtgaaggaggacaacattgatgctgtgggcaagaagctgcaggagtaccacagccagtaccaggagaagagcaaggagtatgaccggctgtatgaggagtacaccaggaccagctag

SEQ ID NO: 115307 - DNA, 1101 bp, Artificial Sequence
  derived and/or modified sequence
atgtacaacaccgtgtggagcatggaccgggacgacgccgactggcgtgaagtgatgatgccctacagcaccgagcttatcttctacatcgagatggatcctccagccgctgaagttaatgataagctccgggatatgcccgatggcacattcctggtgcgggatgcttcaacaaagatgcagggtgactacacattaacattgcgtaagggcgggaataataaactcatcaaaatttatcacagagatgggaagtatggcttctccgacccactcacattcaactccgtggtggagctaattaatcattaccaccatgagtccctggctcagtataatccgaagctggacgtaaaactgatgtatccagtgagccggtatcaacaggatcagttagtaaaagaggacaatattgacgcggtgggcaagaaactgcaggaatatcactcacaatatcaggagaaaagcaaggaatatgataggttgtatgaagaatataccagaacctcacaggagatccagatgaagagaactgcaatcgaggcattcaacgagaccattaaaattttcgaagaacaatgccacacccaggagcagcattctaaagaatacatcgagcggtttaggagagaaggcaacgaaaaggaaatcgaaaggtggttaaatcacaagggggtgcggcagaagcggcttaatgtgtggttggggattaagaatgaggacgccgatgagaattatttcattaacgaggaggatgagaacctgcctcactacgacgaaaaaacctggttcgtcgaggacattaatagggttcaggctgaagacttactgtacgggaaaccagacggcgcctttttgatacgggaatcttccaagaaggggtgttatgcatgttccgtggttgcggacggcgaggtcaaacactgtgtcatttatagtactgcaagaggctatggctttgccgagccttacaatctgtacagctcacttaaagagcttgtgctgcactaccagcagacaagcctcgtccaacataatgactccctgaatgtgcgcttggcataccctgtgcatgcccagatgcccagcctgtgcaggtag

SEQ ID NO: 115308 - DNA, 1209 bp, Artificial Sequence
  derived and/or modified sequence
atgtacaacaccgtgtggagcatggaccgggacgacgccgactggcgagaggtgatgatgccatacagtaccgagctcatcttttatattgaaatggatcctccggctcttccccccaagccaccgaaacctatgacgtccgctgtaccgaacggtatgaaggacagctccgtctccttgcaggacgcagagtggtattggggtgacatttcccgagaagaagtcaacgacaagctgagagatatgccagacgggaccttcctggtgcgagacgccagcactaagatgcaaggcgactacacactgacgctcaggaaggggggaaataataaactgatcaagatctaccaccgagatggtaagtacgggtttagcgatcccctcacatttaattccgtcgtggaactcattaatcactatcatcacgaaagcctggcccagtacaatcccaagctggatgtaaaactgatgtacccagtttctcgttatcagcaggaccagctagtgaaggaggacaatattgacgcggtaggaaagaaattgcaagagtatcattcccagtaccaggagaagagcaaggagtatgacaggttgtatgaggagtatacccggacgagccaggagatacagatgaagcgaactgcaatcgaagctttcaatgaaaccataaagatctttgaggaacagtgccatacacaggagcagcactctaaggagtacattgagcggttccggagagagggcaacgaaaaagaaattgagaggtggttgaatcacaagggtgtcagacaaaaacgtcttaatgtctggctgggaatcaagaacgaggatgctgacgagaattactttattaacgaagaagatgaaaatctccctcattatgatgagaagacgtggttcgtggaggacattaatcgggtgcaggctgaagacttactgtatgggaagcccgatggtgcttttctgatcagagagagttcaaagaagggatgttacgcctgctcagtggtggcagacggagaagtcaagcattgtgtaatttactcgaccgcccgaggttacgggtttgcggaaccctacaatctctacagctctcttaaagaactcgtgctacattatcagcagacctccctggtgcagcataacgacagccttaacgtgagactggcctaccctgtacatgcccaaatgccatccctgtgcagatag

SEQ ID NO: 115309 - DNA, 1209 bp, Artificial Sequence
  derived and/or modified sequence
atgtacaacaccgtgtggagcatggaccgggacgacgccgactggcgggaagtgatgatgccttattctactgagttgatcttctacattgaaatggacccccctgcgttgccgcccaagcccccaaaaccaatgacatcagcagtcccaaacggcatgaaggactcgtctgtctctcttcaggacgcagagtggtactggggggacattagccgtgaggaagtaaacgacaagctgcgagatatgcctgatggaactttcttggtgcgcgatgcaagtacaaagatgcaaggcgattatacacttaccctgcgcaaggggggaaacaacaagcttatcaagatataccacagagacggaaagtatggctttagcgacccgctaacctttaacagcgtggttgagctgatcaatcactatcatcatgagtccttggcacagtataaccctaagcttgacgttaaacttatgtaccccgttagcagatatcagcaagaccagctcgttaaggaagacaatatcgacgccgtgggcaagaagctgcaagagtaccactcccagtatcaggagaaatcaaaagagtacgaccggctatacgaagagtacacaagaacaagccaagagattcaaatgaagcgcaccgcgatcgaggcctttaacgagaccattaaaatctttgaggaacaatgtcacacccaagaacagcatagtaaagaatatatcgagagatttcgtagggaagggaacgagaaggagattgagcggtggctcaaccacaaaggggttcgacagaagcggttgaacgtctggttgggtatcaagaatgaagacgccgatgaaaactacttcattaatgaagaagatgagaacctccctcattacgatgagaagacttggtttgtagaggacattaaccgcgtgcaggccgaggacctgctctacggaaaacctgacggtgcttttctcattagagagtcctctaagaaagggtgctacgcatgtagcgttgtagccgatggagaggtcaagcactgtgtgatctattctactgccaggggctacggcttcgctgaaccttataacctctatagctcactgaaagagctggtccttcactaccagcagactagtctcgtgcagcataatgacagtttgaacgtccgcctggcttacccagtgcacgcacagatgccttctctctgtcgctag

SEQ ID NO: 115310 - DNA, 621 bp, Artificial Sequence
  derived and/or modified sequence
atgtacaacaccgtgtggagcatggaccgggacgacgccgactggcgcgaagtgatgatgccatacagcaccgagcttatcttttacattgagatggatcctccagcccttccacctaagcccccaaagcctatgactagcgccgtccccaacgggatgaaggatagctccgtatcccttcaggatgcagagtggtactggggtgatatatcgcgggaagaagtgaacgataaactgagagacatgccagacggaaccttcctcgtgagagatgcaagtaccaagatgcagggggattatacacttaccctcagaaagggggggaataacaaactcatcaagatctaccacagggacggaaagtacgggttcagcgatcctctgacattcaattctgtggtggaacttatcaaccactaccatcacgagagcctggcccagtacaatccgaaactcgatgttaaacttatgtatcctgtgagtcgataccagcaggaccagctggttaaggaggacaatatcgatgcagttgggaaaaagttacaagaatatcacagtcagtatcaggaaaaatctaaggaatatgatcgcctctatgaggaatatacccgtactagttag

SEQ ID NO: 115311 - DNA, 1101 bp, Artificial Sequence
  derived and/or modified sequence
atgtacaacaccgtttggtccatggaccgcgatgatgcggactggagagaagtcatgatgccgtacagcactgagctcattttctacattgaaatggacccacctgcagcggaagtgaatgacaaattgcgagatatgcccgacgggactttcctggtgagggatgcatcaactaagatgcagggagactacacactaacattaagaaagggcggaaataataaacttattaagatatatcatagggacggtaagtacggctttagcgaccctctcaccttcaactcagtggtggagctaataaatcactaccatcacgagtctctcgcgcaatacaaccccaagctcgacgtaaaactcatgtatccagtttcaagatatcagcaggatcagctggtgaaggaggataacatcgacgctgtaggtaagaagctccaggaataccattcccagtaccaagagaagagcaaggaatatgatagactctatgaagaatatacacgtacatctcaggagattcagatgaaaaggacagcaattgaagcctttaacgagacaataaagattttcgaagagcaatgccatactcaagagcagcattcgaaggaatacatcgaacggtttaggcgcgagggtaatgagaaggagatcgagcggtggctgaaccacaagggtgtccgtcaaaaaaggctgaatgtgtggctggggattaagaatgaagatgcagacgagaattacttcatcaacgaagaggacgagaacttaccgcattatgacgaaaaaacctggttcgtggaggacatcaatagagtacaagccgaggatctgctgtatgggaagccggatggcgcattcctgatccgggaatctagtaagaagggctgctacgcctgttccgtggtcgcagacggcgaagtcaaacactgtgtgatatactctactgcaagagggtacggtttcgctgaaccatataatctgtacagctcgcttaaagagctcgtactgcattaccagcagacctccttagtgcagcataatgacagcctgaacgtccgcctggcctatccggtgcacgctcagatgccttcactctgccgttag

SEQ ID NO: 115312 - DNA, 1209 bp, Artificial Sequence
  derived and/or modified sequence
atgtacaacacagtttggagcatggaccgagatgacgcagattggcgtgaggtcatgatgccctactctacagaattgattttctacattgaaatggacccacccgcactcccaccaaagcccccaaaacccatgacaagtgcggtgcccaatgggatgaaggacagttccgtgtccctgcaagatgccgagtggtactggggtgatatcagccgggaagaagtgaacgacaaacttagggatatgccggacggcacttttctggtccgcgacgcaagtaccaaaatgcagggtgactatactctgacgttgcgtaagggcggaaacaacaaacttattaagatctatcaccgggacggaaagtatgggttttcagaccctctgacctttaattccgtggtcgagctaataaatcattatcatcatgaatctctcgctcagtataatcctaagctggatgttaaactgatgtaccctgtgagtagataccagcaagatcagctggtcaaagaagacaacattgatgcagtggggaagaagctgcaggaatatcattcacaatatcaggagaagtcgaaagagtacgacagactgtacgaggagtacacgcgaaccagccaagaaatacaaatgaagcgcacagcaatcgaagcttttaacgagaccattaagattttcgaggaacagtgccatactcaggagcagcactccaaagagtatattgagaggtttcggagggaaggcaatgagaaggaaatcgagaggtggctgaaccacaaaggcgtgagacaaaaaagacttaacgtctggctcggaattaagaacgaggatgcagatgagaattattttattaacgaggaggacgagaacctacctcactacgacgaaaaaacatggtttgtggaggacataaatcgggtccaagccgaagatctgttatatgggaagccagacggagcctttttaatcagggagtcatctaagaagggctgctatgcctgtagcgtggtggccgacggtgaggtgaagcactgtgtcatctactccacagccaggggttatgggtttgccgaaccctacaatttgtatagctccctgaaagagctcgtgcttcactaccagcagaccagcttggtgcagcataacgacagcctgaatgtgcggcttgcttacccggtacatgctcagatgccctcgctgtgtaggtag

SEQ ID NO: 115313 - DNA, 1209 bp, Artificial Sequence
  derived and/or modified sequence
atgtataacactgtatggtccatggatcgcgatgacgctgattggagggaagtgatgatgccgtactcaacggagttgattttttatattgaaatggaccccccagccctgccacctaaaccgccaaagcccatgacttcagctgtgccaaacggtatgaaagactcatccgtgagcctgcaggacgccgaatggtactggggagacatctctcgcgaagaggtcaatgacaagttgagagatatgccagatggcacatttctcgtgcgcgatgcatccactaagatgcagggcgactacacactgacactacgtaagggaggcaataacaaactgatcaaaatctaccaccgcgatggcaaatatggattctccgacccactgactttcaactctgtagtagagttaatcaatcactatcatcacgagagcctggcacagtacaacccgaagttggatgtgaagctgatgtaccctgttagccgctatcagcaagaccagttagtgaaggaagacaatatcgacgcagtaggcaagaaactgcaggaataccactcgcagtatcaggagaagagcaaagagtacgatagactctatgaggagtacacgagaactagccaagagatacagatgaagcgtacggccattgaggcgttcaacgaaacgattaaaatttttgaagagcagtgtcacacccaggaacagcatagcaaagagtacatcgagcggtttcggagggaaggaaacgaaaaagaaattgagcgttggctgaatcataaaggtgtacgccagaagagactgaacgtgtggctgggtataaagaatgaagacgctgacgaaaattatttcatcaatgaggaagatgaaaatcttccccattacgatgagaaaacctggttcgttgaagacattaatcgggtgcaggcagaggatctcctctatggtaagcccgatggtgcctttctaattagagaatcatccaagaagggatgctatgcgtgctcagtggtggctgatggggaggtgaaacattgcgtgatatactcaacagctaggggctatgggttcgcggaaccctacaacctttattcatccctcaaggaactggtgctgcattaccagcagacatcgctggtgcaacacaacgattcactgaacgtcagacttgcatatccagtgcacgcccagatgcccagcctttgcaggtag

SEQ ID NO: 115314 - DNA, 621 bp, Artificial Sequence
  derived and/or modified sequence
atgtataacacagtctggtcaatggacagagacgacgctgattggagggaggtgatgatgccatacagcaccgaactcatcttctacattgaaatggaccccccagctctgcccccaaagccgccaaagcctatgacctctgcggttcccaacggaatgaaagactcttctgttagcctacaggacgcggaatggtattggggcgacatttctcgcgaagaggtgaacgacaaactgagggacatgccggacggaacctttttggtgagggacgcctccacaaagatgcaaggtgattatacccttaccctaagaaagggcggaaacaataagttgataaaaatctatcacagggatgggaaatatggatttagtgatcccctcacctttaattccgtggtcgagcttatcaaccactaccaccatgagagcttggctcaatacaaccccaagctggatgttaagctgatgtaccccgtgagtagataccagcaagaccagttggtgaaagaggataatatcgacgcagtcggtaaaaaactgcaagagtatcactcacaatatcaggagaagagtaaggagtatgataggctgtacgaagagtacacccggaccagctag

SEQ ID NO: 115315 - DNA, 4889 bp, Artificial Sequence
  derived and/or modified sequence
aaccggcctcagccaatcaccacccaccttgcctctcttccctcgccccactccctcctcgcctggctcgcgtgctcccggcactgactcctggagtgcggccagcgcccggatcgtaccattctgattgaggctgggggagagcgcggatggctgattggggagccgaagcctagagagcggtggggagacgtgaaagtcgagatggagagcagctttttgaacatgttctcaggcacttgacagaatcccgcgcgatgtacaatacggtgtggagtatggaccgcgatgacgcagactggagggaggtgatgatgccctattcgacagaactgatattttatattgaaatggatcctccagctgcggaggtaaatgacaaattgcgggatatgccagatgggaccttcttggtccgagatgcctcaacaaaaatgcagggagattatactttgactttgcggaagggaggcaataataagttaataaagatctatcaccgggatggtaaatatggcttttctgatcctctgacatttaattccgtggtggagctcattaaccactatcaccatgaatctcttgctcagtacaatcccaaacttgatgtgaagctgatgtacccagtgtccagataccaacaggatcagttggtaaaagaagataatattgatgcagtaggtaaaaaactgcaagaataccactctcagtatcaggagaagagtaaagagtatgataggctgtatgaagaatatactagaacatcccaggaaatacagatgaagaggactgcaatagaagcttttaatgaaacaattaaaatatttgaagagcagtgtcacacacaagaacaacatagcaaagaatatattgagcgatttcgcagagaggggaatgaaaaggagattgaacgatggctcaatcacaaaggagtgagacagaaacgcctgaatgtctggctgggaattaagaatgaggatgctgatgagaactattttatcaatgaggaagatgaaaacctgccccattatgatgagaaaacctggtttgttgaggatatcaatcgagtacaagcagaggacttgctttatgggaaacctgatggtgcattcttaattcgtgagagtagcaagaaaggatgctatgcttgctctgtggtggccgatggggaagtgaagcactgtgtgatctacagcactgctcggggctatggctttgcagagccctacaacctgtacagctctctgaaggagctagtgctccattaccagcagacatccttggttcagcacaacgactccctcaacgtcaggcttgcctaccctgttcatgcacagatgccctcgctttgcagataaagaggaagtgggaagagaggtggttctctggcatttttttctacagtttttattagactacgatgagggcattctttctacatagactgcttgttttgcacaagaagtgattttgtgaatgtgaagtggagaggccgagcagcagccggccgggatgggggcattagaggcctgaggttctctaggactcagccatgccgctgcactgacatactaagctggaagcagatgttttttttgaaagtctgtttcattggggtttttgttttgtttagccagacaccctcaacagaatattaggcttgatggttatagcgggtggggttgtatttggaagcctctgaagagaccatgtctttttaaaatctaactcttgagagtgcagcaggggcatggctctgctgggagttgtgttttgctttggcagtctctcttccccccacgaagaaggctgtttaggttttgtgatagaatgggatttgatgaaaaagacaaccaaaggaaaatggggaggcttgggatttcatttaaataatctaagccaagatgataaaaaaaaccttcaactgaaggtattttgtttcttaccaacataatttaggcttcagcatctcaccagcccctccctctgaagaagtattatgttcagaagccaacaaaacagtttgttgccagaccaatgtttgatgggaaaacgtggcactcatagttgaatgtatacttctgtaccaaaacttgaacataaaaagactagaatttgtgagttttagcaaacgctaaaattgatcactgtaactaaccccttctgtccttcctgcctgtttctctgagatgaggaatagcattctttttgtggggatggtgagctttgaatcataaaatgaagttggtgcttgtatggtgtttccttagcctaaagaatgatctgttgtttgaaacctttgtaacttgtttgtatgagtaaagaaaaggtgcaatgcagtgcttttagatggcttgatataccaaataacaatatagaacaacattattatatgtgcttccccaagtttaaaggccctgcagaaatagtaaacatggtttaatttcccttcatttccccctcctttgctggatggggttttgggagctataggttgctaaggaggggagtcagattgtggtcaggtgcctcagtaaatcacagacccaggggccctgtggtccagggtgagagtcacaccacattacacatgtgcttccatacagtggtttctgaagcttttgcagggagagaagatggcttagtgtttagactgttagtagaagccatctggaagcttttctctttgcctttttttgtgatcctgccattaaggctatgtgcagtctgccctcctgctccagtggccttgattttaggccaggaatcttctgctccatgtggcttaagccttccagctgagtgaagctaggcaaatggagtgggggcaggcatctattcctgcccccatcatgccccacacccatcagtcaacactcatttgacaaatagagtccagctgcctctgagccaatcctgggaccataataggctcagagtgagtcagctgtttgaacccaaagctgtgcagtcaggcaccctggctgagctagagaagccagtacctgcatcttggtttataaggcttacagctaggaaagctctagttctgggggtgaaagaaaaatattagtttacctgagcacttatttccatgacagggtctaaaatatggaccatgatgtagacacagatttttaattttggaaaaacctccagttactagtgacgaggatagaaagggaagtgcttctctttggctttttcttggttacactgcagtttcaggattgggtgagacagagacaaatgaacccccctctaaagtcatttaactaatagccagcacatcccttccccaaactgtcaattgaaatcttaactgaaagttttactgaataataccaagctaattgctgttgggcacacctggatggctttgcacctggtgttgaacctgctgaagcaggtggatgctcaagattacgtgcaaggaatccctcccatctggtactaaaatttcagtgtgttctgagtgtcttttaaaccaaaatggaaatacagatacagggctgtagtattcagtaatgtgtctgctccttgttgggcagacaccagcggtgtgcagggagagaccaagtaccatctttatctacacttgggctggcttgtggagaagggctgctttttttcagtcctacattccttcattttttttttcattcttgaattcattgttttgtgggatctaagacccaggggtcatttgagaggtttgacagtatcttttctgaccagttgccacatgacttgcttgaccctgagcctgtggaaatggcatagggaccagtctactacccactgggcctggtgtgtagagggggagagggtagcaaggtgcttctctacgcccatgacttgggagcaggtcttggcctccttcatgagagtctagtgccatgtcctgtcccatgatctggaccctgggactgtcttggcatcttaactgcagtttcaatgaggcagagggcaaagagagaccaagatcagaggggttcattatacccctggctagagaacccagctactgacatgcaagcagcttggggctggctggacacaggtactaggcccattgtttccaggtgaagctttcatcacagaacagtgttgtctccacctggccttagatggcacgccatgattcgggcctggatagactgcctgcgtccttaccactgatctggccaagaatgaggccctcccaacactttcactccctctccaagccttgatgggacctccacttatttaggcctcatgtgctttgaagaagctttgagagccaatgtgtcttccacgggtctcttttttgctacaagtaatcagccccatgtgttctcttaaactgagaattgcacctgggcaattcctgttttctaaggtggtctctgctgctatttaacaacccagagtaggcctctgtgaggcttcagtggcctcagaaaccagagggtccagatagggggcctgcttgggccctctgctgccaactgctcaaacctgctttagctccagccacttgtggcaaacaacctcgtttccttacaaattccagcatgtgactttggtgccgttacttgtgaaaaatctattctgttgtctttgatgtgtccaagaaaattcgtgtagtttacgtaaaaatatctgactcacaagaaagccaactgtatgtcttgtgatgggacagttcataatgtagttgctagaccactttacaaattgttcttgtcaccagatgtgttcagacattgctgtgcaattgttggggagggtagggggaaaggcgagaggagatacttattggtctttttgtttaataccttccccaagaggggacagtctggccaacttgctccagtaatgcaataaagacattgcaataaagt

SEQ ID NO: 115316 - DNA, 4997 bp, Artificial Sequence
  derived and/or modified sequence
aaccggcctcagccaatcaccacccaccttgcctctcttccctcgccccactccctcctcgcctggctcgcgtgctcccggcactgactcctggagtgcggccagcgcccggatcgtaccattctgattgaggctgggggagagcgcggatggctgattggggagccgaagcctagagagcggtggggagacgtgaaagtcgagatggagagcagctttttgaacatgttctcaggcacttgacagaatcccgcgcgatgtacaatacggtgtggagtatggaccgcgatgacgcagactggagggaggtgatgatgccctattcgacagaactgatattttatattgaaatggatcctccagctcttccaccaaagccacctaagccaatgacttcagcagttccaaatggaatgaaggacagttctgtttctcttcaggatgcagaatggtactggggggatatttcaagggaggaggtaaatgacaaattgcgggatatgccagatgggaccttcttggtccgagatgcctcaacaaaaatgcagggagattatactttgactttgcggaagggaggcaataataagttaataaagatctatcaccgggatggtaaatatggcttttctgatcctctgacatttaattccgtggtggagctcattaaccactatcaccatgaatctcttgctcagtacaatcccaaacttgatgtgaagctgatgtacccagtgtccagataccaacaggatcagttggtaaaagaagataatattgatgcagtaggtaaaaaactgcaagaataccactctcagtatcaggagaagagtaaagagtatgataggctgtatgaagaatatactagaacatcccaggaaatacagatgaagaggactgcaatagaagcttttaatgaaacaattaaaatatttgaagagcagtgtcacacacaagaacaacatagcaaagaatatattgagcgatttcgcagagaggggaatgaaaaggagattgaacgatggctcaatcacaaaggagtgagacagaaacgcctgaatgtctggctgggaattaagaatgaggatgctgatgagaactattttatcaatgaggaagatgaaaacctgccccattatgatgagaaaacctggtttgttgaggatatcaatcgagtacaagcagaggacttgctttatgggaaacctgatggtgcattcttaattcgtgagagtagcaagaaaggatgctatgcttgctctgtggtggccgatggggaagtgaagcactgtgtgatctacagcactgctcggggctatggctttgcagagccctacaacctgtacagctctctgaaggagctagtgctccattaccagcagacatccttggttcagcacaacgactccctcaacgtcaggcttgcctaccctgttcatgcacagatgccctcgctttgcagataaagaggaagtgggaagagaggtggttctctggcatttttttctacagtttttattagactacgatgagggcattctttctacatagactgcttgttttgcacaagaagtgattttgtgaatgtgaagtggagaggccgagcagcagccggccgggatgggggcattagaggcctgaggttctctaggactcagccatgccgctgcactgacatactaagctggaagcagatgttttttttgaaagtctgtttcattggggtttttgttttgtttagccagacaccctcaacagaatattaggcttgatggttatagcgggtggggttgtatttggaagcctctgaagagaccatgtctttttaaaatctaactcttgagagtgcagcaggggcatggctctgctgggagttgtgttttgctttggcagtctctcttccccccacgaagaaggctgtttaggttttgtgatagaatgggatttgatgaaaaagacaaccaaaggaaaatggggaggcttgggatttcatttaaataatctaagccaagatgataaaaaaaaccttcaactgaaggtattttgtttcttaccaacataatttaggcttcagcatctcaccagcccctccctctgaagaagtattatgttcagaagccaacaaaacagtttgttgccagaccaatgtttgatgggaaaacgtggcactcatagttgaatgtatacttctgtaccaaaacttgaacataaaaagactagaatttgtgagttttagcaaacgctaaaattgatcactgtaactaaccccttctgtccttcctgcctgtttctctgagatgaggaatagcattctttttgtggggatggtgagctttgaatcataaaatgaagttggtgcttgtatggtgtttccttagcctaaagaatgatctgttgtttgaaacctttgtaacttgtttgtatgagtaaagaaaaggtgcaatgcagtgcttttagatggcttgatataccaaataacaatatagaacaacattattatatgtgcttccccaagtttaaaggccctgcagaaatagtaaacatggtttaatttcccttcatttccccctcctttgctggatggggttttgggagctataggttgctaaggaggggagtcagattgtggtcaggtgcctcagtaaatcacagacccaggggccctgtggtccagggtgagagtcacaccacattacacatgtgcttccatacagtggtttctgaagcttttgcagggagagaagatggcttagtgtttagactgttagtagaagccatctggaagcttttctctttgcctttttttgtgatcctgccattaaggctatgtgcagtctgccctcctgctccagtggccttgattttaggccaggaatcttctgctccatgtggcttaagccttccagctgagtgaagctaggcaaatggagtgggggcaggcatctattcctgcccccatcatgccccacacccatcagtcaacactcatttgacaaatagagtccagctgcctctgagccaatcctgggaccataataggctcagagtgagtcagctgtttgaacccaaagctgtgcagtcaggcaccctggctgagctagagaagccagtacctgcatcttggtttataaggcttacagctaggaaagctctagttctgggggtgaaagaaaaatattagtttacctgagcacttatttccatgacagggtctaaaatatggaccatgatgtagacacagatttttaattttggaaaaacctccagttactagtgacgaggatagaaagggaagtgcttctctttggctttttcttggttacactgcagtttcaggattgggtgagacagagacaaatgaacccccctctaaagtcatttaactaatagccagcacatcccttccccaaactgtcaattgaaatcttaactgaaagttttactgaataataccaagctaattgctgttgggcacacctggatggctttgcacctggtgttgaacctgctgaagcaggtggatgctcaagattacgtgcaaggaatccctcccatctggtactaaaatttcagtgtgttctgagtgtcttttaaaccaaaatggaaatacagatacagggctgtagtattcagtaatgtgtctgctccttgttgggcagacaccagcggtgtgcagggagagaccaagtaccatctttatctacacttgggctggcttgtggagaagggctgctttttttcagtcctacattccttcattttttttttcattcttgaattcattgttttgtgggatctaagacccaggggtcatttgagaggtttgacagtatcttttctgaccagttgccacatgacttgcttgaccctgagcctgtggaaatggcatagggaccagtctactacccactgggcctggtgtgtagagggggagagggtagcaaggtgcttctctacgcccatgacttgggagcaggtcttggcctccttcatgagagtctagtgccatgtcctgtcccatgatctggaccctgggactgtcttggcatcttaactgcagtttcaatgaggcagagggcaaagagagaccaagatcagaggggttcattatacccctggctagagaacccagctactgacatgcaagcagcttggggctggctggacacaggtactaggcccattgtttccaggtgaagctttcatcacagaacagtgttgtctccacctggccttagatggcacgccatgattcgggcctggatagactgcctgcgtccttaccactgatctggccaagaatgaggccctcccaacactttcactccctctccaagccttgatgggacctccacttatttaggcctcatgtgctttgaagaagctttgagagccaatgtgtcttccacgggtctcttttttgctacaagtaatcagccccatgtgttctcttaaactgagaattgcacctgggcaattcctgttttctaaggtggtctctgctgctatttaacaacccagagtaggcctctgtgaggcttcagtggcctcagaaaccagagggtccagatagggggcctgcttgggccctctgctgccaactgctcaaacctgctttagctccagccacttgtggcaaacaacctcgtttccttacaaattccagcatgtgactttggtgccgttacttgtgaaaaatctattctgttgtctttgatgtgtccaagaaaattcgtgtagtttacgtaaaaatatctgactcacaagaaagccaactgtatgtcttgtgatgggacagttcataatgtagttgctagaccactttacaaattgttcttgtcaccagatgtgttcagacattgctgtgcaattgttggggagggtagggggaaaggcgagaggagatacttattggtctttttgtttaataccttccccaagaggggacagtctggccaacttgctccagtaatgcaataaagacattgcaataaagt

SEQ ID NO: 115317 - DNA, 1884 bp, Artificial Sequence
  derived and/or modified sequence
gggcagttggtgcggtcgggttggttcttacaccccggcgggagcgcccagacaagccgagctgactggacttctccggccggccccattcccgaggctgcggcagcttcggttccgagaccgaccggagaggagcccgagtcccggcctctgggggattcgctctctgcagaccagtgggaccccgaaacttgaacgcaatctccagcccccttttttgccttcctttgtcacttgcccgggtttctcccaacgtgttcttttttttcctcttcattctccctccttcgaaggacacaaaagtggcttccgcggaaagatttggaggcggtgggagcttttctccccggagagcgactgtgtagaaaggatttttgggaagccgctttttaacacctctgctctccgtcccccaagcctctgtgtaatcctctgaggagaaaagcccatagcttgaaagttcgggggcattttgttgtgttctgtaggagagagggggaggaccctgttcgggtagtttggccggactggtactggccgttggaaaacccgaagtacatttccgtgtggaacttttgcagatatatatttttagatttttaaataccagataaaaaatatatgccttctatatatctcctggcgacctgcccctgacagcgcgatgtacaatacggtgtggagtatggaccgcgatgacgcagactggagggaggtgatgatgccctattcgacagaactgatattttatattgaaatggatcctccagctcttccaccaaagccacctaagccaatgacttcagcagttccaaatggaatgaaggacagttctgtttctcttcaggatgcagaatggtactggggggatatttcaagggaggaggtaaatgacaaattgcgggatatgccagatgggaccttcttggtccgagatgcctcaacaaaaatgcagggagattatactttgactttgcggaagggaggcaataataagttaataaagatctatcaccgggatggtaaatatggcttttctgatcctctgacatttaattccgtggtggagctcattaaccactatcaccatgaatctcttgctcagtacaatcccaaacttgatgtgaagctgatgtacccagtgtccagataccaacaggatcagttggtaaaagaagataatattgatgcagtaggtaaaaaactgcaagaataccactctcagtatcaggagaagagtaaagagtatgataggctgtatgaagaatatactagaacatcccaggaaatacagatgaagaggactgcaatagaagcttttaatgaaacaattaaaatatttgaagagcagtgtcacacacaagaacaacatagcaaagaatatattgagcgatttcgcagagaggggaatgaaaaggagattgaacgatggctcaatcacaaaggagtgagacagaaacgcctgaatgtctggctgggaattaagaatgaggatgctgatgagaactattttatcaatgaggaagatgaaaacctgccccattatgatgagaaaacctggtttgttgaggatatcaatcgagtacaagcagaggacttgctttatgggaaacctgatggtgcattcttaattcgtgagagtagcaagaaaggatgctatgcttgctctgtggtggccgatggggaagtgaagcactgtgtgatctacagcactgctcggggctatggctttgcagagccctacaacctgtacagctctctgaaggagctagtgctccattaccagcagacatccttggttcagcacaacgactccctcaacgtcaggcttgcctaccctgttcatgcacagatgccctcgctttgcagataaagaggaagtgg

SEQ ID NO: 115318 - DNA, 753 bp, Artificial Sequence
  derived and/or modified sequence
ctgattgaggctgggggagagcgcggatggctgattggggagccgaagcctagagagcggtggggagacgtgaaagtcgagatggagagcagctttttgaacatgttctcaggcacttgacagaatcccgcgcgatgtacaatacggtgtggagtatggaccgcgatgacgcagactggagggaggtgatgatgccctattcgacagaactgatattttatattgaaatggatcctccagctcttccaccaaagccacctaagccaatgacttcagcagttccaaatggaatgaaggacagttctgtttctcttcaggatgcagaatggtactggggggatatttcaagggaggaggtaaatgacaaattgcgggatatgccagatgggaccttcttggtccgagatgcctcaacaaaaatgcagggagattatactttgactttgcggaagggaggcaataataagttaataaagatctatcaccgggatggtaaatatggcttttctgatcctctgacatttaattccgtggtggagctcattaaccactatcaccatgaatctcttgctcagtacaatcccaaacttgatgtgaagctgatgtacccagtgtccagataccaacaggatcagttggtaaaagaagataatattgatgcagtaggtaaaaaactgcaagaataccactctcagtatcaggagaagagtaaagagtatgataggctgtatgaagaatatactagaacatccc

SEQ ID NO: 115319 - DNA, 1998 bp, Artificial Sequence
  derived and/or modified sequence
atggcagactacagcacagtgcctcctccatcatctggcagcgccggaggcggtgggggaggcgggggaggcggtggggtcaatgatgcctttaaagacgctttgcagcgcgcacgacaaattgctgccaagattggcggggatgctggaacttccttgaactccaacgattatgggtatggagggcagaaaaggccactggaggatggagatggctcatggacatctccgagctcaaccacacactgggagggaatgccatcaccttttaaagaccagcccgatgccaaaaaggtggctccacagaacgatagcttcgggacccagctcccacctatgcaccagcaacagagccgtagcgtcatgaccgaagaatacaaagtgcctgacggaatggtgggctttattattggcagggggggcgaacaaattagtagaatccagcaagagagcggctgtaagattcagattgcccccgacagcggggggttaccggagcgatcatgcatgctcaccggcacaccagagagtgtccaaagcgccaagcgattgctggaccagatcgtggagaaagggaggcccgctcctggattccatcacggcgacggtccgggtaacgcggtccaggagattatgataccagccagtaaggctggtctggtaattggtaagggaggtgaaaccattaagcagcttcaagaacgggctggagtcaagatggttatgattcaggatggacctcaaaacacgggggcagataagcctctgaggatcacaggggatccctataaagtgcagcaggcaaaggaaatggtcctcgagctcattagagatcagggaggcttcagagaagtgcggaatgaatacggcagccgtatcgggggcaatgaaggcattgatgtccccatacccaggttcgctgtcgggatagtcatagggagaaatggcgagatgattaaaaagatccagaacgacgctggagtgcggattcagttcaaaccagatgatgggacaacgccagaaaggattgcgcagatcactgggcctccagataggtgccagcacgctgcagaaatcatcacagatctgttgaggtcagtgcaggcggggaaccctggggggccgggtcccggcggccggggaagggggcgcggccagggaaactggaatatggggccccctggcgggctgcaggagtttaatttcatcgtgccaaccggtaagaccgggctgatcattggcaaaggtggagaaaccatcaagtcgatatcccagcagagcggcgcacggatcgagctgcagcgcaatcctccaccaaacgccgaccccaacatgaaattgtttacaataagggggacacctcaacagatcgattatgcccgtcaactgattgaagagaagattggtgggccagttaatcccctcggtccaccagtaccacatgggccccatggtgttcctggtcctcatggccctccagggccccccggacctggtaccccaatgggtccatacaatccagcgccctacaatccgggaccaccaggtcccgctcctcacggaccacctgccccatatgccccccagggatggggcaacgcttacccccactggcagcaacaggcccctccagatcccgcaaaagccgggacagaccccaatagcgcggcgtgggccgcatattatgcccactattaccagcagcaagcccagccccccccggctgcgcccgccggagcgcctacgactacacagacaaacggtcaaggggatcagcagaaccccgcaccagccggacaggttgattacactaaagcatgggaggagtattataaaaagatgggccaggcagtgccagcacccacgggggcaccgccaggcggtcagcctgactactcagcagcatgggcagagtattaccgccaacaggccgcatactacgcacagacgagcccccagggcatgccacagcaccctccagccccacagggccaatag

SEQ ID NO: 115320 - DNA, 1998 bp, Artificial Sequence
  derived and/or modified sequence
atggctgactacagcacagtgcccccacccagcagcggcagcgctgggggcggcggcggcggcggcggcggcggcggcgtgaatgatgccttcaaggatgccctgcagagggcccggcagattgctgccaagattggaggagatgctggcaccagcctgaacagcaatgactatggctacggcggccagaagaggcccctggaggatggagatggctcctggaccagccccagcagcaccacccactgggagggcatgcccagccccttcaaggaccagccagatgccaagaaggtggccccccagaatgacagctttggcacccagctgccccccatgcaccagcagcagagccgctctgtgatgacagaggagtacaaggtgcctgatggcatggtgggcttcatcatcggccggggcggggagcagatcagccgcatccagcaggagagcggctgcaagatccagatcgccccagattctgggggcctgcctgagaggagctgcatgctgaccggcaccccagagagcgtgcagagcgccaagaggctgctggaccagatcgtggagaagggccggcctgcccctggcttccaccacggagatggccctggaaatgctgtgcaggagatcatgatcccagccagcaaggccggcctggtgattggcaagggcggggagaccatcaagcagctgcaggagcgggccggcgtgaagatggtgatgatccaggacggcccccagaacacaggagctgacaagcccctgcgcatcactggagacccctacaaggtgcagcaggccaaggagatggtgctggagctgatccgggaccagggcggcttccgggaggtgagaaatgaatatggcagcagaattggaggaaatgaaggaattgatgtgcccatccccaggtttgctgtgggcatcgtcatcggcagaaatggagagatgatcaagaagatccagaatgatgctggggtgcgcatccagttcaagccagatgatggcaccaccccagagagaattgcccagatcactggacctccagaccgctgccagcacgccgctgagatcatcacagacctgctgcggtctgtgcaggccggcaaccctgggggccctggccctgggggccggggccggggccggggccagggcaactggaacatgggccccccaggcggcctgcaggagttcaacttcatcgtgcccaccgggaagacaggcctcatcattggaaaaggaggagagaccatcaagagcatcagccagcagagcggggccagaattgagctgcagagaaatcctcctccaaatgctgaccccaacatgaagctgttcaccatccggggcaccccccagcagattgattatgcccggcagctgattgaggagaagattggaggccctgtgaaccccctgggcccccctgtgccccacggcccccacggcgtgcccggcccccacggccccccaggccccccaggccctggcacccccatgggcccctacaacccagccccctacaaccctggccccccaggccctgccccccacggccccccagccccctatgccccccagggctggggcaatgcctacccccactggcagcagcaggcccccccagaccctgccaaggccggcacagaccccaacagcgctgcctgggccgcctactatgcccactactaccagcagcaggcccagcccccacctgctgccccagctggggcccccaccaccacccagaccaacggccagggcgaccagcagaacccagccccagctggccaggtggactacaccaaggcctgggaggagtactacaagaagatgggccaggccgtgcctgcccccaccggggcccctcctgggggccagcctgactacagcgctgcctgggccgagtactaccggcagcaggccgcctactatgcccagaccagcccccagggcatgccccagcaccccccagccccccagggccagtag

SEQ ID NO: 115321 - DNA, 1998 bp, Artificial Sequence
  derived and/or modified sequence
atggccgactacagcaccgtgcccccccccagcagcggcagcgccggcggaggcggcggtggcggcggtgggggcggcgtcaacgacgcgtttaaggacgcactgcagagggcccggcaaattgctgcaaaaatcgggggcgacgcagggacttctctcaactccaatgactacggttatgggggacagaagcgacccttggaggatggcgatggcagctggacttccccaagttccacaactcactgggaagggatgccttccccctttaaggatcagcctgatgcgaagaaagtggccccacagaatgactcgttcgggactcagctgcctcctatgcatcagcagcaaagcagatctgttatgaccgaagagtataaggtgcctgacggcatggtcggcttcatcattggtcggggcggagaacagatatccaggattcagcaggagagtggatgcaagatccagatagccccagactcaggcgggctcccagagaggagctgtatgctaacgggcaccccggagtcagtgcagtctgccaaaagactgctcgatcaaatagtggagaagggccggcccgctcctggatttcaccacggggacggaccagggaacgctgttcaggagatcatgatcccagcttctaaagcaggtctggtgattggtaagggcggcgaaacaatcaaacagctccaagagagagcaggcgtaaagatggtcatgatacaggatgggccacagaatactggggccgacaagcccctaaggatcactggcgacccctataaggtgcagcaggccaaagagatggtgctggaacttattcgagaccagggcggttttcgagaggtaagaaacgagtatggttcacggattgggggcaacgagggcatcgacgtccctattccacggttcgccgtcggaatcgtgataggtcgcaatggggaaatgatcaaaaaaattcagaacgacgctggagtacggatccaatttaagccggacgatggaactaccccagagcggattgcccagatcaccggtcctccggaccgatgccaacatgcggcagagattatcacagatctgttgaggtcagtgcaagctggcaaccctggtggtccaggtcccggcggccgagggcgtgggcggggacagggtaactggaacatggggccacccggcggcctccaagaatttaacttcatagtgccgacagggaaaactggactgatcatcggaaaaggcggagagaccattaagtcaatcagccagcagagtggagcacgcatcgagctgcagaggaacccacctccgaatgcagacccaaacatgaagttattcaccataagagggaccccacagcagattgattacgcacgtcagttaattgaagagaagatagggggcccagttaatccgctggggcctccggttccacacgggcctcacggcgtgcctgggccgcacggaccaccgggaccccccggacctgggacccctatgggcccatacaatcctgccccctataaccccggtcccccaggcccagcccctcacggacctccggccccttacgccccccaggggtgggggaatgcatacccacactggcaacaacaagcaccccccgatcctgctaaggccgggacggaccctaattctgccgcctgggcagcgtattatgctcattactaccagcagcaggcgcagccgccccctgcagcacccgccggggcccccactactacacagaccaacgggcagggcgaccagcaaaaccccgccccagctgggcaagtcgactacacgaaggcttgggaggagtattacaaaaagatgggacaggccgtgccagccccaactggggcccctcccggcgggcagcctgattactctgccgcatgggccgaatactaccgccagcaggctgcttattatgcgcaaaccagtccacagggcatgcctcagcatcctccagcacctcaaggccaatag

SEQ ID NO: 115322 - DNA, 1998 bp, Artificial Sequence
  derived and/or modified sequence
atggctgactacagcacagtgcctccccctagctctggatctgcgggaggagggggaggaggcggtgggggtggtggcgtgaatgacgcttttaaggacgctcttcagcgggctaggcagattgctgccaaaatcggtggtgatgccggtacgagtttgaactcaaacgattacggctatggaggtcagaaaagacccttggaggatggtgatggatcttggacgagcccctcctccactacccactgggagggcatgccgtcaccttttaaggatcagccagatgcaaagaaggtcgcacctcagaatgactccttcgggacacagctgcccccaatgcatcaacagcagtccagatctgtgatgactgaggaatataaagtgccggatggaatggttggctttatcatcggaagaggcggagagcagatctcccggatccagcaagagagtggctgcaagattcaaattgccccagatagtggtggcctacctgagcggagctgcatgctcaccgggactcccgagtcagtgcagtcggcaaagcggctgcttgatcagatcgtggaaaaagggcgtccggctccgggttttcatcacggcgacgggccaggaaatgccgtgcaggagatcatgattcccgctagcaaggccggtcttgtcattgggaaaggaggcgaaaccatcaaacagctgcaagagagagccggagtgaaaatggtgatgatccaggacggccctcagaatactggagccgacaagccactgaggataacgggcgatccgtacaaggtccagcaggccaaggagatggtgttagagctgatacgcgatcaggggggatttcgcgaggtcagaaacgagtatggcagccggattggagggaacgaaggcattgatgtgcccattcctagattcgcagtgggaattgtgatcggtagaaacggagaaatgatcaaaaaaatccaaaacgacgcaggcgttaggatccagtttaagccagacgatggtacaacacctgagcgaatcgcccagatcaccggaccacctgatcgatgtcagcatgcggcagagatcatcactgaccttctccgatccgtgcaggctggcaaccccggaggtcccggacctggcggaagggggagaggcaggggtcagggcaactggaacatgggcccaccaggaggactgcaggagtttaactttatcgtgcccacaggaaagacgggcttaattataggaaaggggggtgagactatcaagtccatttcccagcaatctggcgcacgtatcgaactgcagagaaacccacccccaaatgcagacccaaacatgaagttattcacaatccggggtactcctcagcagattgattacgcccgacagctgatagaggagaagatagggggacctgtgaaccccctggggcctcccgtaccgcacggaccccacggtgtgcccggaccccacggccctccgggaccgcctggaccaggcacaccaatgggaccatacaacccagccccttacaatccaggacctccaggaccggctccccatggaccgccagccccatatgcaccccaggggtggggcaatgcctatccccattggcagcagcaggctcctccagatccagccaaagctggaaccgaccccaatagcgccgcatgggctgcttattacgcgcactactaccagcagcaggcccaaccacctccagccgcacccgcaggagctcctacaactacacagaccaacggacagggcgaccagcagaatcccgcacccgcagggcaggttgattacactaaagcttgggaagagtattacaaaaaaatgggtcaggccgtgcccgctcccacgggcgcacccccaggaggacagccggactactccgccgcttgggctgagtactatcgtcagcaagccgcttactacgcgcagacctccccacagggcatgccacagcacccaccagcaccccagggccagtag

SEQ ID NO: 115323 - DNA, 1998 bp, Artificial Sequence
  derived and/or modified sequence
atggccgactacagcaccgtgcccccccccagcagcggcagcgccggcggcggcggcggcggcggcggcggcggcggcgtgaacgacgccttcaaggacgccctgcagagagccagacagatcgccgccaagatcggcggcgacgccggcaccagcctgaacagcaacgactacggctacggcggccagaagagacccctggaggacggcgacggcagctggaccagccccagcagcaccacccactgggagggcatgcccagccccttcaaggaccagcccgacgccaagaaggtggccccccagaacgacagcttcggcacccagctgccccccatgcaccagcagcagagcagaagcgtgatgaccgaggagtacaaggtgcccgacggcatggtgggcttcatcatcggcagaggcggcgagcagatcagcagaatccagcaggagagcggctgcaagatccagatcgcccccgacagcggcggcctgcccgagagaagctgcatgctgaccggcacccccgagagcgtgcagagcgccaagagactgctggaccagatcgtggagaagggcagacccgcccccggcttccaccacggcgacggccccggcaacgccgtgcaggagatcatgatccccgccagcaaggccggcctggtgatcggcaagggcggcgagaccatcaagcagctgcaggagagagccggcgtgaagatggtgatgatccaggacggcccccagaacaccggcgccgacaagcccctgagaatcaccggcgacccctacaaggtgcagcaggccaaggagatggtgctggagctgatcagagaccagggcggcttcagagaggtgagaaacgagtacggcagcagaatcggcggcaacgagggcatcgacgtgcccatccccagattcgccgtgggcatcgtgatcggcagaaacggcgagatgatcaagaagatccagaacgacgccggcgtgagaatccagttcaagcccgacgacggcaccacccccgagagaatcgcccagatcaccggcccccccgacagatgccagcacgccgccgagatcatcaccgacctgctgagaagcgtgcaggccggcaaccccggcggccccggccccggcggcagaggcagaggcagaggccagggcaactggaacatgggcccccccggcggcctgcaggagttcaacttcatcgtgcccaccggcaagaccggcctgatcatcggcaagggcggcgagaccatcaagagcatcagccagcagagcggcgccagaatcgagctgcagagaaaccccccccccaacgccgaccccaacatgaagctgttcaccatcagaggcaccccccagcagatcgactacgccagacagctgatcgaggagaagatcggcggccccgtgaaccccctgggcccccccgtgccccacggcccccacggcgtgcccggcccccacggcccccccggcccccccggccccggcacccccatgggcccctacaaccccgccccctacaaccccggcccccccggccccgccccccacggcccccccgccccctacgccccccagggctggggcaacgcctacccccactggcagcagcaggccccccccgaccccgccaaggccggcaccgaccccaacagcgccgcctgggccgcctactacgcccactactaccagcagcaggcccagcccccccccgccgcccccgccggcgcccccaccaccacccagaccaacggccagggcgaccagcagaaccccgcccccgccggccaggtggactacaccaaggcctgggaggagtactacaagaagatgggccaggccgtgcccgcccccaccggcgccccccccggcggccagcccgactacagcgccgcctgggccgagtactacagacagcaggccgcctactacgcccagaccagcccccagggcatgccccagcacccccccgccccccagggccagtag

SEQ ID NO: 115324 - protein, 916 aa, Artificial Sequence
  derived and/or modified sequence
MDAGFFRGTSAEQDNRFSNKQKKLLKQLKFAECLEKKVDMSKVNLEVIKPWITKRVTEILGFEDDVVIEFIFNQLEVKNPDSKMMQINLTGFLNGKNAREFMGELWPLLLSAQENIAGIPSAFLELKKEEIKQRQIEQEKLASMKKQDEDKDKRDKEEKESSREKRERSRSPRRRKSRSPSPRRRSSPVRRERKRSHSRSPRHRTKSRSPSPAPEKKEKTPELPEPSVKVKEPSVQEATSTSDILKVPKPEPIPEPKEPSPEKNSKKEKEKEKTRPRSRSRSKSRSRTRSRSPSHTRPRRRHRSRSRSYSPRRRPSPRRRPSPRRRTPPRRMPPPPRHRRSRSPVRRRRRSSASLSGSSSSSSSSRSRSPPKKPPKRTSSPPRKTRRLSPSASPPRRRHRPSPPATPPPKTRHSPTPQQSNRTRKSRVSVSPGRTSVTKHKGTEKRESPSPAPKPRKVELSESEEDKGGKMAAADSVQQRRQYRRQNQQSSSDSGSSSSSEDERPKRSHVKNGEVGRRRRHSPSRSASPSPRKRQKETSPRMQMGKRWQSPVTKSGRRRRSPSPPPTRRRRSPSPAPPPRRRRTPTPPPRRRTPSPPPRRRSPSPRRYSPPIQRRYSPSPPPKRRTASPPPPPKRRASPSPPPKRRVSHSPPPKQRSSPVTKRRSPSLSSKHRKGSSPSRSTREARSPQPNKRHSPSPRPRAPQTSSSPPPVRRGASSSPQRRQSPSPSTRPIRRVSRTPEPKKIKKAASPSPQSVRRVSSSRSVSGSPEPAAKKPPAPPSPVQSQSPSTNWSPAVPVKKAKSPTPSPSPPRNSDQEGGGKKKKKKKDKKHKKDKKHKKHKKHKKEKAVAAAAAAAVTPAAIAAATTTLAQEEPVAAPEPKKETESEAEDNLDDLEKHLREKALRSMRKAQVSPQS

SEQ ID NO: 115325 - protein, 1089 aa, Artificial Sequence
  derived and/or modified sequence
MAVFDTPEEAFGVLRPVCVQLTKTQTVENVEHLQTRLQAVSDSALQELQQYILFPLRFTLKTPGPKRERLIQSVVECLTFVLSSTCVKEQELLQELFSELSACLYSPSSQKPAAVSEELKLAVIQGLSTLMHSAYGDIILTFYEPSILPRLGFAVSLLLGLAEQEKSKQIKIAALKCLQVLLLQCDCQDHPRSLDELEQKQLGDLFASFLPGISTALTRLITGDFKQGHSIVVSSLKIFYKTVSFIMADEQLKRISKVQAKPAVEHRVAELMVYREADWVKKTGDKLTILIKKIIECVSVHPHWKVRLELVELVEDLLLKCSQSLVECAGPLLKALVGLVNDESPEIQAQCNKVLRHFADQKVVVGNKALADILSESLHSLATSLPRLMNSQDDQGKFSTLSLLLGYLKLLGPKINFVLNSVAHLQRLSKALIQVLELDVADIKIVEERRWNSDDLNASPKTSATQPWNRIQRRYFRFFTDERIFMLLRQVCQLLGYYGNLYLLVDHFMELYHQSVVYRKQAAMILNELVTGAAGLEVEDLHEKHIKTNPEELREIVTSILEEYTSQENWYLVTCLETEEMGEELMMEHPGLQAITSGEHTCQVTSFLAFSKPSPTICSMNSNIWQICIQLEGIGQFAYALGKDFCLLLMSALYPVLEKAGDQTLLISQVATSTMMDVCRACGYDSLQHLINQNSDYLVNGISLNLRHLALHPHTPKVLEVMLRNSDANLLPLVADVVQDVLATLDQFYDKRAASFVSVLHALMAALAQWFPDTGNLGHLQEQSLGEEGSHLNQRPAALEKSTTTAEDIEQFLLNYLKEKDVADGNVSDFDNEEEEQSVPPKVDENDTRPDVEPPLPLQIQIAMDVMERCIHLLSDKNLQIRLKVLDVLDLCVVVLQSHKNQLLPLAHQAWPSLVHRLTRDAPLAVLRAFKVLRTLGSKCGDFLRSRFCKDVLPKLAGSLVTQAPISARAGPVYSHTLAFKLQLAVLQGLGPLCERLDLGEGDLNKVADACLIYLSVKQPVKLQEAARSVFLHLMKVDPDSTWFLLNELYCPVQFTPPHPSLHPVQLHGASGQQNPYTTNVLQLLKELQ

SEQ ID NO: 115326 - DNA, 3270 bp, Artificial Sequence
  derived and/or modified sequence
atggccgtgttcgacacccccgaggaggccttcggcgtgctgagacccgtgtgcgtgcagctgaccaagacccagaccgtggagaacgtggagcacctgcagaccagactgcaggccgtgagcgacagcgccctgcaggagctgcagcagtacatcctgttccccctgagattcaccctgaagacccccggccccaagagagagagactgatccagagcgtggtggagtgcctgaccttcgtgctgagcagcacctgcgtgaaggagcaggagctgctgcaggagctgttcagcgagctgagcgcctgcctgtacagccccagcagccagaagcccgccgccgtgagcgaggagctgaagctggccgtgatccagggcctgagcaccctgatgcacagcgcctacggcgacatcatcctgaccttctacgagcccagcatcctgcccagactgggcttcgccgtgagcctgctgctgggcctggccgagcaggagaagagcaagcagatcaagatcgccgccctgaagtgcctgcaggtgctgctgctgcagtgcgactgccaggaccaccccagaagcctggacgagctggagcagaagcagctgggcgacctgttcgccagcttcctgcccggcatcagcaccgccctgaccagactgatcaccggcgacttcaagcagggccacagcatcgtggtgagcagcctgaagatcttctacaagaccgtgagcttcatcatggccgacgagcagctgaagagaatcagcaaggtgcaggccaagcccgccgtggagcacagagtggccgagctgatggtgtacagagaggccgactgggtgaagaagaccggcgacaagctgaccatcctgatcaagaagatcatcgagtgcgtgagcgtgcacccccactggaaggtgagactggagctggtggagctggtggaggacctgctgctgaagtgcagccagagcctggtggagtgcgccggccccctgctgaaggccctggtgggcctggtgaacgacgagagccccgagatccaggcccagtgcaacaaggtgctgagacacttcgccgaccagaaggtggtggtgggcaacaaggccctggccgacatcctgagcgagagcctgcacagcctggccaccagcctgcccagactgatgaacagccaggacgaccagggcaagttcagcaccctgagcctgctgctgggctacctgaagctgctgggccccaagatcaacttcgtgctgaacagcgtggcccacctgcagagactgagcaaggccctgatccaggtgctggagctggacgtggccgacatcaagatcgtggaggagagaagatggaacagcgacgacctgaacgccagccccaagaccagcgccacccagccctggaacagaatccagagaagatacttcagattcttcaccgacgagagaatcttcatgctgctgagacaggtgtgccagctgctgggctactacggcaacctgtacctgctggtggaccacttcatggagctgtaccaccagagcgtggtgtacagaaagcaggccgccatgatcctgaacgagctggtgaccggcgccgccggcctggaggtggaggacctgcacgagaagcacatcaagaccaaccccgaggagctgagagagatcgtgaccagcatcctggaggagtacaccagccaggagaactggtacctggtgacctgcctggagaccgaggagatgggcgaggagctgatgatggagcaccccggcctgcaggccatcaccagcggcgagcacacctgccaggtgaccagcttcctggccttcagcaagcccagccccaccatctgcagcatgaacagcaacatctggcagatctgcatccagctggagggcatcggccagttcgcctacgccctgggcaaggacttctgcctgctgctgatgagcgccctgtaccccgtgctggagaaggccggcgaccagaccctgctgatcagccaggtggccaccagcaccatgatggacgtgtgcagagcctgcggctacgacagcctgcagcacctgatcaaccagaacagcgactacctggtgaacggcatcagcctgaacctgagacacctggccctgcacccccacacccccaaggtgctggaggtgatgctgagaaacagcgacgccaacctgctgcccctggtggccgacgtggtgcaggacgtgctggccaccctggaccagttctacgacaagagagccgccagcttcgtgagcgtgctgcacgccctgatggccgccctggcccagtggttccccgacaccggcaacctgggccacctgcaggagcagagcctgggcgaggagggcagccacctgaaccagagacccgccgccctggagaagagcaccaccaccgccgaggacatcgagcagttcctgctgaactacctgaaggagaaggacgtggccgacggcaacgtgagcgacttcgacaacgaggaggaggagcagagcgtgccccccaaggtggacgagaacgacaccagacccgacgtggagccccccctgcccctgcagatccagatcgccatggacgtgatggagagatgcatccacctgctgagcgacaagaacctgcagatcagactgaaggtgctggacgtgctggacctgtgcgtggtggtgctgcagagccacaagaaccagctgctgcccctggcccaccaggcctggcccagcctggtgcacagactgaccagagacgcccccctggccgtgctgagagccttcaaggtgctgagaaccctgggcagcaagtgcggcgacttcctgagaagcagattctgcaaggacgtgctgcccaagctggccggcagcctggtgacccaggcccccatcagcgccagagccggccccgtgtacagccacaccctggccttcaagctgcagctggccgtgctgcagggcctgggccccctgtgcgagagactggacctgggcgagggcgacctgaacaaggtggccgacgcctgcctgatctacctgagcgtgaagcagcccgtgaagctgcaggaggccgccagaagcgtgttcctgcacctgatgaaggtggaccccgacagcacctggttcctgctgaacgagctgtactgccccgtgcagttcacccccccccaccccagcctgcaccccgtgcagctgcacggcgccagcggccagcagaacccctacaccaccaacgtgctgcagctgctgaaggagctgcagtag

SEQ ID NO: 115327 - DNA, 3270 bp, Artificial Sequence
  derived and/or modified sequence
atggccgtgttcgatacacccgaagaggctttcggcgttctgcgcccagtctgtgtgcaactgacaaagacccaaactgtggagaacgtggaacatctccagacaagactgcaagccgtgtctgatagtgctttgcaggaactgcagcagtacattctgtttccacttcggttcaccctgaaaacacccgggcccaagagagagagactgatccaatcagtggtggagtgcctgacatttgtgctgtcgagcacatgtgtgaaagaacaggagcttttacaagaactcttttcggaacttagcgcctgtttgtacagcccttcgagccagaaacccgccgccgtttcagaggaacttaaactggcagtgatacagggcctctctacactgatgcattctgcatatggagatattatcctcacgttctacgagccgagcattcttcccaggctcggattcgctgttagcctactcttggggctggccgagcaagagaaaagcaaacagatcaagatcgccgccctcaagtgcctccaagtgctgctcctccagtgcgattgccaagaccaccccagatctctggacgaactggaacagaaacagctaggagacctgttcgcatccttcctgccaggcatctcgactgctctcaccagattgatcaccggagactttaagcagggtcacagtatagtggtgtcatctctgaaaattttctataaaaccgtcagcttcatcatggccgacgagcagctgaaaagaatttccaaggttcaggctaagcctgctgtcgaacaccgcgtcgccgaactgatggtctaccgcgaagccgactgggtaaagaagacgggcgataaactgaccattctaatcaaaaagattatcgaatgtgtatccgtccacccgcactggaaagtgcggctggagctggtggaactggtagaagatctccttctcaagtgtagccaatccctggttgaatgtgcgggcccactgctgaaggcgctagtcgggctggtgaacgacgaatcccctgaaattcaagcacagtgcaacaaggtgctccgccacttcgcggatcagaaagtcgtggtgggaaacaaagctctcgcggatatcctatctgaatcactccactcgcttgctacttctctgccccgattgatgaacagtcaggacgaccagggaaaattcagtacactctctctgctgttgggatatcttaagttactggggcccaaaatcaactttgtcctgaattcagtggcccacctgcagaggctcagcaaggcccttatccaggtcctagagctggacgtcgcggatattaaaatcgtagaagagcggaggtggaactcagacgatcttaacgcttctcctaagacaagcgccacgcagccttggaacaggatccagaggcggtactttagattcttcactgacgagaggatcttcatgctcctgcgacaagtgtgccagctgctaggctactatggaaatctgtatttgctggtggatcatttcatggaactctatcaccagagcgtggtgtacaggaaacaggcagctatgattttgaacgagcttgtgactggagccgcaggactcgaagtggaggacctgcacgaaaaacacattaagacaaacccagaagagttacgtgagattgttacgagtattctggaagagtatacgtcccaggaaaactggtatctggtgacgtgccttgagacagaagagatgggtgaagaactcatgatggagcaccctggacttcaggcaattacctccggggaacatacctgtcaagtgacctccttccttgcctttagcaagccaagtccaaccatttgcagtatgaactcaaacatatggcaaatatgcatccagctcgaaggaattggtcaatttgcttatgccctcgggaaagacttttgcctcttactgatgtcagctctttaccctgtactcgaaaaggctggagaccagacattactgatctcacaggtcgcaacctctactatgatggacgtttgtcgggcatgcgggtatgactcccttcagcacctgataaaccagaatagcgactatctggttaacgggattagccttaacctaagacacttagccctacatccacacacacctaaggtactggaggtcatgctcaggaactcggatgccaaccttttaccactggttgctgatgtcgtgcaagacgtgttggccacactcgatcaattttatgacaaaagagcggcctccttcgtttccgtgttgcacgccttaatggctgccctcgcccagtggtttccagacacaggtaacctgggccacctgcaggaacaatcccttggcgaagaaggctcacatttaaaccagcggcccgccgccctggagaagagtacaaccacagcggaggacatcgagcagtttctgctgaactatctgaaagaaaaggatgtggcagacggtaatgttagcgattttgacaatgaggaggaagaacagtcagtgccacccaaagtggacgaaaacgacacgcgacctgatgtcgaaccacctttgccactccagatccagatagctatggatgtaatggagagatgcatacacctgttgtctgataaaaaccttcaaatacgccttaaagttctcgatgtactggacctgtgtgtggtggtcctgcaatcgcacaagaatcagctcttacccctggcacaccaggcgtggccaagcctagtccacagattgacacgtgatgcccctttggccgtactacgggcatttaaagtcctccgaacactgggctcgaaatgtggggacttcctccgcagcaggttttgtaaggatgtgttacctaagttggctgggagtctcgtgacgcaggctccaatttctgcaagggcgggcccggtctactcacacacactcgcctttaagctccagctcgctgtgctccagggcctaggacctctttgtgaacgactggatttaggcgaaggcgatttgaataaagtggccgacgcttgcttgatttatttatctgttaagcagccggtcaaactccaggaggcagcccggagcgtttttctgcatctgatgaaggtagaccctgatagtacttggtttctgctgaacgagctgtattgtcccgtgcagttcaccccgccacacccatcactccaccccgtgcagctccatggtgcctccgggcagcagaacccgtataccaccaatgtgctccagcttttaaaagagctgcagtag

SEQ ID NO: 115328 - DNA, 3270 bp, Artificial Sequence
  derived and/or modified sequence
atggctgttttcgacacaccagaggaggctttcggcgtgctcaggcctgtgtgcgttcagctgaccaagacccagaccgtggagaatgtggaacacttgcaaacccggctccaggctgtgagcgacagcgctctgcaggagttgcagcagtatatcctctttccactcaggtttacattgaaaaccccaggccctaagagggaaagacttatacagtcagtagtagaatgtctgacttttgtcctcagtagcacttgtgtcaaggagcaggagttgctgcaggaactgttcagtgaactcagcgcctgtctgtattcgccgtcatcacaaaaacccgccgccgtgagcgaggaacttaaactggcagtgatacagggcctgtccacgctgatgcactccgcatatggtgacattattctcactttctacgagcccagtatactcccaagattgggcttcgctgtgtcacttctgctgggactggccgagcaagaaaaatctaagcagattaagattgccgcactcaagtgtctacaggtgttattactgcagtgcgactgtcaggatcacccacggagcctagatgagctggagcagaaacagctgggggaccttttcgcatcattccttccaggcattagcacagccctcaccaggttaatcaccggcgatttcaagcaagggcacagtatcgtggttagcagcttgaagatcttctacaaaactgtctcgttcataatggccgacgagcaactgaagagaatctccaaagtgcaggccaagcctgcagtagagcaccgcgtggccgagctaatggtctatcgcgaagcggattgggtgaagaaaactggagataagctcaccatactgattaagaaaattattgagtgtgtgagcgttcatccacattggaaagttcgattggaacttgttgaactggttgaagacctcctgcttaaatgtagtcaaagtctggtggagtgtgcaggtcccttactgaaggccttagttggactggtgaatgacgagagcccggagatccaagctcagtgtaacaaagtcctgcggcattttgccgaccagaaagttgttgtcgggaacaaggcattggcagatatcttgagcgaaagtctccattccttagctacctcgctgcctcggctgatgaattcacaagatgatcagggtaagttcagtactctcagtttattgttaggatacctgaagttattgggcccaaagatcaacttcgtcttgaattctgtagcccatctccagaggctgtctaaggcactgatacaggtactggaactggatgtagccgacatcaagatcgtggaggaacgtaggtggaattcagatgacctaaacgccagccctaaaaccagcgctacccaaccctggaataggattcagagaagatatttcaggtttttcaccgatgagagaatatttatgctgcttaggcaagtctgccagttgctaggctattatgggaacctgtatctactcgttgatcattttatggagctgtaccaccagagcgtcgtgtacagaaagcaggccgcgatgatcctgaatgaactcgtgacaggggcagcaggactggaggtggaagatctgcacgaaaaacatattaagaccaaccctgaagaactcagagagattgttactagcatcctggaggagtacacctcccaggagaactggtatctagtgacttgtctggaaaccgaggagatgggagaagaattgatgatggaacacccaggcctgcaggcaatcacatctggtgaacatacgtgtcaggtgacaagcttcttggcattttccaagccctctcctacaatctgctccatgaattcaaatatctggcaaatatgtatccagctggagggtatcggccagtttgcatacgccctgggaaaggacttctgcctgctgctgatgagcgctctctaccctgtgcttgaaaaggctggggaccagacactgttaatttcccaggtcgctacctctacaatgatggatgtgtgccgggcgtgtggctatgatagcctgcagcacctgataaaccaaaacagtgattacttagtgaacggcatcagcctgaatctccgccatcttgctctacatccccacacgcccaaggtgctagaggttatgctgcggaatagtgatgccaatctcctcccattggtcgccgacgtcgttcaggatgtactggccacactcgatcagttttacgataagagggcagcaagttttgtctccgttttgcatgccctgatggccgccctcgctcagtggttcccggacacagggaacctgggccatctgcaggagcagagcctgggtgaggaaggatctcacctgaatcagagacccgccgccctggagaaatcgactaccaccgcggaagatatagaacagttcttactgaactacctaaaggaaaaagacgtcgcggacggcaacgtaagtgacttcgacaacgaggaggaggagcaaagcgtaccgcctaaagtggacgaaaatgacacacgaccagatgttgaaccaccactccccctccagatccagattgcaatggatgtcatggaacggtgtatacacctgctgtccgacaagaaccttcaaatacgtctgaaagtgttagacgtcctcgatctatgtgtggtggtgctccagagtcataagaatcagctcctccctctggcccaccaggcttggccctcactcgtgcacagactaacacgggatgctcctctcgccgtgttgagggcattcaaagtgcttagaaccctcgggtctaaatgtggggatttcttgaggtccaggttttgtaaggacgtcctgccaaaactcgccggctcactggtgacgcaggccccaatttccgcgcgtgccggaccagtttatagccatacactggcctttaagctacagcttgccgtcttacaggggctggggccactgtgcgagagactagacttaggggagggggatctgaacaaagttgcggatgcttgcctaatctacttgtccgtcaagcagcctgtaaaactgcaagaggcagcgagaagtgtgtttctgcatttaatgaaggtcgatcctgacagcacatggtttctgctgaacgagctgtattgtcctgtgcagtttaccccaccccacccatcattgcaccccgtacagctccacggcgccagtggtcaacagaatccatataccacgaacgtgctgcagctgctgaaggagttacagtag

SEQ ID NO: 115329 - DNA, 3270 bp, Artificial Sequence
  derived and/or modified sequence
atggccgtgtttgacacgccagaggaagcttttggagtattaagacctgtgtgcgtgcagttaacgaagacccaaactgtggagaacgtggagcacctgcaaacaagactgcaggcagttagcgattccgcgctgcaggagctgcagcagtacatcctgtttcccctgagattcacactcaagacgcccggaccgaaaagggagaggctgattcaatccgtcgtggaatgcctcacattcgtactcagtagcacctgcgtcaaggagcaggaactgctccaggaactgttttccgaactgtctgcctgtttgtacagcccttcttcccagaaaccagctgcagttagtgaagagcttaagcttgctgtcatacagggtctgtcaaccctgatgcacagcgcctatggcgacatcattttgacattctacgaaccatctattctgccaaggctgggctttgccgtgagtctcctcttaggtctcgcagagcaagaaaagtctaagcagataaagattgccgcactgaagtgcttgcaggtccttttgctccagtgcgattgccaggaccaccctcggtctctcgacgagctcgagcagaaacagctgggtgacctgtttgcctcctttctccctggaatctccactgccttaacgcggctgatcacaggtgattttaagcaaggacacagtatcgtggtaagcagcctgaaaatcttctacaaaactgttagtttcataatggcagacgagcagcttaagcggattagtaaggtgcaagctaagcctgcagtggagcaccgagtcgctgagttaatggtataccgtgaggctgactgggtgaagaagacaggggataaactcacaatcttgatcaagaagataatcgaatgcgtgagcgtccatcctcattggaaagtccgccttgaactcgtggagttggtagaagatctcctcctgaaatgttctcagtcactggtcgagtgtgctggtcccctcctgaaagccctggtcggactcgtcaatgatgagagtcccgagattcaggctcaatgtaataaggtcctacgtcactttgctgaccagaaagtagtcgtgggaaacaaggcactcgccgacattttatctgagtctctgcattccttagccacctccttgcctcgactcatgaattctcaggacgaccaggggaagttttcaaccctatccctgctcctgggatacctcaaattacttgggcctaaaattaattttgtactcaatagtgtggcgcacttacagaggctctcaaaagccctgattcaggtacttgagctcgatgtggccgatattaagatagtggaggagagacgatggaactctgatgatcttaacgctagcccgaagacttcggctacacagccatggaatagaatccagcggcgctactttagattcttcacagacgagagaatctttatgctgcttagacaagtctgtcagctgcttggctactatgggaacctgtatctgctcgtggatcattttatggagctgtatcaccagtccgtggtatacagaaagcaggctgctatgattctcaacgagctagtgacgggagcggctggattggaggttgaagacctacatgaaaaacatatcaagacaaatccggaggagttgcgagagatcgttacctctattttagaagaatacacttcccaggaaaactggtatctagtgacttgtctggaaactgaggagatgggcgaagagctgatgatggaacatcccggattgcaggccataaccagtggcgagcatacatgccaggtgacaagttttctcgcattttccaagcccagccccaccatctgctccatgaactcaaatatctggcagatttgtatccagctagaaggtataggacagttcgcctacgcccttggcaaggacttctgtcttctgttaatgtctgccctatatccagtgctcgaaaaggccggcgaccagactttgcttatttcacaggtggccacaagcaccatgatggacgtctgccgcgcgtgcggatacgattcactacaacacctgataaatcagaattcagattatttggtaaatggtataagtttgaatctccgccacctagctttacacccccatacccccaaagttctggaggtcatgcttaggaattctgatgccaacctgctgcccctagttgctgacgtggttcaggatgtgttagctacccttgaccagttctatgataaaagagctgcaagttttgtgtcggtattacacgcactcatggcggcattagcacagtggttcccggataccggaaatttgggacacctacaggaacagtctctgggagaggagggttcacatttgaaccagcgcccagccgccctcgaaaagagtactaccacagccgaggacatcgagcagtttctgcttaattacttgaaggagaaggacgttgctgacggcaacgtgtccgattttgataacgaggaagaagagcagtcagtgccgcctaaggtggatgagaacgatactcggcccgacgtcgagccaccattgcctctgcagatccagattgctatggacgtgatggagcgatgcattcatctccttagcgacaaaaatctccagatcagactcaaagtcctcgacgtgctagacctctgtgttgtcgtgttacagagccacaagaatcagctgctccccctcgcccaccaagcctggcccagcctggtacatcggctcacgagggatgccccactggccgttctgagggctttcaaggtgctgcggacgttgggatccaagtgcggagacttcctccggagccgcttctgtaaggacgtgttgcctaaacttgcagggtcactggtcactcaggcaccgatttctgctcgcgctgggccggtgtacagccataccttggcgtttaagctacagctcgcggtgttgcaaggactcggtcctctgtgtgagcggctggacttaggtgagggggacctgaataaggtggctgacgcttgccttatttacctttccgtgaaacagcctgttaagctgcaggaggcggctaggagtgtgtttctgcacttgatgaaagtggatcccgattccacatggttcctgctgaatgagttgtattgtcccgtgcagtttacgcctccccacccttctctgcaccctgtccaacttcacggcgcatcaggacagcagaatccttacacaactaacgtgctgcagctactcaaggaacttcagtag

SEQ ID NO: 115330 - DNA, 3270 bp, Artificial Sequence
  derived and/or modified sequence
atggctgtgtttgacaccccagaggaggcctttggagtgctgcggcctgtgtgtgtgcagctgaccaagacccagacagtggagaatgtggagcacctgcagacccggctgcaggccgtgtctgattctgccctgcaggagctgcagcagtacatcctcttccccctgcgcttcaccctgaagaccccaggccccaagcgggagcggctcatccagagcgtggtggagtgcctgacctttgtgctgagcagcacctgtgtgaaggagcaggagctgctgcaggagctgttcagcgagctgagcgcctgcctgtacagccccagcagccagaagccagctgctgtgtctgaggagctgaagctggccgtcatccagggcctgagcaccctgatgcacagcgcctatggagacatcatcctgaccttctatgagcccagcatcctgccccggctgggctttgctgtgtccctgctgctgggcctggccgagcaggagaagagcaagcagatcaagattgctgccctgaagtgcctgcaggtgctgctgctgcagtgtgactgccaggaccaccccaggagcctggatgagctggagcagaagcagctgggggacctgtttgccagcttcctgcccggcatcagcacagccctgaccaggctcatcaccggggacttcaagcagggccacagcatcgtggtgagcagcctgaagatcttctacaagacagtgtccttcatcatggctgatgagcagctgaagaggatcagcaaggtgcaggccaagccagctgtggagcaccgggtggccgagctgatggtgtaccgggaggccgactgggtgaagaagacaggagacaagctgaccatcctgatcaagaagatcattgaatgtgtgtctgtgcacccccactggaaggtgcggctggagctggtggagctggtggaggacctgctgctgaagtgcagccagagcctggtggagtgtgccggccccctgctgaaggccctggtgggcctggtgaatgatgagagccctgagatccaggcccagtgcaacaaggtgctgcggcactttgctgaccagaaggtggtggtgggcaacaaggccctggccgacatcctgtctgagagcctgcacagcctggccaccagcctgccccggctgatgaacagccaggatgaccagggcaagttcagcaccctgagcctgctgctgggctacctgaagctgctgggccccaagatcaactttgtgctgaacagcgtggcccacctgcagaggctgagcaaggccctgatccaggtgctggagctggatgtggccgacatcaagatcgtggaggagcggcgctggaacagtgatgacctgaatgccagccccaagaccagcgccacccagccctggaaccgcatccagaggcgctacttccgcttcttcacagatgagcgcatcttcatgctgctgcggcaggtgtgccagctgctgggctactacggcaacctgtacctgctggtggaccacttcatggagctgtaccaccagagcgtggtgtacaggaagcaggccgccatgatcctgaatgagctggtgactggagctgctggcctggaggtggaggacctgcacgagaagcacatcaagaccaaccctgaggagctgcgggagatcgtgaccagcatcctggaggagtacaccagccaggagaactggtacctggtgacctgcctggagacagaggagatgggagaggagctgatgatggagcaccctggcctgcaggccatcaccagcggggagcacacctgccaggtgaccagcttcctggccttcagcaagcccagccccaccatctgcagcatgaacagcaacatctggcagatctgcatccagctggagggcatcggccagtttgcctatgccctgggcaaggacttctgcctgctgctgatgtctgccctgtaccctgtgctggagaaggccggggaccagaccctgctgatcagccaggtggccaccagcaccatgatggatgtgtgccgggcctgtggctatgacagcctgcagcacctgatcaaccagaacagcgactacctggtgaatggcatcagcctgaacctgcggcacctggccctgcacccccacacccccaaggtgctggaggtgatgctgaggaacagtgatgccaacctgctgcccctggtggctgatgtggtgcaggatgtgctggccaccctggaccagttctatgacaagagagctgccagctttgtgtctgtgctgcacgccctgatggccgccctggcccagtggttcccagacaccggcaacctgggccacctgcaggagcagagcctgggggaggagggcagccacctgaaccagaggcctgctgccctggagaagagcaccaccacagcagaagatattgagcagttcctgctgaactacctgaaggagaaggatgtggctgatggaaatgtgtctgactttgacaatgaggaggaggagcagagcgtgccccccaaggtggatgaaaatgacaccaggccagatgtggagccccccctgcccctgcagatccagatcgccatggatgtgatggagcgctgcatccacctgctgagtgacaagaacctgcagatccggctgaaggtgctggatgtgctggacctgtgtgtggtggtgctgcagagccacaagaaccagctgctgcccctggcccaccaggcctggcccagcctggtgcaccggctgaccagagatgcccccctggccgtgctgcgggccttcaaggtgctgcggaccctgggcagcaaatgtggggacttcctgcggagccgcttctgcaaggatgtgctgcccaagctggccggcagcctggtgacccaggcccccatcagcgcccgggccggccctgtgtacagccacaccctggccttcaagctgcagctggccgtgctgcagggcctgggccccctgtgtgagcggctggacctgggggagggggacctgaacaaggtggctgatgcctgcctgatctacctgtctgtgaagcagcctgtgaagctgcaggaggccgcccggtctgtgttcctgcacctgatgaaggtggaccctgacagcacctggttcctgctgaatgagctgtactgccctgtgcagttcaccccaccccaccccagcctgcaccctgtgcagctgcacggggccagcggccagcagaacccctacaccaccaacgtgctgcagctgctgaaggagctgcagtag

SEQ ID NO: 115331 - DNA, 3270 bp, Artificial Sequence
  derived and/or modified sequence
atggccgtgttcgacacccccgaggaggccttcggcgtgctgcggccagtgtgtgttcagctcacaaagactcagacagtggagaatgtcgagcatcttcagacaaggctgcaggctgtgtcggatagtgccttgcaagagcttcaacaatacatcctttttccgctgagattcacacttaagacccccgggcccaagcgcgagcggctgatccagagtgtagtcgagtgtctgacgtttgtgctcagttcaacgtgcgtcaaggagcaagaactgctccaggaactgtttagtgagctgagtgcgtgtctgtattctccttccagccagaaacccgctgcagtgtctgaggagctgaaactcgccgtgattcaggggttgtccactttgatgcatagcgcctatggagacattatactaaccttttatgagccctcaattctgcccaggttaggcttcgcagtcagtctactcctgggccttgctgaacaggagaaatccaagcagatcaaaatagccgccctgaaatgcctgcaggtactattgctccaatgcgattgccaggatcatcctaggagcttggatgaactcgaacagaaacagctcggcgacctcttcgccagtttcctgccaggcatttctacggctctcaccagactcatcacaggtgatttcaagcaaggacatagcatcgtcgttagctcattgaagatcttttataaaaccgtcagctttattatggcggatgagcagctgaagcgcatatccaaagtacaggcgaagcccgctgttgagcatagggtggcagagctgatggtctaccgcgaggcagactgggtcaagaaaaccggggataagctgaccattttaataaagaagataatcgaatgcgtttctgtgcaccctcactggaaagtgcggctggaactggtggagctcgttgaagatttgctcctaaaatgcagtcaatccctggttgagtgcgccgggcctctcctgaaggctctggtcgggctggtgaatgatgaaagcccagagatccaggctcagtgtaacaaggtgcttcgacacttcgcagatcagaaagtggttgtgggaaacaaagctctggccgacatcctgtcggagtccttacatagtctggctacgagcctgccacgccttatgaacagccaggacgatcagggcaaattttccaccctgtcacttctcctcggctatctgaagctcctcggtccaaagatcaattttgtattgaattcggtggcacacttacagagactctctaaagctctaatccaggtgctagaactagacgtcgcagacattaaaatagtcgaggagcgccggtggaatagtgacgatctgaatgcctcccccaagacgagcgccacccagccctggaaccggattcaaagacgttattttcggttcttcaccgatgagaggatctttatgttgctgcggcaggtatgtcaactcctagggtactacggcaatttgtacctgctggttgatcacttcatggaactgtatcaccagtcagttgtctaccgcaaacaggccgcaatgatcctgaatgaactggtgacaggggcggccggactagaggtcgaggatcttcacgagaagcatattaaaactaatccagaagagctgcgtgaaatcgtgacctcaatcctggaagagtacacatcccaggaaaattggtatctcgtgacttgcctggagaccgaggagatgggagaggagttaatgatggagcaccctggacttcaggcaatcactagcggcgagcacacgtgccaggtcaccagcttccttgcgtttagcaaaccctcacccaccatatgcagtatgaacagtaatatctggcagatttgtatccagctggaggggatcggtcagttcgcgtatgctctgggtaaagatttctgtctcctcttgatgtccgctctgtatcccgtgctcgaaaaagcgggagaccagacgctcttgatttcacaggtcgccacttctacaatgatggatgtatgcagggcatgcggatatgactctctacagcacctgattaaccagaacagcgactatcttgttaacggaatttcgctgaatcttcggcatttggccttacatccccataccccaaaggtgctcgaggtgatgttgcgcaatagcgatgctaacctcctaccattggtagctgacgtggtgcaggatgtgttggcaacactggatcagttctatgataagagggcagccagtttcgtgtcagtgctgcacgcactgatggcagcactagctcaatggttccctgatactggcaatttgggacatctccaggagcagagcttgggagaggaaggctcacacctcaatcagaggcctgccgcgctggaaaagtccaccaccactgcggaggatattgagcagttccttctgaattatctcaaagaaaaagatgtggctgatggaaatgtttctgacttcgataacgaggaggaggaacagtccgtgccccccaaagtggatgagaacgacacccgtcctgatgtagagccacctttaccactccagatccaaatcgccatggacgtgatggagcgctgcattcacctcctgtcagacaaaaacttgcaaattcgattgaaggtcctggacgtgctcgatctgtgtgtcgttgtgctgcaaagccataaaaaccagcttctgcctctggcgcatcaggcctggccaagtctggtccacagactgactagggatgcccccttggctgtattgagggcttttaaggtcctgcggacactgggatccaagtgtggcgactttttgcgaagtcggttttgtaaagacgtgctcccaaagctcgcggggtctctcgtcacgcaggcgcctattagcgctcgggcagggccagtttactcacatacactcgcattcaaattgcagctggctgtcctccagggattaggtcccttgtgtgagcggctcgatttgggcgagggtgatctgaacaaagtggctgacgcatgcttgatttatctgagtgtaaagcagcccgtgaaactgcaggaagcagcccgttccgtgtttttgcacttgatgaaagtagatccggactccacttggttcctgctcaacgagttatactgtcccgtccagttcaccccaccacacccctcactccatcccgtgcagctgcacggggcgagcggccagcagaacccgtacaccacaaacgtgctccagttattgaaagagctccagtag

SEQ ID NO: 115332 - DNA, 3270 bp, Artificial Sequence
  derived and/or modified sequence
atggccgtgttcgacacccccgaggaggccttcggcgtgctgcggccagtgtgcgtccagcttactaagacgcagacagtggagaacgtggaacacctgcaaaccaggctccaggccgtgtccgactccgctctccaggagttgcaacagtacatcctctttcccctcagattcacactaaagacccccggcccaaagcgcgagcgtcttatccaatccgtggtggagtgccttacatttgtattgtcctccacatgcgttaaggaacaggaactgctgcaggaactgttttctgaactgtccgcttgtctctactccccctcaagccagaagcctgcggcagtttcagaggaactgaaactagctgtgatccagggtctgagcacactcatgcacagcgcctacggtgacatcatcctgactttctatgaaccatctatcctgccaaggctgggatttgccgtcagtttgcttttgggacttgctgaacaggagaaatccaagcagatcaagattgccgccctgaagtgcctccaggttttgctcctgcagtgcgactgtcaggaccatcccaggtcactggacgagttggaacaaaaacagctgggcgatctatttgcttctttcctgccgggcatcagcacggccctgacccgtctgatcactggtgatttcaaacagggccattcaatcgtagtgtcaagcttgaagatcttctataagaccgtaagctttataatggcggatgaacagctcaagcgcattagcaaggtgcaggctaaaccagccgttgaacaccgcgtggcagagctcatggtctaccgggaggcagactgggtgaagaagacaggtgataaacttaccattttgatcaaaaaaataattgaatgcgtcagtgtgcatccccactggaaagtgcggctcgaactggttgagctggtagaagatctcctgctgaaatgcagccagagtcttgtggaatgcgctggacccctgttgaaggccctcgttggtctggtaaacgacgagtcgccagaaattcaggcacaatgtaataaggtgctccgccacttcgctgatcagaaggttgtggtggggaataaggcattggctgacattctgagcgaatcacttcattctctggcaacctctcttcctaggttaatgaactcgcaggatgaccaaggtaagttctccacgctcagtctgctgctgggatacctgaaactcctgggcccaaagataaattttgttctgaacagtgtggcacatttacagagacttagtaaagctctgattcaggtgctagaactggacgttgccgatatcaaaatcgttgaagaaaggcggtggaatagtgacgaccttaatgcttccccaaagacctcggccacgcagccttggaacagaatccagagacggtactttcgctttttcaccgatgagaggatttttatgttactgcgccaagtatgccagcttcttggatactatgggaacctgtatttgttagtggaccacttcatggagctctaccaccagtctgtggtgtaccgaaagcaggccgccatgatcctgaacgagctggttacaggggctgcaggtctggaagtggaggacctgcatgaaaagcacattaagacaaacccggaagaacttagagagatcgtgacaagcatcttggaagagtacacctcccaagagaactggtaccttgtcacatgtctggagaccgaggagatgggggaagaattgatgatggagcaccccggcttgcaggctattacttccggtgaacatacatgccaggtgaccagcttcctggccttctcaaaaccttcacccactatttgctccatgaactccaacatctggcagatttgcatccagctggaaggcatcgggcagtttgcctacgcacttggcaaagatttttgcctgctgctgatgagcgcattgtatcctgtgctcgagaaggccggggaccaaacgttgctcatttcccaggttgctacaagtacaatgatggacgtgtgcagagcttgcggctacgattctctgcaacatttgattaaccagaacagcgactatttggtaaacggaatcagcctaaacctgcgccacctggcactgcatccgcatactcctaaggtactggaagtcatgcttcggaacagcgatgctaacctcttgcctctggtcgccgacgttgtacaggacgtgctggctactctggaccaattctacgataaacgcgcggcctccttcgtctctgtgctccacgcgctcatggctgcgcttgcacagtggtttcctgatacagggaacttaggacatcttcaagagcagtcgttgggcgaagaaggcagccacctgaatcagcggcctgctgccctagagaaatctacgacaacagccgaggacatcgaacagttcctgctgaactatctcaaggagaaagacgtagcagacggaaatgtaagtgattttgataacgaggaggaggagcagagcgtcccacccaaggtcgacgagaacgacaccaggccagatgtcgaaccccctctcccattgcagattcagatcgctatggacgtgatggaaaggtgtatccaccttcttagtgacaagaacctccagatccgtcttaaagtgttggatgtgctggatctatgcgtcgttgttttacagtcacataagaaccagctgttgccactagcgcatcaggcctggcccagcctggtgcacagactgaccagagacgcgcccctggccgtgctcagggcgtttaaagtgttgagaaccctcgggagcaaatgtggggatttcctgcgttcccggttttgcaaggacgtgttaccaaaactggccgggtcactcgtcacacaagctcctatctcggcccgagccggccccgtgtattctcacaccctcgcctttaaactgcaactggccgtccttcaggggctggggcccctgtgcgagcgcctcgatctgggcgaaggggacctgaacaaagtcgctgatgcctgtctaatatatctttcggtgaaacaaccggtgaaactgcaggaggctgcacgaagtgtctttttacatctcatgaaagttgatcctgactcaacatggtttcttttgaacgagctatattgccctgtgcaattcactccacctcaccccagcttgcacccagtgcaactgcacggcgcgagtggccagcagaatccatataccacgaacgtcctgcagctcctgaaagagctgcagtag

SEQ ID NO: 115333 - DNA, 3270 bp, Artificial Sequence
  derived and/or modified sequence
atggccgtgttcgacacccccgaggaggccttcggcgtgctgcggcccgtgtgcgttcaacttacaaaaacccagactgtggagaatgtggagcatttacagacacggctgcaggcggtctccgattctgctctgcaggaactccaacagtacattctttttccgctgcgcttcaccttgaaaactccaggtccaaagcgagagcgtctgatccagtctgtggtagaatgcctgaccttcgtccttagctccacgtgtgtgaaagaacaggaactgctgcaggagctgttttcagagctgagcgcatgtctttattctccttcatcacaaaaacccgcagcagtgtccgaagagctgaaactcgccgtgattcagggtctgagtactctcatgcattctgcttacggagacatcattctgaccttttacgagcccagtatcctgcctagactaggctttgccgtgtctcttctgctcggactagccgagcaggaaaagagtaaacaaattaaaattgccgccttgaagtgtttacaggtgttgctgctacagtgtgattgtcaggatcacccccgatctttggatgagttagagcaaaaacagctcggcgatttgtttgcgagcttcctgcctggaatcagtacagcgctcacacggctgattacgggtgactttaagcagggacacagcattgtggtcagctccctgaaaattttttacaaaactgtgagtttcattatggcggacgaacagctgaaaaggatctccaaagtgcaggccaaaccagctgtagaacacagggttgctgagttgatggtctacagagaagctgattgggtgaagaagaccggagacaagctgactatcttgatcaaaaaaatcattgaatgcgtatccgtgcatccccattggaaggtcaggctggagttagtggagctggttgaggatttactgctgaagtgcagccaaagtttggttgaatgtgccggtccattgcttaaggcactggttggtctcgtgaatgacgaatcacctgagatacaggcacagtgcaataaagtcctgaggcatttcgccgaccagaaagtggttgttggaaacaaggctctggccgatatccttagtgagtcgctgcattcattggccaccagccttcctcggcttatgaactctcaggacgaccaggggaagttctcaaccctcagcctcctgctaggctatttgaagctcctggggcctaaaataaattttgtccttaacagcgtggcgcaccttcagaggctttctaaagccctcatccaggttctagaactggacgtagcagatatcaaaatcgtcgaagagagacggtggaatagcgacgacctcaatgccagtccaaagacaagcgccactcagccatggaacagaatacagcggagatattttagattttttacagatgagcggatcttcatgctactccgccaggtctgtcagttgctcggttactatggaaacttgtacctactggtggaccacttcatggaattatatcaccaaagtgtcgtctatcgcaagcaggccgctatgattctgaatgagctggtgacaggcgccgccgggttagaggtggaggatttacatgagaagcacataaagactaacccagaggagttgcgagagattgtcacaagtatcctggaggagtatacctcgcaagaaaattggtatctcgtcacctgtcttgaaaccgaggaaatgggtgaggagctaatgatggaacaccctgggctccaagccattacctccggggaacacacatgccaagtgacttccttccttgccttctccaaacctagccctacaatctgtagcatgaactcaaacatttggcagatttgtatacagctggagggaattggacaatttgcatacgctctgggaaaggacttttgcctcttgctgatgtcggcactgtacccagtgcttgagaaggcaggcgaccagacactgctcatcagtcaggtagccacatcaacaatgatggatgtttgcagagcctgtggctacgattccctgcaacacttgatcaaccaaaactcagactatctcgtcaatggaatcagtttgaatcttcggcatttggcactgcatccacacacacccaaagtgcttgaagttatgttaagaaactcagacgccaatttactcccactggtggcagacgtggttcaggatgttctagcaactctggatcagttttatgataaaagggctgcctctttcgttagcgtgctgcacgctctgatggcagctctggctcaatggtttccggacactggcaatctgggccatctgcaagagcaaagcctgggggaagagggaagtcacctcaatcaacgtcccgcggctctggagaaatccacaaccactgcagaggacattgaacagttcctgttgaactatttgaaagaaaaagatgtggcggacggcaacgtgtcagacttcgacaatgaggaggaagaacagtctgtccctcccaaggtggatgaaaacgacacgaggcccgatgtggagccacctttacctttacagattcaaatcgcaatggatgtgatggagcgctgcatccatttactcagcgacaaaaatttacaaattcgcctaaaagtgctcgatgtgcttgacctctgtgtggtggttctgcaatctcataagaaccagctcctcccactggcacatcaggcttggccatcattggttcatcggttgaccagagacgctcccctcgctgtactgcgcgccttcaaggtgctccgtaccctcggaagtaagtgtggcgacttcctgaggagcaggttttgcaaggacgtgcttccaaagctggcgggctctttagtgacccaggcacctatatccgctcgcgcgggtcctgtgtacagccacacattggcttttaagctgcaattggcagtgctccagggccttgggcctctctgcgagagattagatctcggggaaggcgatctgaacaaggtggcggacgcatgtctgatctacctgagtgttaaacagccagttaaacttcaggaagccgcgaggtccgtgtttcttcacttgatgaaagtggacccagacagcacctggttcctgcttaacgagctgtattgccccgtccagtttactcccccacacccgtccctgcaccctgtgcagcttcacggcgcttccggccagcagaacccctatactactaacgttctccagcttttgaaagagttacagtag

SEQ ID NO: 115334 - DNA, 3270 bp, Artificial Sequence
  derived and/or modified sequence
atggctgtttttgacactcctgaagaggccttcggagtcctacgccctgtgtgcgtgcagctgactaagacacagactgtcgaaaacgtggagcaccttcagacgcgcctgcaggcagtctcagacagcgccttgcaggaactccagcagtacatcttattcccactgagattcaccctgaaaaccccagggccaaagcgtgaaagacttattcagagcgtggtcgaatgtcttacctttgttctgagctccacgtgtgtgaaagagcaggaactgctgcaggaactctttagtgagctgtcagcctgcctgtattctcccagtagccagaagcccgctgcggttagcgaggaactgaagctggcggtcatccagggactttccacgttaatgcattctgcttacggtgatatcattcttaccttctacgaaccatcaatactccccaggttaggcttcgccgtttctttgctactgggacttgccgagcaggaaaagtctaagcagattaaaatcgcagccctcaaatgtctccaggtgcttctgctgcagtgcgactgccaagaccatcctcgtagtctcgatgaacttgagcagaagcaactgggtgatctcttcgcctcatttcttccaggcatcagcactgccctgacccgtctcatcacaggcgatttcaagcagggacatagcatagtggtgtcctcccttaagatattttacaaaacagtttctttcatcatggccgacgaacagttaaaaagaatatccaaggtgcaagctaaacccgcagtggagcaccgtgtggctgaacttatggtctatcgcgaagctgactgggtgaaaaagaccggagacaagctgacaattctgatcaaaaagataatcgagtgtgtcagcgtgcaccctcactggaaggtgagacttgagctcgtggagctggtggaagatctgctgttgaagtgttcccagagcctcgtggagtgcgccggtccgctactcaaggccctggttggactggtgaacgatgagtccccagagatccaggcacaatgtaataaggtgctgcggcactttgcagatcagaaggtggtggtcggaaataaagctttggccgacatcctgtctgaatcactccattctctcgcaacttcattacccaggctgatgaattcccaggacgaccaggggaagttcagcaccctctcgttgctgctcggctatttgaaactgttgggccctaaaatcaattttgtgctgaactcagtggcacatctgcaaaggctcagcaaggcactgattcaagtcctagaattggatgttgctgacataaagattgtggaggaaaggcgctggaatagtgatgatctgaatgcttctccgaaaacgtccgccacccagccatggaatagaatccagcgacgctatttcagatttttcacggatgagcgtatttttatgctcctgcggcaggtgtgtcagctcctggggtactacggcaatctctatcttctcgttgaccattttatggaactttaccaccagagcgtcgtgtaccgtaaacaagcagccatgatcctgaatgaactggtgacgggggcagctggacttgaggtagaggacctgcacgagaaacacatcaaaacaaaccccgaagaactcagggagatagtcacgtctatccttgaggaatacacatcgcaggagaactggtatctggtgacctgcctggagacagaagaaatgggtgaggaacttatgatggagcatcccggattgcaggctatcacctccggcgagcacacttgccaggtcacatctttcctcgctttctctaagccaagcccaacaatctgtagcatgaactctaacatctggcagatttgtatccagctcgagggtataggacaatttgcctacgccttaggcaaagatttttgcctgctgttaatgtcggctctctaccctgttcttgagaaagctggagatcaaactctgcttatcagccaggtggccaccagtaccatgatggacgtttgcagagcgtgcggttatgactcacttcaacacctcattaaccagaatagcgactacctggtgaacgggatcagcctgaacttgcggcacctcgctctgcacccccacacccccaaagtgttggaggttatgttgcggaacagcgatgccaacctgttaccgctggtagcggatgtcgttcaggatgtgctcgctactttggaccagttctacgacaagcgggctgcaagtttcgtgtccgtgctgcatgccctgatggcagccttggcccaatggttccccgacactgggaatctgggccacctgcaggagcagagtctgggcgaagaggggtctcatttgaatcagagacccgcagccttggaaaaatctacaaccaccgcagaagatatcgagcaattcctgcttaattatctgaaagaaaaggatgtagctgatgggaatgtgtcggattttgacaatgaggaagaagaacagagtgttcctcctaaagtggacgagaatgatacgcgccctgatgtggaacctcccctcccacttcagatccagattgccatggatgtgatggagagatgcatacatctgctctcggacaagaatctacagataagactgaaagtgctggacgtcctagatctttgcgttgtggtgctgcagagccataagaatcaactgttgccccttgcacaccaggcctggcctagtctcgttcaccggctgacccgggacgcgcctttggctgtgcttcgggctttcaaggtgctgcgcactttaggcagtaagtgcggcgattttctgaggtctcggttctgcaaggacgtgctgcccaaattggcagggagcctggtcacccaggcccctatttccgctcgagccggacccgtttattcacacacactagctttcaagcttcagctggccgtcctacagggactggggccactgtgtgagcggctggatctcggagaaggcgatctgaacaaggttgcggacgcttgcctgatctacctctccgtgaagcagcctgtgaagctacaagaggcagcaaggagcgttttcctgcacctgatgaaggtcgaccctgattcaacgtggtttctgctgaacgagctgtattgccccgtacagttcacacccccacacccgagtctgcaccctgtgcaactacatggcgcatccgggcagcagaacccatacacaaccaacgtcctacaactgttaaaggaattacagtag

SEQ ID NO: 115335 - DNA, 3270 bp, Artificial Sequence
  derived and/or modified sequence
atggcagtcttcgatacccccgaggaggcgtttggtgtattacgtccggtgtgtgtccagctgacaaaaacccagactgtggagaatgtggagcacttacagacgaggctccaagcggtgtctgactcagccctccaggagctgcaacaatacatcttgtttcctctccgctttaccctgaaaacacctggtccaaaacgcgagagactcatccagtctgtggtcgagtgcctgacatttgtcttatccagcacatgcgtcaaagagcaggagctactccaagagctgttcagtgagttgagcgcatgcctctactcccccagctcacaaaaacctgccgcagtaagcgaagagctgaagcttgccgtgattcaaggtctgagcacgttgatgcattctgcctatggcgatatcatactcaccttctacgaacctagtattctaccacggctcggattcgcagtctctcttctccttggtctggctgagcaggagaagagcaaacagatcaagattgcggctctcaagtgtctccaagtccttctgctgcagtgcgattgtcaggaccaccccagaagcttggatgaacttgaacagaagcagctaggagatctcttcgcatcatttctgcccggaatctcaacagccctcactcgactgataaccggggactttaaacagggtcactcaattgtggtcagtagtctgaaaatcttttataaaactgtctcttttattatggccgatgagcaattaaagagaatatctaaggtgcaagcgaagcccgcagttgaacatcgagtggctgagttaatggtgtaccgggaggctgactgggtgaaaaaaacaggggataagctgacgatcctgataaagaagatcattgaatgtgttagcgtccacccacattggaaagtgcggcttgagctcgtggaattggttgaagatttgttgctgaaatgttcgcagagtttggtcgaatgtgcgggaccactgttaaaagccctcgttggattagtcaacgacgaaagccccgagatccaggctcagtgtaacaaggtattgaggcacttcgctgaccagaaggttgtggtgggaaataaggcactggccgatatcctgtctgaaagccttcactccctagctacttcattaccgagactgatgaatagccaagatgatcagggaaaatttagcacactgtcattgttgttgggctatctaaaactactcggacctaagatcaatttcgtgcttaactcagtcgcacaccttcagagactaagtaaggcactgattcaggtacttgaactggatgtcgcagatatcaagatcgtggaggagcgcagatggaatagcgatgatctgaacgcatctccaaagacatcagctacccagccctggaatcgtatccagcgcagatacttccgcttttttaccgacgagaggattttcatgctgttgcgtcaggtttgccagctcctaggttactatggaaatctttacctcctggtagatcatttcatggagctttatcaccagagcgttgtgtaccgtaagcaagcggcaatgattctcaatgaactggtgaccggcgctgctgggctggaagtagaagacctccacgagaaacacattaagacaaacccggaggaactgagggaaatcgtcacctctattctggaagagtacacgagccaagaaaattggtaccttgtcacttgcttggagacagaagaaatgggggaggaactgatgatggagcatcccggtctccaggccataacaagtggggagcacacatgtcaagttacctcattcctggccttctccaagcctagccctaccatttgcagtatgaacagcaacatctggcagatttgcatacaattggaaggaatcggtcagttcgcctacgcgctgggcaaagatttctgtttgttactcatgagcgcactttatccggtcctcgagaaggctggtgaccagactctacttatatctcaagtagctacttccactatgatggacgtgtgccgcgcttgtggttatgacagtctgcagcatttgatcaatcagaactctgattatcttgtgaatggcattagtctcaatctgaggcaccttgcgctgcacccacacaccccgaaagtactggaggtgatgctgcggaactccgacgctaacttactgcccctggtcgcagatgttgtacaagatgtgctggctaccttagatcagttttacgataagcgcgctgcaagttttgtatccgttctgcatgctcttatggccgctttagcccaatggttccccgatactggtaatctgggtcacctgcaggagcagtccctaggtgaggagggaagtcacttgaatcagagacctgccgctctagaaaaatccacgacgactgctgaggatatagagcagttcctactcaactacttgaaggaaaaggacgtcgccgatggcaacgtgagcgatttcgacaacgaggaggaggaacagtccgtaccgccaaaggtggacgaaaacgacactcgcccagacgtcgagcctcctctgcctttgcagatacagattgcgatggacgtcatggaacgctgcatccacttactgtcagacaagaacctgcagatacggctgaaagtcctggatgtcctggacctctgtgtggtcgttttacagtcccataagaaccagctcctgccattggctcatcaggcttggccatcgctagtacataggctaacccgcgatgctccactagcagtcctgcgagccttcaaggtcctgcgaaccttagggagcaagtgtggcgacttcctgcgttctaggttttgcaaggacgttctgcccaagctggctggttcccttgtgacgcaagcacccatctctgccagagctgggccagtgtactcccacaccctggccttcaaattgcagctagccgtcttgcagggcctgggacctctttgcgaacgcctggatctcggagagggtgacctgaataaggtagcagatgcttgtctcatatatctatccgtgaaacagccagttaagctgcaagaggccgcacggtcagtcttcctacatctgatgaaagtggacccagattcaacttggttcctgctgaacgagctttattgccccgttcagttcaccccgcctcacccatctctgcatcctgtgcagcttcatggggcatccggacagcagaacccatataccacgaatgtcttgcagctcctcaaggagctgcaatag

SEQ ID NO: 115336 - DNA, 3270 bp, Artificial Sequence
  derived and/or modified sequence
atggctgtattcgatacaccagaggaagcattcggagtgctgaggccagtgtgtgtgcaactgacaaagactcaaactgtcgaaaacgtggagcatttgcaaaccaggctgcaggctgtgtccgattcagctctgcaagaactgcagcagtacatactgttccccctccgttttacactgaagacacccggacctaaacgggaacgtctgatacaatcagtagtggaatgtctgaccttcgtcctgtcatccacttgcgtgaaggagcaggaactgctacaagagttgttcagcgaattgtccgcttgcctttactcgccttccagtcagaagccagcggcagtgtccgaagaactgaagttggccgtaatccagggcctgagcacattgatgcatagcgcctacggcgacattatcctgacgttttatgagcctagcatcttgcccaggctggggtttgccgtgtccctgcttctcggtctggccgagcaggagaagagtaaacaaatcaagattgcagccctaaagtgcttgcaggtacttctgctacagtgcgactgccaagaccatcccaggtcactggatgaactggagcagaagcagctgggggatctgtttgcaagttttttgcccggaatcagtactgcccttacgagactcatcacaggagacttcaagcaaggacatagtatcgtcgtaagcagcctaaaaattttctacaagaccgtgtcctttatcatggctgacgaacagttaaaacggatttctaaggtccaggcaaagcccgctgtagagcaccgggtcgccgagctcatggtgtaccgagaagctgactgggtcaaaaagacaggcgataaactcacaattttaatcaagaaaatcatcgagtgtgtgtctgtgcacccccattggaaagtgcggctggagttagtggagctggtagaggacttactgctcaagtgttctcaatctctggtcgagtgtgcaggcccactgctgaaagccctggtcggactcgtgaacgatgagtccccagaaattcaggcacaatgcaacaaggtgttacgccatttcgctgatcagaaggtcgtcgttgggaacaaggctctcgctgacatcctgagcgagtctctccactccctcgccactagtttgcctcggctaatgaactcccaggatgatcaaggcaaatttagcacgctgagcctcctgttgggctacctcaagctactaggtcccaagattaatttcgttctaaatagcgttgcacacttgcagcgcctgtctaaggcacttattcaggtcctcgagctcgacgtagccgacattaagatcgtggaggaacgaagatggaattcagatgaccttaacgcttctccaaaaacaagcgccactcagccatggaaccgtatccagagaagatactttagattttttacagatgaacggatcttcatgttgctcagacaagtgtgccaacttctgggctattacgggaatctgtacttgttagtggatcacttcatggagttgtatcaccagtcggtggtctataggaaacaggcggctatgattctgaacgagcttgtgactggcgctgccggacttgaggtggaggatctgcatgagaagcacattaagacgaatcctgaagagctgagggagattgttaccagcatcctggaggagtatacgagccaagagaactggtacttggtgacctgtctggaaaccgaagagatgggcgaggagctgatgatggaacatccaggtcttcaggcgataacctccggcgaacacacctgccaggtgactagttttttagcattttcaaagccaagtcccaccatttgtagcatgaatagcaacatatggcagatttgtatccagctggaaggcattggtcagtttgcatatgccctcggcaaggatttctgtctgctgctaatgagcgcattatatccagttcttgaaaaagctggggaccagactctcctgatttctcaagtggccactagcacaatgatggacgtgtgtagggcctgtggatacgatagcctccagcacttgataaatcagaattctgactacctggtcaatggcattagtctgaacctacgccacttagctctgcatccgcataccccgaaagtgctggaggtcatgcttcgcaattcggatgctaacctgctccctcttgtggctgacgtagtacaggacgtgctggctaccctcgatcaattctacgataagcgggctgcaagctttgtaagcgtgctgcatgcattaatggcagcactggctcaatggttcccagacaccggaaacctgggccatttgcaggagcagtccctgggggaggagggctcacacctgaaccagcgcccagccgctctggagaaaagtaccaccacagctgaggacatagagcagttcctgctcaactaccttaaagaaaaggatgtggccgatggcaacgttagcgacttcgacaatgaggaggaggaacagagtgttccgccaaaggtggacgaaaatgacacacgcccagacgtagaacctccgttgccccttcagatccagattgctatggatgtgatggagaggtgtattcacctgctttcggacaagaaccttcaaattaggctcaaggttcttgatgtcttagacctctgtgtagtggtcctccagagccataaaaaccaactactgcctcttgcacatcaggcatggccttctctcgtccatagactcaccagagatgccccactggctgtgttgagagcgtttaaagtcctacggacactgggttccaagtgcggggatttcctgaggtcccggttttgcaaggacgttctgccaaagttggctggttcattggttacacaggcacctatttcagctcgtgccggtcccgtgtattcccatactctggcctttaagttacagcttgccgtgctccaagggctaggcccactctgtgaacgcctggacctgggtgagggggacctcaacaaagttgccgacgcctgtctcatctatctgagcgttaagcagcctgtcaagttgcaagaagcagcacggagtgtttttcttcatcttatgaaagtggacccagacagtacgtggtttctcctgaacgaattgtactgccctgtccaatttaccccacctcatcctagtctgcatcctgttcagctgcacggtgccagtgggcagcagaacccttacaccacaaacgtcctacagctcttgaaggaacttcagtag

SEQ ID NO: 115337 - DNA, 3825 bp, Artificial Sequence
  derived and/or modified sequence
acttagcgcgtcacttccggcgaggcagaggaggcgggagagtgagagaaaggctggaagacgagcctgcaggatgtttcctcaatgaggggaaggctgctgcacaatggcagtttttgatactcctgaggaggcctttggtgtcttacgtccagtctgtgttcagctcacaaagacccagacagtggagaatgtggagcatctgcagacacgactacaagctgtgagtgacagtgcccttcaggaacttcagcagtacatcctcttccctctgcgatttaccctgaagaccccaggtcccaaaagagagcgtttgatccaaagtgtggtggaatgcctcacatttgtcctttcttcaacatgtgtgaaagaacaggagcttctccaggaactcttttcagaactctctgcttgtctgtattcacccagctcccaaaaacctgcggctgtgtccgaggagttgaaattggctgtgatccagggacttagcacattaatgcactcagcttatggggacatcattctgactttttatgagccctccattctgccacgtttaggatttgctgtatctttactgttaggccttgcagaacaggagaaatcaaagcaaattaaaattgctgccttaaaatgtttacaggttctactcttgcagtgtgattgtcaggaccatccaaggtcattggatgaacttgaacaaaagcagctgggggatttgtttgcctcttttttacctggaatctcaactgcactgaccaggcttatcacaggagactttaaacaaggtcacagcattgtcgtatcttccctaaagatcttttacaagacagtgagcttcattatggctgatgaacagctcaaaagaatctcaaaggtccaagcaaaacctgcagttgagcacagagtagcagagctgatggtttacagggaagcagattgggtaaaaaagactggcgacaagttgactatccttattaaaaagataattgagtgtgtttctgttcacccacactggaaggtgagactggaactggtagaacttgtggaggaccttcttttgaagtgcagtcaatcattggtcgaatgtgctggtccccttctgaaggccttagtgggactagtaaatgatgagagtcctgaaatccaagcccagtgcaataaagttctgagacattttgcagatcaaaaagtagtggtgggcaacaaagccctcgctgacatcttgtcagaaagcctgcattcccttgccacatctcttcctcgcctaatgaactcccaagatgaccagggcaaattctctactctttccttgttacttggttatctgaaactcttgggcccaaaaataaactttgtcctcaactctgtggcccatctccagcggctttccaaagcactcatccaagttctagagctagacgtggctgacatcaagattgttgaggaacggcgttggaactctgatgatctgaatgcttctccaaagacctcagccacacagccttggaaccgcatccagaggagatatttccgcttcttcactgatgagagaatcttcatgctcttgaggcaggtttgtcagctacttggttattatgggaatctttatttgcttgtggatcactttatggaactttaccatcaatctgtggtttaccggaagcaagctgccatgatccttaatgaactggttacaggggctgctgggctggaggttgaggatcttcacgaaaaacatattaaaacaaacccagaagaactgagagagattgtgacatctatacttgaagaatacacaagtcaagaaaattggtatttggttacctgtcttgaaactgaggaaatgggagaggagctgatgatggagcacccaggcctccaagccatcacgtctggtgaacacacctgccaagttacatcttttctagccttctcaaagccaagtcccactatttgctccatgaacagtaacatctggcaaatatgcattcagttggaaggaattggccagtttgcatatgcactaggaaaagacttctgtttgctcttgatgtcagccctttatccagtactggagaaggctggagaccaaaccctactcattagtcaggtggctaccagcaccatgatggacgtttgccgtgcttgtggctacgactccctgcagcacctgatcaatcaaaattcagactatttagtgaatgggatctctttaaatctgcgtcatctggctctgcatcctcataccccaaaggtcctggaagtcatgctgcggaactcagatgctaacctgcttcctttggtggcagatgtggttcaagatgtcttggccaccctggaccaattttacgataagagagctgcttcctttgtcagcgttctgcatgctctgatggcagcattagcccagtggttcccagacacaggtaatcttgggcacctccaagagcaaagtttaggagaagagggaagtcatttgaaccaaagaccagcagctcttgagaagagcaccaccacagctgaagacatcgaacagtttttgctgaactacctcaaagagaaggatgtggcagatggaaatgtctcggattttgataatgaagaagaggaacagtcagtccctcccaaagtggatgagaatgacacccgtccagatgtggagccaccactgccattgcagatccaaatagccatggacgtgatggaacgctgcatccacttgttgtcagataaaaatctgcaaatccgcctgaaggtcttggatgtgctggatctgtgtgtggttgttcttcagtcccacaaaaaccagctgcttcccttggctcatcaggcctggccctcgctcgttcaccgactcacacgggacgcccccctggcagtgcttagagccttcaaggttttacgtaccctgggaagcaagtgtggtgactttcttcgcagccggttctgcaaagatgtcctgccaaagctggctggctccctagtcacccaggcccccatcagtgccagggctggaccagtttactcgcacacgctggccttcaagttgcagctggctgtcttacagggcctgggccccctctgtgagagactggacctaggtgagggtgacctgaataaagtggctgatgcctgcttgatttacctcagtgtcaaacagcccgtgaaattacaagaggctgccaggagcgtcttcctccacttgatgaaggtggacccagactccacctggttcctcctgaacgagctttactgccccgtgcagttcacacctccccaccccagcctccaccctgtgcagctgcacggggccagcgggcagcagaacccctacacgaccaacgtgctccagctgctcaaggagctgcagtgaccctgctcccccaccacagaggccaccgatccctcccctactgccagccagaagctgggctgaccccaccccggccataggcggtggcagcggcagcagagaaggtgaattagttagccaatcgatttataaattgatcgatcacacaactgcttagaaatggattgaaggaaagtagctgactattatttatgtttcataccttgtgttgtcaagtgacattgtctggtggctctaagggtttaaccccttagcctaccatctctatagccccagctccctcacaggccacacacacacacacacaagaggtcagttcccctccatctgcatacacctccctgtcttcaaataatgagatggaactaatttgttttacctaacctgatctttgggaaacaaacggaaataaagacacttcttggatgaaaagtatgatcaaaagctca

SEQ ID NO: 115338 - DNA, 3958 bp, Artificial Sequence
  derived and/or modified sequence
gcgtcacttccggcgaggcagaggaggcgggagagtgagagaaaggctggaagacgagacctgctcactctgtcaccgaggctagagtacagtggcacaatcacagctcattgcagcctcaacctcccaggctcaatcgatccttccaactgagcctccctagcagctgggactattagtgcacaccaccacacctagcctgcaggatgtttcctcaatgaggggaaggctgctgcacaatggcagtttttgatactcctgaggaggcctttggtgtcttacgtccagtctgtgttcagctcacaaagacccagacagtggagaatgtggagcatctgcagacacgactacaagctgtgagtgacagtgcccttcaggaacttcagcagtacatcctcttccctctgcgatttaccctgaagaccccaggtcccaaaagagagcgtttgatccaaagtgtggtggaatgcctcacatttgtcctttcttcaacatgtgtgaaagaacaggagcttctccaggaactcttttcagaactctctgcttgtctgtattcacccagctcccaaaaacctgcggctgtgtccgaggagttgaaattggctgtgatccagggacttagcacattaatgcactcagcttatggggacatcattctgactttttatgagccctccattctgccacgtttaggatttgctgtatctttactgttaggccttgcagaacaggagaaatcaaagcaaattaaaattgctgccttaaaatgtttacaggttctactcttgcagtgtgattgtcaggaccatccaaggtcattggatgaacttgaacaaaagcagctgggggatttgtttgcctcttttttacctggaatctcaactgcactgaccaggcttatcacaggagactttaaacaaggtcacagcattgtcgtatcttccctaaagatcttttacaagacagtgagcttcattatggctgatgaacagctcaaaagaatctcaaaggtccaagcaaaacctgcagttgagcacagagtagcagagctgatggtttacagggaagcagattgggtaaaaaagactggcgacaagttgactatccttattaaaaagataattgagtgtgtttctgttcacccacactggaaggtgagactggaactggtagaacttgtggaggaccttcttttgaagtgcagtcaatcattggtcgaatgtgctggtccccttctgaaggccttagtgggactagtaaatgatgagagtcctgaaatccaagcccagtgcaataaagttctgagacattttgcagatcaaaaagtagtggtgggcaacaaagccctcgctgacatcttgtcagaaagcctgcattcccttgccacatctcttcctcgcctaatgaactcccaagatgaccagggcaaattctctactctttccttgttacttggttatctgaaactcttgggcccaaaaataaactttgtcctcaactctgtggcccatctccagcggctttccaaagcactcatccaagttctagagctagacgtggctgacatcaagattgttgaggaacggcgttggaactctgatgatctgaatgcttctccaaagacctcagccacacagccttggaaccgcatccagaggagatatttccgcttcttcactgatgagagaatcttcatgctcttgaggcaggtttgtcagctacttggttattatgggaatctttatttgcttgtggatcactttatggaactttaccatcaatctgtggtttaccggaagcaagctgccatgatccttaatgaactggttacaggggctgctgggctggaggttgaggatcttcacgaaaaacatattaaaacaaacccagaagaactgagagagattgtgacatctatacttgaagaatacacaagtcaagaaaattggtatttggttacctgtcttgaaactgaggaaatgggagaggagctgatgatggagcacccaggcctccaagccatcacgtctggtgaacacacctgccaagttacatcttttctagccttctcaaagccaagtcccactatttgctccatgaacagtaacatctggcaaatatgcattcagttggaaggaattggccagtttgcatatgcactaggaaaagacttctgtttgctcttgatgtcagccctttatccagtactggagaaggctggagaccaaaccctactcattagtcaggtggctaccagcaccatgatggacgtttgccgtgcttgtggctacgactccctgcagcacctgatcaatcaaaattcagactatttagtgaatgggatctctttaaatctgcgtcatctggctctgcatcctcataccccaaaggtcctggaagtcatgctgcggaactcagatgctaacctgcttcctttggtggcagatgtggttcaagatgtcttggccaccctggaccaattttacgataagagagctgcttcctttgtcagcgttctgcatgctctgatggcagcattagcccagtggttcccagacacaggtaatcttgggcacctccaagagcaaagtttaggagaagagggaagtcatttgaaccaaagaccagcagctcttgagaagagcaccaccacagctgaagacatcgaacagtttttgctgaactacctcaaagagaaggatgtggcagatggaaatgtctcggattttgataatgaagaagaggaacagtcagtccctcccaaagtggatgagaatgacacccgtccagatgtggagccaccactgccattgcagatccaaatagccatggacgtgatggaacgctgcatccacttgttgtcagataaaaatctgcaaatccgcctgaaggtcttggatgtgctggatctgtgtgtggttgttcttcagtcccacaaaaaccagctgcttcccttggctcatcaggcctggccctcgctcgttcaccgactcacacgggacgcccccctggcagtgcttagagccttcaaggttttacgtaccctgggaagcaagtgtggtgactttcttcgcagccggttctgcaaagatgtcctgccaaagctggctggctccctagtcacccaggcccccatcagtgccagggctggaccagtttactcgcacacgctggccttcaagttgcagctggctgtcttacagggcctgggccccctctgtgagagactggacctaggtgagggtgacctgaataaagtggctgatgcctgcttgatttacctcagtgtcaaacagcccgtgaaattacaagaggctgccaggagcgtcttcctccacttgatgaaggtggacccagactccacctggttcctcctgaacgagctttactgccccgtgcagttcacacctccccaccccagcctccaccctgtgcagctgcacggggccagcgggcagcagaacccctacacgaccaacgtgctccagctgctcaaggagctgcagtgaccctgctcccccaccacagaggccaccgatccctcccctactgccagccagaagctgggctgaccccaccccggccataggcggtggcagcggcagcagagaaggtgaattagttagccaatcgatttataaattgatcgatcacacaactgcttagaaatggattgaaggaaagtagctgactattatttatgtttcataccttgtgttgtcaagtgacattgtctggtggctctaagggtttaaccccttagcctaccatctctatagccccagctccctcacaggccacacacacacacacacaagaggtcagttcccctccatctgcatacacctccctgtcttcaaataatgagatggaactaatttgttttacctaacctgatctttgggaaacaaacggaaataaagacacttcttggatgaaaagtatgatcaaaagctca

SEQ ID NO: 115339 - DNA, 3791 bp, Artificial Sequence
  derived and/or modified sequence
cttgctttgaacttgacatttttactgaacagtttccttcctccagcctgcaggatgtttcctcaatgaggggaaggctgctgcacaatggcagtttttgatactcctgaggaggcctttggtgtcttacgtccagtctgtgttcagctcacaaagacccagacagtggagaatgtggagcatctgcagacacgactacaagctgtgagtgacagtgcccttcaggaacttcagcagtacatcctcttccctctgcgatttaccctgaagaccccaggtcccaaaagagagcgtttgatccaaagtgtggtggaatgcctcacatttgtcctttcttcaacatgtgtgaaagaacaggagcttctccaggaactcttttcagaactctctgcttgtctgtattcacccagctcccaaaaacctgcggctgtgtccgaggagttgaaattggctgtgatccagggacttagcacattaatgcactcagcttatggggacatcattctgactttttatgagccctccattctgccacgtttaggatttgctgtatctttactgttaggccttgcagaacaggagaaatcaaagcaaattaaaattgctgccttaaaatgtttacaggttctactcttgcagtgtgattgtcaggaccatccaaggtcattggatgaacttgaacaaaagcagctgggggatttgtttgcctcttttttacctggaatctcaactgcactgaccaggcttatcacaggagactttaaacaaggtcacagcattgtcgtatcttccctaaagatcttttacaagacagtgagcttcattatggctgatgaacagctcaaaagaatctcaaaggtccaagcaaaacctgcagttgagcacagagtagcagagctgatggtttacagggaagcagattgggtaaaaaagactggcgacaagttgactatccttattaaaaagataattgagtgtgtttctgttcacccacactggaaggtgagactggaactggtagaacttgtggaggaccttcttttgaagtgcagtcaatcattggtcgaatgtgctggtccccttctgaaggccttagtgggactagtaaatgatgagagtcctgaaatccaagcccagtgcaataaagttctgagacattttgcagatcaaaaagtagtggtgggcaacaaagccctcgctgacatcttgtcagaaagcctgcattcccttgccacatctcttcctcgcctaatgaactcccaagatgaccagggcaaattctctactctttccttgttacttggttatctgaaactcttgggcccaaaaataaactttgtcctcaactctgtggcccatctccagcggctttccaaagcactcatccaagttctagagctagacgtggctgacatcaagattgttgaggaacggcgttggaactctgatgatctgaatgcttctccaaagacctcagccacacagccttggaaccgcatccagaggagatatttccgcttcttcactgatgagagaatcttcatgctcttgaggcaggtttgtcagctacttggttattatgggaatctttatttgcttgtggatcactttatggaactttaccatcaatctgtggtttaccggaagcaagctgccatgatccttaatgaactggttacaggggctgctgggctggaggttgaggatcttcacgaaaaacatattaaaacaaacccagaagaactgagagagattgtgacatctatacttgaagaatacacaagtcaagaaaattggtatttggttacctgtcttgaaactgaggaaatgggagaggagctgatgatggagcacccaggcctccaagccatcacgtctggtgaacacacctgccaagttacatcttttctagccttctcaaagccaagtcccactatttgctccatgaacagtaacatctggcaaatatgcattcagttggaaggaattggccagtttgcatatgcactaggaaaagacttctgtttgctcttgatgtcagccctttatccagtactggagaaggctggagaccaaaccctactcattagtcaggtggctaccagcaccatgatggacgtttgccgtgcttgtggctacgactccctgcagcacctgatcaatcaaaattcagactatttagtgaatgggatctctttaaatctgcgtcatctggctctgcatcctcataccccaaaggtcctggaagtcatgctgcggaactcagatgctaacctgcttcctttggtggcagatgtggttcaagatgtcttggccaccctggaccaattttacgataagagagctgcttcctttgtcagcgttctgcatgctctgatggcagcattagcccagtggttcccagacacaggtaatcttgggcacctccaagagcaaagtttaggagaagagggaagtcatttgaaccaaagaccagcagctcttgagaagagcaccaccacagctgaagacatcgaacagtttttgctgaactacctcaaagagaaggatgtggcagatggaaatgtctcggattttgataatgaagaagaggaacagtcagtccctcccaaagtggatgagaatgacacccgtccagatgtggagccaccactgccattgcagatccaaatagccatggacgtgatggaacgctgcatccacttgttgtcagataaaaatctgcaaatccgcctgaaggtcttggatgtgctggatctgtgtgtggttgttcttcagtcccacaaaaaccagctgcttcccttggctcatcaggcctggccctcgctcgttcaccgactcacacgggacgcccccctggcagtgcttagagccttcaaggttttacgtaccctgggaagcaagtgtggtgactttcttcgcagccggttctgcaaagatgtcctgccaaagctggctggctccctagtcacccaggcccccatcagtgccagggctggaccagtttactcgcacacgctggccttcaagttgcagctggctgtcttacagggcctgggccccctctgtgagagactggacctaggtgagggtgacctgaataaagtggctgatgcctgcttgatttacctcagtgtcaaacagcccgtgaaattacaagaggctgccaggagcgtcttcctccacttgatgaaggtggacccagactccacctggttcctcctgaacgagctttactgccccgtgcagttcacacctccccaccccagcctccaccctgtgcagctgcacggggccagcgggcagcagaacccctacacgaccaacgtgctccagctgctcaaggagctgcagtgaccctgctcccccaccacagaggccaccgatccctcccctactgccagccagaagctgggctgaccccaccccggccataggcggtggcagcggcagcagagaaggtgaattagttagccaatcgatttataaattgatcgatcacacaactgcttagaaatggattgaaggaaagtagctgactattatttatgtttcataccttgtgttgtcaagtgacattgtctggtggctctaagggtttaaccccttagcctaccatctctatagccccagctccctcacaggccacacacacacacacacaagaggtcagttcccctccatctgcatacacctccctgtcttcaaataatgagatggaactaatttgttttacctaacctgatctttgggaaacaaacggaaataaagacacttcttggatgaaaagt

SEQ ID NO: 115340 - DNA, 564 bp, Artificial Sequence
  derived and/or modified sequence
atgaacaacaccctgagaaaggacggcaagaaggactgctgcttcgagatcagcgcccccgacaagagaatctaccagttcaccgccgccagccccaaggacgccgaggagtgggtgcagcagctgaagttcgtgctgcaggacatggagagcgacatcatccccgaggactacgacgagagaggcgagctgtacgacgacgtggaccaccccctgcccatcagcaaccccctgaccagcagccagcccatcgacgacgagatctacgaggagctgcccgaggaggaggaggacagcgcccccgtgaaggtggaggagcagagaaagatgagccaggacagcgtgcaccacaccagcggcgacaagagcaccgactacgccaacttctaccagggcctgtgggactgcaccggcgccttcagcgacgagctgagcttcaagagaggcgacgtgatctacatcctgagcaaggagtacaacagatacggctggtgggtgggcgagatgaagggcgccatcggcctggtgcccaaggcctacatcatggagatgtacgacatctag

SEQ ID NO: 115341 - DNA, 564 bp, Artificial Sequence
  derived and/or modified sequence
atgaacaataccctcaggaaagacggaaagaaggattgctgttttgagatcagtgcaccagacaaaagaatatatcagttcacagcggccagtcctaaggacgccgaggaatgggtgcagcagctgaagtttgtcttacaagatatggaaagcgatatcattccagaagactatgacgagcgaggagagctatacgatgatgtagatcaccctctgcccatcagcaacccgctaacttcaagtcaacccatcgatgacgaaatctacgaagagcttccagaggaagaggaggactcagcgcccgtgaaggttgaggaacagcggaaaatgagtcaggacagtgtccaccacacgtccggtgacaagtctaccgactacgcaaacttctatcagggtttgtgggactgcacaggggcatttagcgacgagcttagcttcaaaaggggtgacgttatctatatattatctaaggagtacaataggtacgggtggtgggttggggaaatgaaaggggcaattggccttgtccccaaggcctacatcatggaaatgtatgatatttag

SEQ ID NO: 115342 - DNA, 564 bp, Artificial Sequence
  derived and/or modified sequence
atgaacaacaccctgaggaaggatggcaagaaggactgctgctttgagatcagcgccccagacaagaggatctaccagttcaccgctgccagccccaaggatgctgaggagtgggtgcagcagctgaagtttgtgctgcaggacatggagagtgacatcatccctgaggactatgatgagcggggggagctgtatgatgatgtggaccaccccctgcccatcagcaaccccctgaccagcagccagcccattgatgatgagatctatgaggagctgcctgaggaggaggaggacagcgcccctgtgaaggtggaggagcagaggaagatgagccaggacagcgtgcaccacaccagcggggacaagagcacagattatgccaacttctaccagggcctgtgggactgcacaggagccttcagtgatgagctgtccttcaagagaggagatgtgatctacatcctgagcaaggagtacaacagatatggctggtgggtgggggagatgaagggggccatcggcctggtgcccaaggcctacatcatggagatgtatgacatctag

SEQ ID NO: 115343 - DNA, 564 bp, Artificial Sequence
  derived and/or modified sequence
atgaacaacaccctgcggaaggacggcaagaaggactgctgcttcgagatcagcgctccggacaagcgcatctatcaattcactgcagctagccctaaagatgcagaagagtgggtgcagcaactgaagtttgttttgcaggacatggagtctgatattattcccgaggactacgatgaacggggagaactctacgacgacgttgaccatcccctccctattagcaacccattgacaagcagccaacccatcgatgacgaaatatacgaggaactgcctgaggaggaggaggattcagccccagtgaaggttgaagaacagagaaaaatgagccaggatagtgtgcaccataccagtggtgacaagtccactgactacgccaatttctaccagggcctttgggattgcaccggggctttctccgatgaactttcctttaaacgcggagacgttatctacatattgagcaaagagtacaacagatacggatggtgggttggcgaaatgaagggagccatcggactcgtgcccaaggcctatatcatggagatgtacgacatctag

SEQ ID NO: 115344 - DNA, 564 bp, Artificial Sequence
  derived and/or modified sequence
atgaataataccctgcgcaaagatgggaaaaaagattgctgttttgaaatcagcgccccagataaaagaatttatcagtttaccgcagcttcccccaaggacgctgaggagtgggtgcagcagctcaaatttgtgctgcaagacatggagagcgacattattccagaggattacgacgagagaggcgaactgtatgatgacgttgatcatcccctgcctattagcaaccctttgacttcctcacagcctatcgacgacgagatctatgaggagttacccgaggaggaggaggacagcgctcctgtgaaggttgaagagcagaggaagatgagccaggacagcgttcatcacacctccggggacaagagcacagattatgctaacttttaccaaggtctttgggactgcacgggtgctttctctgacgagctttctttcaaacggggagatgttatctacattctgagtaaagagtacaatagatatggatggtgggtaggtgagatgaaaggagctattggcttggtgcctaaggcctacatcatggaaatgtacgacatctag

SEQ ID NO: 115345 - DNA, 618 bp, Artificial Sequence
  derived and/or modified sequence
atggccgccagagacgccaccagcggcagcctgagcgaggagagcagcgccctggacctgcccagcgcctgcgacatcagagactacgtgctgcagggccccagccaggaggccaacagcgaggccttcagcagcctggagttccacagcttcccctacagcagcgacgtggaccccgacaccagcaacctgaacatcgagcagaacaacagctggaccgccgagaacttctggctggaccccgccgtgaagggccagagcgagaaggaggaggacgacggcctgagaaagagcctggacagattctacgagatgttcggccacccccagcccggcagcgccaacagcctgagcgccagcgtgtgcaagtgcctgagccagaagatcacccagctgagaggccaggagagccagaagtacgccctgagaagcttccagatggccagagtgatcttcaacagagacggctgcagcgtgctgcagagacacagcagagacacccacttctaccccctggaggagggcagcaccagcctggacgacgagaagcccaaccccggcctgagcaaggacatcacccacttcctgctgcagcagaacgtgatgaaggacctgtag

SEQ ID NO: 115346 - DNA, 456 bp, Artificial Sequence
  derived and/or modified sequence
atggccgccagagacgccaccagcggcagcctgagcgaggagagcagcgccctggacctgcccagcgcctgcgacatcagagactacgtgctgcagggccccagccaggaggccaacagcgaggccttcagcagcctggagttccacagcttcccctacagcagcgacgtggaccccgacaccagcaacctgaacatcgagcagaacaacagctggaccgccgagaacttctggctggaccccgccgtgaagggccagagcgagaaggaggaggacgacggcctgagaaagagcctggacagattctacgagatgttcggccacccccagcccggcagcgccaacagcctgagcgccagcgtgtgcaagtgcctgagccagaagatcacccagctgagaggccaggagagccagaagtacgccctgagacagcagaacgtgatgaaggacctgtag

SEQ ID NO: 115347 - DNA, 366 bp, Artificial Sequence
  derived and/or modified sequence
atggccgccagagacgccaccagcggcagcctgagcgaggagagcagcgccctggacctgcccagcgcctgcgacatcagagactacgtgctgcagggccccagccaggaggccaacagcgaggccttcagcagcctggagttccacagcttcccctacagcagcgacgtggaccccgacaccagcaacctgaacatcgagcagaacaacagctggaccgccgagaacttctggctggaccccgccgtgaagggccagagcgagaaggaggaggacgacggcctgagaaagagcctggacagattctacgagatgttcggccacccccagcccggcagcgccaacagcctgagcgccagcgtgtag

SEQ ID NO: 115348 - DNA, 618 bp, Artificial Sequence
  derived and/or modified sequence
atggcagctagagacgccacttctgggtccctgtccgaagaatcaagcgcgttagatctgccctcggcatgtgacatacgggattacgtgcttcaggggccaagtcaggaagcaaattcggaagccttctcttctctcgagttccacagcttcccttatagttctgacgtggaccccgacaccagtaacctcaacatcgaacaaaataacagctggactgccgagaatttttggctggatccagcagtgaagggacagtcagagaaagaggaggacgacggcttacgaaagtccttagacaggttctacgaaatgttcgggcatccgcaacccggcagcgcaaactcactcagcgctagtgtgtgtaagtgcttatctcagaaaatcactcaactgcgggggcaggaatcacagaaatacgcactgaggtctttccagatggctagagtgatctttaaccgtgatgggtgttctgtcctacagcgccactccagggacacgcatttttatccactcgaagaaggttcaacatccttggatgacgagaagcccaatcccgggctcagcaaggacattacccattttctcctgcagcaaaacgtgatgaaggatctatag

SEQ ID NO: 115349 - DNA, 456 bp, Artificial Sequence
  derived and/or modified sequence
atggcagctagggacgcaacatccgggtccctctctgaggaaagctctgccttggacctgcccagcgcgtgcgacatccgggactacgtgcttcaagggccctcccaggaggctaatagcgaagccttttcttctcttgagtttcactcattcccgtactcttccgatgtcgacccagatacgtctaatctcaatatcgagcaaaataactcctggacggcggaaaacttctggctagaccccgcggtcaaaggacagtctgagaaagaagaggatgacggtctaagaaaatcgctggatagattttatgagatgttcggacacccacagccgggatctgctaacagcctgtcagccagcgtgtgtaaatgcttgtctcagaaaataacccagctccgcggtcaggagtcacaaaaatacgcacttcggcagcagaacgtcatgaaagatttgtag

SEQ ID NO: 115350 - DNA, 366 bp, Artificial Sequence
  derived and/or modified sequence
atggcagccagggacgcaaccagcgggagtctgagcgaagaaagttcagccctggatctaccatccgcctgcgatatcagagattatgtactccaggggccgagccaggaggctaattcagaagccttttcctcccttgagttccattcgtttccgtatagctctgatgtggaccccgacacatcaaatctaaacatagaacagaacaattcatggaccgccgagaacttttggctggaccccgcagtcaagggccagtcggagaaggaagaagacgacggcctccgcaagagtctcgaccgattttacgagatgtttggtcacccacagcccggatcagccaactccctgtcggcaagtgtgtag

SEQ ID NO: 115351 - DNA, 618 bp, Artificial Sequence
  derived and/or modified sequence
atggccgccagagatgccaccagcggcagcctgtctgaggagagcagcgccctggacctgcccagcgcctgtgacatccgggactatgtgctgcagggccccagccaggaggccaacagcgaggccttcagcagcctggagttccacagcttcccctacagcagtgatgtggaccctgacaccagcaacctgaacatcgagcagaacaacagctggacagctgagaacttctggctggaccctgctgtgaagggccagagcgagaaggaggaggatgatggcctgaggaagagcctggaccgcttctatgagatgtttggccacccccagcccggcagcgccaacagcctgagcgcctctgtgtgcaagtgcctgagccagaagatcacccagctgcggggccaggagagccagaagtatgccctgcggagcttccagatggcccgggtcatcttcaacagagatggctgcagcgtgctgcagaggcacagccgggacacccacttctaccccctggaggagggcagcaccagcctggatgatgagaagcccaaccctggcctgagcaaggacatcacccacttcctgctgcagcagaatgtgatgaaggacctgtag

SEQ ID NO: 115352 - DNA, 456 bp, Artificial Sequence
  derived and/or modified sequence
atggccgccagagatgccaccagcggcagcctgtctgaggagagcagcgccctggacctgcccagcgcctgtgacatccgggactatgtgctgcagggccccagccaggaggccaacagcgaggccttcagcagcctggagttccacagcttcccctacagcagtgatgtggaccctgacaccagcaacctgaacatcgagcagaacaacagctggacagctgagaacttctggctggaccctgctgtgaagggccagagcgagaaggaggaggatgatggcctgaggaagagcctggaccgcttctatgagatgtttggccacccccagcccggcagcgccaacagcctgagcgcctctgtgtgcaagtgcctgagccagaagatcacccagctgcggggccaggagagccagaagtatgccctgcggcagcagaatgtgatgaaggacctgtag

SEQ ID NO: 115353 - DNA, 366 bp, Artificial Sequence
  derived and/or modified sequence
atggccgccagagatgccaccagcggcagcctgtctgaggagagcagcgccctggacctgcccagcgcctgtgacatccgggactatgtgctgcagggccccagccaggaggccaacagcgaggccttcagcagcctggagttccacagcttcccctacagcagtgatgtggaccctgacaccagcaacctgaacatcgagcagaacaacagctggacagctgagaacttctggctggaccctgctgtgaagggccagagcgagaaggaggaggatgatggcctgaggaagagcctggaccgcttctatgagatgtttggccacccccagcccggcagcgccaacagcctgagcgcctctgtgtag

SEQ ID NO: 115354 - DNA, 618 bp, Artificial Sequence
  derived and/or modified sequence
atggccgcccgggacgccaccagcggcagcctgagcgaggagagctctgctcttgaccttccatctgcatgtgatatcagggactacgtcttgcaggggccctcacaggaggctaattctgaagctttcagctccctagagttccactcttttccctattctagcgacgttgatccagacacctccaacctcaacatagagcagaataatagctggaccgccgaaaatttctggctagaccctgcagtaaagggccagtccgagaaggaggaggacgatggcctccgcaaatcactggacagattctatgaaatgtttgggcatccccagcccggcagcgctaacagtctctctgcctcagtttgtaagtgcctcagtcagaaaatcactcagctgcgcgggcaggagagccaaaagtacgctctaagatcatttcaaatggcccgtgtaatcttcaatcgggacggatgttccgtcctccagcgtcactcccgggacactcacttctatcctctcgaggagggttctacctcactggacgacgaaaaacctaatcccggcttgagcaaggatattactcactttctactacagcaaaacgtgatgaaagacctgtag

SEQ ID NO: 115355 - DNA, 456 bp, Artificial Sequence
  derived and/or modified sequence
atggccgcccgggacgccaccagcggcagcctgagcgaggagagcagcgcacttgacctgccttccgcatgcgatatccgcgactatgtgttacaggggccttctcaggaggcaaatagtgaggccttttcctccttggagtttcattccttcccatactcgtctgatgttgatcctgatacctcgaacctcaacatagagcagaacaactcctggactgccgaaaacttttggcttgatccagccgtgaaagggcagtctgagaaggaggaggatgatggactccggaagtctctagacagattttacgaaatgtttggccaccctcagccaggctcagctaactccttgtctgcgagcgtgtgcaagtgtctttcacagaaaattactcaactgcgggggcaggagagccaaaagtatgccctgcgacagcagaacgtgatgaaagacttatag

SEQ ID NO: 115356 - DNA, 366 bp, Artificial Sequence
  derived and/or modified sequence
atggccgcccgggacgccaccagcggcagcctgagcgaggagagctcggctcttgacttaccctcagcttgcgacatccgcgactacgtgctccagggacccagccaggaggcaaactccgaggcatttagttccctggagttccacagctttccctactctagcgatgtggatcctgacacttctaacctgaatatagagcaaaataattcctggacagcagagaacttctggctcgatcccgctgtgaaagggcaaagcgagaaggaagaggatgatggcttaagaaagtccctcgacagattttacgagatgttcgggcatccccagcccggctctgcgaactccctctctgcttctgtgtag

SEQ ID NO: 115357 - DNA, 618 bp, Artificial Sequence
  derived and/or modified sequence
atggctgcacgggatgccacctccggttccctttcggaggaatcctccgccctggatctgcccagcgcttgcgacatccgggattatgtcctgcaaggaccatctcaggaggctaactcagaggctttttcatccctggaatttcattccttcccttactcaagcgatgtcgaccctgatactagtaatctcaatatcgaacaaaacaatagctggaccgcggagaacttttggttagaccctgcagttaaaggccaatcagagaaagaagaggacgacggactgagaaagtccctcgacagattttatgagatgttcgggcacccccagcctggcagcgcaaactcgctgtctgcaagcgtgtgtaaatgcctcagccagaagatcactcaactgaggggccaagagtcccaaaaatatgcactgcggtctttccagatggcccgagtcatattcaaccgtgatggctgttctgtcttacagagacacagccgggacacacatttctatcccctggaagagggtagtactagtctcgatgacgaaaagccaaaccccggattgagcaaggacattactcatttcttgctgcagcagaacgtcatgaaggacctgtag

SEQ ID NO: 115358 - DNA, 456 bp, Artificial Sequence
  derived and/or modified sequence
atggctgccagagacgctacatccggctcactgtcggaggaatcctcggccttggacctgccatctgcctgcgatattagagactacgttctccagggccctagccaggaagccaatagcgaggccttctcttccctagagttccattccttcccctactctagtgatgtggacccagacacctcgaatctgaatattgagcagaataattcatggactgctgaaaatttttggctggatcccgcagtaaagggacaaagcgagaaggaggaagacgacgggttgcgcaagagtttagacaggttttacgagatgttcggacaccctcagcctgggtctgccaacagtttgagcgctagcgtgtgcaaatgcctcagccaaaagataacccaacttcgaggccaagagtcacagaagtatgccctgaggcaacagaacgtgatgaaggacctgtag

SEQ ID NO: 115359 - DNA, 366 bp, Artificial Sequence
  derived and/or modified sequence
atggccgcaagggatgcgacttcaggtagcctaagcgaggagagtagcgcgttagacttgccctctgcctgtgacataagagactacgtactccagggcccttctcaggaggctaattcagaggcattctcatcacttgagttccactcatttccctatagctcagacgtggaccccgatacatctaatctcaacatcgaacagaacaatagttggacagctgagaacttctggctggaccctgctgtgaaaggacagtccgaaaaggaagaagacgacgggctacggaaaagcctggatagattctatgaaatgtttggccacccacagccaggctctgccaactcgctgagtgcaagcgtatag

SEQ ID NO: 115360 - protein, 62 aa, Artificial Sequence
  derived and/or modified sequence
MAARDATSGSLSEESSALDLPSACDIRDYVLQGPSQEANSEAFSSLEFHSFPYSSDVDPADL

SEQ ID NO: 115361 - DNA, 189 bp, Artificial Sequence
  derived and/or modified sequence
atggccgccagagacgccaccagcggcagcctgagcgaggagagcagcgccctggacctgcccagcgcctgcgacatcagagactacgtgctgcagggccccagccaggaggccaacagcgaggccttcagcagcctggagttccacagcttcccctacagcagcgacgtggaccccgccgacctgtag

SEQ ID NO: 115362 - DNA, 189 bp, Artificial Sequence
  derived and/or modified sequence
atggcagctcgagacgcaacatctggcagtctgagcgaggagtcatctgctcttgatctgccgagtgcctgtgacatccgggattatgtgctgcaagggccttcccaggaagcaaactccgaggctttcagttcacttgaatttcacagctttccatattcctccgatgtggaccccgccgatttgtag

SEQ ID NO: 115363 - DNA, 189 bp, Artificial Sequence
  derived and/or modified sequence
atggccgccagagatgccaccagcggcagcctgtctgaggagagcagcgccctggacctgcccagcgcctgtgacatccgggactatgtgctgcagggccccagccaggaggccaacagcgaggccttcagcagcctggagttccacagcttcccctacagcagtgatgtggaccctgctgacctgtag

SEQ ID NO: 115364 - DNA, 189 bp, Artificial Sequence
  derived and/or modified sequence
atggccgcccgggacgccaccagcggcagcctgagcgaggagagcagtgcgcttgatcttccctccgcttgtgacatccgtgattatgtactccaagggccaagccaggaagcgaactcggaggccttctcttcactggagttccactcttttccttacagcagtgacgttgatccggccgatctgtag

SEQ ID NO: 115365 - DNA, 189 bp, Artificial Sequence
  derived and/or modified sequence
atggcagcaagggatgccacttctgggagtttaagtgaggagagcagtgccttggatttgccatctgcctgcgacattcgggactatgtcttgcagggtccttcgcaggaggctaacagtgaggcatttagttcactggagtttcacagctttccctattcttctgatgtggaccccgcagacctgtag

SEQ ID NO: 115366 - protein, 324 aa, Artificial Sequence
  derived and/or modified sequence
MREPQLPTAEISLWTVVAAIQAVERKVDAQASQLLNLEGRTGTAEKKLADCEKTAVEFGNHMESKWAVLGTLLQEYGLLQRRLENLENLLRNRNFWVLRLPPGSKGEAPKVPVTFVDIAVYFSEDEWKNLDEWQKELYNNLVKENYKTLMSLDAEGSVPKPDAPVQAEPSYSCPECGKSFGVRKSLIIHHRSHTKERPYECAECEKSFNCHSGLIRHQMTHRGERPYKCSECEKTYSRKEHLQNHQRLHTGERPFQCALCGKSFIRKQNLLKHQRIHTGERPYTCGECGKSFRYKESLKDHLRVHSGGPGPGAPRQLPPPPERD

SEQ ID NO: 115367 - protein, 463 aa, Artificial Sequence
  derived and/or modified sequence
MQFVSTRPQPQQLGIQGLGLDSGSWSWAQALPPEEVCHQEPALRGEMAEGMPPMQAQEWDMDARRPMPFQFPPFPDRAPVFPDRMMREPQLPTAEISLWTVVAAIQAVERKVDAQASQLLNLEGRTGTAEKKLADCEKTAVEFGNHMESKWAVLGTLLQEYGLLQRRLENLENLLRNRNFWVLRLPPGSKGEAPKVPVTFVDIAVYFSEDEWKNLDEWQKELYNNLVKENYKTLMSLDAEGSVPKPDAPVQAEPREEPCVWEQRHPEEREIPMDPEAGAEPLVPAQDASSQVKREDTLCVRGQRGLEERAIPTESITDSPISAQDLLSRIKQEEHQCVWDQQDLADRDIPTDPNSESLISAHDILSWIKQEEQPYPWGPRDSMDGELGLDSGPSDSLLMVKNPPPAPPQPQPQPQPPQPQLQSQPQPQSLPPIAVAENPGGPPSRGLLDDGFQPHQGAALRVR

SEQ ID NO: 115368 - DNA, 975 bp, Artificial Sequence
  derived and/or modified sequence
atgagagagccccagctgcccaccgccgagatcagcctgtggaccgtggtggccgccatccaggccgtggagagaaaggtggacgcccaggccagccagctgctgaacctggagggcagaaccggcaccgccgagaagaagctggccgactgcgagaagaccgccgtggagttcggcaaccacatggagagcaagtgggccgtgctgggcaccctgctgcaggagtacggcctgctgcagagaagactggagaacctggagaacctgctgagaaacagaaacttctgggtgctgagactgccccccggcagcaagggcgaggcccccaaggtgcccgtgaccttcgtggacatcgccgtgtacttcagcgaggacgagtggaagaacctggacgagtggcagaaggagctgtacaacaacctggtgaaggagaactacaagaccctgatgagcctggacgccgagggcagcgtgcccaagcccgacgcccccgtgcaggccgagcccagctacagctgccccgagtgcggcaagagcttcggcgtgagaaagagcctgatcatccaccacagaagccacaccaaggagagaccctacgagtgcgccgagtgcgagaagagcttcaactgccacagcggcctgatcagacaccagatgacccacagaggcgagagaccctacaagtgcagcgagtgcgagaagacctacagcagaaaggagcacctgcagaaccaccagagactgcacaccggcgagagacccttccagtgcgccctgtgcggcaagagcttcatcagaaagcagaacctgctgaagcaccagagaatccacaccggcgagagaccctacacctgcggcgagtgcggcaagagcttcagatacaaggagagcctgaaggaccacctgagagtgcacagcggcggccccggccccggcgcccccagacagctgccccccccccccgagagagactag

SEQ ID NO: 115369 - DNA, 1392 bp, Artificial Sequence
  derived and/or modified sequence
atgcagttcgtgagcaccagaccccagccccagcagctgggcatccagggcctgggcctggacagcggcagctggagctgggcccaggccctgccccccgaggaggtgtgccaccaggagcccgccctgagaggcgagatggccgagggcatgccccccatgcaggcccaggagtgggacatggacgccagaagacccatgcccttccagttcccccccttccccgacagagcccccgtgttccccgacagaatgatgagagagccccagctgcccaccgccgagatcagcctgtggaccgtggtggccgccatccaggccgtggagagaaaggtggacgcccaggccagccagctgctgaacctggagggcagaaccggcaccgccgagaagaagctggccgactgcgagaagaccgccgtggagttcggcaaccacatggagagcaagtgggccgtgctgggcaccctgctgcaggagtacggcctgctgcagagaagactggagaacctggagaacctgctgagaaacagaaacttctgggtgctgagactgccccccggcagcaagggcgaggcccccaaggtgcccgtgaccttcgtggacatcgccgtgtacttcagcgaggacgagtggaagaacctggacgagtggcagaaggagctgtacaacaacctggtgaaggagaactacaagaccctgatgagcctggacgccgagggcagcgtgcccaagcccgacgcccccgtgcaggccgagcccagagaggagccctgcgtgtgggagcagagacaccccgaggagagagagatccccatggaccccgaggccggcgccgagcccctggtgcccgcccaggacgccagcagccaggtgaagagagaggacaccctgtgcgtgagaggccagagaggcctggaggagagagccatccccaccgagagcatcaccgacagccccatcagcgcccaggacctgctgagcagaatcaagcaggaggagcaccagtgcgtgtgggaccagcaggacctggccgacagagacatccccaccgaccccaacagcgagagcctgatcagcgcccacgacatcctgagctggatcaagcaggaggagcagccctacccctggggccccagagacagcatggacggcgagctgggcctggacagcggccccagcgacagcctgctgatggtgaagaaccccccccccgcccccccccagccccagccccagccccagcccccccagccccagctgcagagccagccccagccccagagcctgccccccatcgccgtggccgagaaccccggcggcccccccagcagaggcctgctggacgacggcttccagccccaccagggcgccgccctgagagtgagatag

SEQ ID NO: 115370 - DNA, 975 bp, Artificial Sequence
  derived and/or modified sequence
atgagagaaccccagttgcctaccgctgaaatcagcctgtggaccgttgtggcggccatacaggcggttgagcgcaaagtcgatgcccaagcaagtcagctgctgaacctggagggccgtaccggcacagcagaaaagaagctcgctgactgcgagaagacagccgtggaattcgggaaccatatggagagcaaatgggcagtactgggtactctgcttcaagagtatggactgcttcagcggaggctggaaaatcttgaaaacttactgcggaacaggaacttctgggtgctgagactacccccaggatccaagggggaggcaccaaaggtcccggttaccttcgtcgatattgcagtgtacttttcggaagatgaatggaagaatctagatgagtggcagaaagaactttataacaatctggttaaggagaattataaaacattgatgtccctggacgcggaagggagcgtaccaaaaccagacgcacccgtgcaggcagaaccctcatacagctgtcccgagtgcgggaaaagcttcggagtgaggaagtctctgatcatccatcacagaagtcataccaaggaaaggccatacgagtgcgccgagtgcgaaaagagctttaattgtcacagcggactaatccgccatcagatgactcatagaggggaacgcccctacaagtgtagcgagtgtgaaaaaacttactcccgaaaagaacacctgcagaatcaccagaggctgcacaccggcgagagacccttccagtgcgctctgtgcggaaagtctttcattaggaaacagaatttactcaagcaccagcggattcacacaggagagcgtccctacacctgtggagagtgtggcaaatcattcaggtacaaagagtctctgaaggatcacctgcgcgtacactctgggggtccaggcccgggggccccccggcagctcccacctccgccagagagagattag

SEQ ID NO: 115371 - DNA, 1392 bp, Artificial Sequence
  derived and/or modified sequence
atgcaattcgttagtaccaggccacagcctcagcagttggggatacagggactcggcttggattccggtagctggtcctgggcccaggccctgcctcccgaagaggtgtgtcaccaggaaccggccctgcgtggtgaaatggctgaggggatgcccccaatgcaggcacaggaatgggatatggatgcacgaaggccaatgccattccagtttcctccgtttcccgatcgcgcgccagtgtttccagatcgcatgatgcgggaaccccaactcccgaccgcagaaatcagtctatggacagttgtggccgcaatccaggctgtagaaagaaaagtggatgctcaggctagtcaactgctgaacctggaggggcgcacaggcacagctgaaaagaagcttgcggactgcgagaaaacagccgtagaatttgggaaccacatggagtccaaatgggctgttcttggcactcttttgcaggagtacggcttgctgcagagacgcctagagaacttggagaacctgctgaggaatcggaacttctgggtgttaagactgccaccgggttctaagggagaggcaccaaaagtgccggtgacattcgttgacatagccgtttacttttctgaggacgagtggaaaaaccttgatgagtggcagaaggaactgtacaataacctggtgaaggagaactacaagacgttgatgtcgttggatgcagagggttccgtcccaaagcccgatgccccggtgcaagccgagcctcgggaagagccctgcgtatgggagcagagacatccagaagagcgggagatcccaatggaccctgaggccggtgctgagcctctggtccccgcacaagacgctagctcccaagtcaaaagggaagatactctgtgcgtgcgtggccaaagaggcctggaggagcgcgccatccccaccgagtctatcaccgactcacccatttctgcccaggacttactcagtcgaataaaacaagaagagcatcagtgtgtgtgggatcaacaggatctggctgatcgtgatatacctaccgaccctaattcggagagcttaatttccgcacatgacattttgtcctggattaagcaggaggagcaaccatatccatgggggcctcgagattcaatggatggggaattagggctcgattctgggccaagcgacagcctcttaatggtgaagaaccctcccccagctccaccacagccacaaccccaaccacaaccacctcagccccaacttcagagccaaccccaacctcagagcttaccacccatcgccgttgcagagaaccccggcggtcccccatctcgcgggctcctggacgacgggttccagcctcatcaaggcgccgccctcagggtgaggtag

SEQ ID NO: 115372 - DNA, 975 bp, Artificial Sequence
  derived and/or modified sequence
atgagggagccccagctgcccacagctgagatcagcctgtggacagtggtggccgccatccaggccgtggagaggaaggtggatgcccaggccagccagctgctgaacctggagggccgcactggaacagctgagaagaagctggccgactgtgagaagacagctgtggagtttggaaaccacatggagagcaagtgggccgtgctgggcaccctgctgcaggagtatggcctgctgcagaggcggctggagaacctggagaacctgctgaggaacagaaacttctgggtgctgcggctgcccccaggcagcaaaggagaggcccccaaggtgcctgtgacctttgtggacattgctgtgtacttctctgaagatgagtggaagaacctggatgagtggcagaaggagctgtacaacaacctggtgaaggagaactacaagaccctgatgagcctggatgctgagggctctgtgcccaagccagatgcccctgtgcaggccgagcccagctacagctgcccagaatgtgggaagagctttggagtgaggaagagcctcatcatccaccacaggagccacaccaaggagcggccctatgaatgtgctgaatgtgagaagagcttcaactgccacagcggcctcatccgccaccagatgacccacagaggagagcggccctacaagtgcagtgaatgtgagaagacctacagcaggaaggagcacctgcagaaccaccagaggctgcacactggagagcggcccttccagtgtgccctgtgtgggaagagcttcatcaggaagcagaacctgctgaagcaccagaggatccacactggagagcggccctacacctgtggagaatgtgggaagagcttccgctacaaggagagcctgaaggaccacctgcgggtgcacagcggcggccctggccctggggccccccggcagctgcccccacctcctgagcgggactag

SEQ ID NO: 115373 - DNA, 1392 bp, Artificial Sequence
  derived and/or modified sequence
atgcagtttgtgtccacccggccccagccccagcagctgggcatccagggcctgggcctggacagcggctcctggagctgggcccaggccctgcccccagaggaggtgtgccaccaggagcccgccctgcggggggagatggccgagggcatgccacccatgcaggcccaggagtgggacatggatgcccggcggcccatgcccttccagttcccccccttcccagaccgggcccctgtgtttcctgacaggatgatgagggagccccagctgcccacagctgagatcagcctgtggacagtggtggccgccatccaggccgtggagaggaaggtggatgcccaggccagccagctgctgaacctggagggccgcactggaacagctgagaagaagctggccgactgtgagaagacagctgtggagtttggaaaccacatggagagcaagtgggccgtgctgggcaccctgctgcaggagtatggcctgctgcagaggcggctggagaacctggagaacctgctgaggaacagaaacttctgggtgctgcggctgcccccaggcagcaagggggaggcccccaaggtgcctgtgacctttgtggacattgctgtgtacttctctgaagatgagtggaagaacctggatgagtggcagaaggagctgtacaacaacctggtgaaggagaactacaagaccctgatgagcctggatgctgagggctctgtgcccaagccagatgcccctgtgcaggccgagccccgggaggagccctgtgtgtgggagcagaggcaccctgaggagcgggagatccccatggaccctgaggccggggctgagcccctggtgcctgcccaggatgccagcagccaggtgaagcgggaggacaccctgtgtgtgcggggccagaggggcctggaggagcgggccatccccacagagagcatcacagacagccccatcagcgcccaggacctgctgagccgcatcaagcaggaggagcaccagtgtgtgtgggaccagcaggacctggccgaccgggacatccccacagaccccaacagcgagagcctcatcagcgcccatgacatcctgtcctggatcaagcaggaggagcagccctacccctggggcccccgggacagcatggatggagagctgggcctggacagcggccccagcgacagcctgctgatggtgaagaaccccccaccagccccaccccagccccagccccagccccagcccccccagccccagctgcagagccagccccagccccagagcctgccccccatcgctgtggctgaaaatcctgggggcccccccagccggggcctgctggatgatggcttccagccccaccagggcgccgccctgcgggtgaggtag

SEQ ID NO: 115374 - DNA, 975 bp, Artificial Sequence
  derived and/or modified sequence
atgcgggagccccagctgcccaccgccgagatcagcctgtggaccgtggttgccgccatccaggccgtggagcgtaaggtcgacgctcaggccagccagcttttgaacctcgaaggtaggacaggaaccgccgaaaagaaactggctgactgcgagaaaactgccgtggaattcgggaaccatatggaatcaaaatgggcggtccttggcactctcctacaggagtatggtctcctgcaaagacgactcgagaatctcgaaaaccttctaaggaatagaaacttttgggtcctgcgcctgccacctggttcaaagggagaagccccgaaggtcccagtgacttttgtcgacattgccgtatattttagcgaggatgagtggaaaaatctagatgaatggcaaaaggaactatataataacttggtcaaggagaattacaaaacactgatgtccctggatgctgaaggctcagtgccgaagcctgacgcccccgtgcaggctgagcccagctatagttgcccagaatgcggcaaaagttttggcgtgagaaaatcactgattattcaccatagatctcacaccaaggagcggccttacgaatgtgcggagtgtgagaaatcatttaactgccacagtggcctgattcgtcatcagatgacccatagaggcgagcggccatacaagtgctccgagtgtgaaaagacatactcccgcaaagagcaccttcagaatcaccagcgcctgcatacaggggagcggccattccagtgtgcactgtgtggcaaatcattcattagaaaacaaaacctcctaaagcatcaacggatccataccggcgaaagaccttacacatgtggcgaatgtggcaaatccttcagatacaaggaaagcctaaaggaccatcttcgagtgcactctgggggtccagggccaggcgcgcctaggcagttaccgccacctccagagagggactag
